United States Patent Application Publication US 2023/0026259 A1 - sequence listing, part 53

SEQ ID NO: 146967 - DNA, 5688 bp, Homo sapiens
  Payload ID: 9069
  Gene Symbol: KANK1
  Gene Name: KN motif and ankyrin repeat domains 1
  Uniprot ID: Q14678
  ENST ID: ENST00000619269
  CDS Start-End: 759-4817
gagctccgggtccgcggcggagcgagcgagcggccggcaggttgggaggagcggccgaagaaaaacaggacaaagaaacctgtgtgaattttcagcttttcaccttctctgattttatttcttcctcactcttcctttgacagtcctcgcagtccgcctgagagagtagagaagaccccctcccagaaccttcctgtaaggtctccccgctgacttcctgtagtggatgtgactgtgtgccaggtgcctgccgaagacccctgtcactgactgtgccctttgggaaagagtcaacaatggcctcctcctatggctgacttcgttcatgttcaggctctccagcttgctagtgagaattgccaaggattggttcatggcaggatagaactaaactgatagatgaaagctccacagtgcttcaagacggggtcccgttcatgttaagcagttttccttccttcaaaataaaaaactagcagtccttagggaggacagttttttccttccttttcctattctggctccaacagctgtctcaacacagcccgagatggggagcagcctggcttccaccggcaatagctgtattgtgggagtgtgaaagagaagccaccttttcctccctctgcccaagccacctggcccctttgtcctttctcctcctcgtcctctgaggttgaatgcctttgagaacttgatgcataaaatttgcatgactcctcactcctttctggatctctcattggactcaagccagcatggctcacaccacaaaggttaacggcagtgcctcaggaaaagcaggtgatattctcagtggagaccaggacaaggaacagaaagacccttactttgtggagaccccctatggttatcaactagacttagatttcctcaaatatgtggatgacatacagaagggaaataccatcaaaagactgaacatccagaagaggcggaagccgtccgtgccatgcccagaacccaggaccacatctggtcagcaaggtatatggacttccactgaatccctctcatcctccaacagtgatgacaacaagcagtgccccaacttcctcatagccagaagtcaagttacatcaactccaatctcaaagccacctccccctctggagacctcactcccttttcttaccatcccagaaaatcgacagctgccacctccctcaccacaactcccaaagcataaccttcatgtcaccaagacactgatggagacccggagaagactggaacaggagagagccaccatgcagatgacaccgggtgagttcagaaggcccaggctggccagttttggaggcatgggcaccacaagctccctcccttcttttgtgggttctggaaaccacaatcctgccaagcaccagcttcagaatggataccaaggtaatggggattatggtagctatgccccagctgctcccaccacttcctccatggggagctccatccgccacagccccctgagctcagggatctccaccccagtgaccaacgtgagccccatgcacctgcagcacatccgcgagcagatggccattgctctgaaacgcctgaaggagctggaggagcaggtgcgaaccatccctgtgctccaggtaaagatctctgtcttgcaagaagagaaaaggcagttggtctcacagctgaaaaaccaaagggctgcatcccagatcaatgtctgtggtgtgaggaagcggtcctatagtgcggggaacgcctcccagctggaacagctctcccgggcccgaagaagtggcggggaattatacattgactatgaggaggaagaaatggagaccgtagaacagagcacgcagaggataaaggagttccggcaacttacagcagacatgcaagccctggagcagaagatccaggacagcagctgtgaggcctcctcagagctcagggagaatggagagtgccggtctgtggctgtgggtgccgaggagaacatgaacgacatcgtcgtgtaccacagaggctccaggtcctgtaaggatgcagctgtagggacacttgttgagatgagaaattgtggggtcagcgtgacagaggccatgcttggagtgatgactgaagctgacaaagaaattgagctgcaacagcagaccatagaatccttgaaggaaaagatctatcgcctagaagtacagcttagagaaaccacccatgaccgggagatgactaaactgaaacaagagctgcaggctgctggatcgaggaaaaaggttgacaaagccacgatggcccagccgcttgttttcagtaaggtggtggaggcagtggtgcagaccagagaccaaatggtcggcagtcacatggacctggtggacacgtgtgttgggacctccgtggaaacaaacagtgtaggcatctcctgccagcctgaatgtaagaataaagtcgtagggcctgagctgcctatgaattggtggattgttaaggagagggtggaaatgcatgaccgatgtgctgggaggtctgtggaaatgtgtgacaagagtgtgagtgtggaagtcagcgtctgcgaaacaggcagcaacacagaggagtctgtgaacgacctcacactcctcaagacaaacttgaatctcaaagaagtgcggtctatcggttgtggagattgttctgttgacgtgaccgtctgctctccaaaggagtgcgcctcccggggcgtgaacactgaggctgttagccaggtggaagctgccgtcatggcagtgcctcgtactgcagaccaggacactagcacagatttggaacaggtgcaccagttcaccaacaccgagacggccaccctcatagagtcctgcaccaacacttgtctaagcactttggacaagcagaccagcacccagactgtggagacgcggacagtagctgtaggagaaggccgtgtcaaggacatcaactcctccaccaagacgcggtccattggtgttggaacgttgctttctggccattctgggtttgacaggccatcagctgtgaagaccaaagagtcaggtgtggggcagataaatattaacgacaactatctggttggtctcaaaatgaggactatagcttgtgggccaccacagttgactgtggggctgacagccagcagaaggagcgtgggggttggggatgaccctgtaggggaatctctggagaacccccagcctcaagctccacttggaatgatgactggcctggatcactacattgagcgtatccagaagctgctggcagaacagcagacactgctggctgagaactacagtgaactggcagaagctttcggggaacctcactcacagatgggctccctcaactctcagctcatcagcaccctgtcgtctatcaactctgtcatgaaatctgcaagcactgaagagctgaggaaccctgacttccagaaaaccagtctgggtaaaatcacaggcaattatttgggatatacctgtaagtgtgggggccttcagtcaggaagtcccttaagctcccagacatcccagcctgagcaagaagtggggacctcagaaggaaagccaatcagcagcctggatgccttccccactcaggaaggtacgctgtctccagtgaacctgacagacgaccagatcgccgctggcctctatgcatgtacaaacaatgaaagtacactgaagtccatcatgaagaagaaagatggtaacaaagattcaaatggcgcaaaaaagaatcttcagtttgttggcattaatggagggtatgaaacaacttcaagtgatgattccagctcagatgaaagctcttcttccgagtcagatgacgagtgtgatgtcattgagtatcctcttgaagaagaggaggaggaggaggatgaagacactcggggaatggcagaagggcaccatgcagttaatattgaaggtttgaagtctgccagggtggaagatgaaatgcaggttcaagaatgtgaacctgagaaggtggaaatcagagagaggtatgaattaagtgaaaagatgttgtctgcatgcaacttactgaaaaatactataaatgaccccaaagctttgaccagcaaagatatgaggttctgtctgaacaccctccagcacgagtggttccgcgtgtccagtcagaagtcagccattccagccatggtgggggactacatagctgcttttgaggccatttccccagatgtcctccgctatgtcatcaacttggcagacggcaacggcaacacagccctccattacagcgtgtcccactccaacttcgagattgtgaagctgctgttagatgccgatgtgtgtaatgtggatcaccagaacaaggcaggctacacccccatcatgttggcggccctcgccgctgtggaagcagagaaggacatgcggattgtggaagaactcttcggctgtggggatgtgaatgccaaagctagtcaggcgggacagacggccctcatgctggcggtcagtcacggacggatagacatggtgaagggccttctggcctgtggggctgatgtcaacatccaggatgacgagggctccacggccctcatgtgtgccagcgagcacggacacgtggagattgtcaagctgctgctggcccagcccggctgcaacggtcacctagaggacaacgatggcagcactgcgctctcaatcgccctggaagcaggacacaaggacatcgctgttcttctgtatgcccatgtcaactttgcaaaagcccagtctccgggcacccctaggcttggaaggaagacgtctcctggccccacccaccgaggttcatttgattgattgtatgcaaatagccctttatttacatgccactattaagctgctaattgttcctgttggggtgacagatactgaatgtatacgtattgtgcctgagctcaccagcaaacagaagcatcaagcccaggggtaaaggctgaagctttcacagtgcagagactgctagcctgggcacacacacctcctttctggccgtcttctgtgtagggcacactttaacccagtctctgttgctgttgagtctctgctccgttttgtacagtcacagggaattctgatctgaaggggcaccttctgttcactcccacaaagtggtgtctggttctcactgagacgttttaagatttttccacaaatatttatatgtactaaatgtggaaccattagaaagttcttccaaaatctcattccagcatagttttggatttttcttttgtcttattttaaaataaggaagtcgagatgactttgatcattggtaacttgggcctgggccagacaaagtataaaacttacaaaagaatattctcatttggtcttaactaggtagatgtaatatatgactttttataaaaagggtatctatatgaacttgacacagtattttcagcttttgtattccatactaaagccatgaagaactacacgtaacatcatcatttgtattaattgcacaactccaatgctaaaggttggattgtgttagaggaatcggctctgtatttgcctctagagaaacacagtgttctctttgtatttatggattcctttttaccgtgtcacatttactttggtcctctatgtatttaaatgtttgaagtgccttagactcttgccatattttcaaaataaaattccattaagctctttt

SEQ ID NO: 146968 - DNA, 576 bp, Homo sapiens
  Payload ID: 9070
  Gene Symbol: KANK2
  Gene Name: KN motif and ankyrin repeat domains 2
  ENST ID: ENST00000592903
  CDS Start-End: 569-576
gctcgggcggcgggacccagggaaggcagcggccggagcgcgcaagaattagctaggcgtggtggcaggtgcctgtaatcccagctactcaggaggctgaggcaggagaatcgcttgaacctgggaggcagaggttgccgtgagctgagatcgcgccattgcactccagcctgggcgacaagagcaaaactccgtctcagaaaaaaaaaaaaaaaagagttgatgtgttgaaagacagagaagcgaagacagagacgtggaaagacagggagagagacacggagagagacgcagaaggacagagacgtggagagagacgcagagagacagagacgtggagagacacagagagacgtggagagacacagagagacttggagagagacaaagcaagacaggacgggagaacaaggacaagctcaggtgcccctggagccccagccctgccttcatgcccagcaggtgccctacctggcccatcctcccaaggtaagcctcagccggtgctgcaggcagtctgactcgcagtccctcaagtgacttccaaggagcatctgtagaaaagaagatggccca

SEQ ID NO: 146969 - DNA, 2952 bp, Homo sapiens
  Payload ID: 9070
  Gene Symbol: KANK2
  Gene Name: KN motif and ankyrin repeat domains 2
  ENST ID: ENST00000588787
  CDS Start-End: 1-664
ggaaaagtacctggacaatcccaacgccctcacagagcgggagctgaaagtggcctacaccacagtgctgcaggagtggctgcgcctggcctgccgcagcgacgcacaccccgagctggtgcggcggcacctggtcacgttccgggccatgtctgcgcggctgctggactacgtggtcaacatcgccgacagcaacggcaacacagccctgcactactccgtgtctcatgccaacttccccgtggtgcagcagctgctcgacagcggtgtctgcaaggtggacaaacagaaccgtgctggctacagccctattatgctcaccgccctggccaccctgaagacccaggacgacatcgagactgtccttcagctcttccggcttggcaacatcaatgccaaagccagccaggcaggacagacggccctgatgctggccgtcagccacgggcgggtggacgttgtcaaagccctgctggcctgtgaggcagatgtcaacgtgcaagatgatgacggctccacggccctcatgtgcgcctgtgagcacggccacaaggagatcgcggggctgctgctggccgtgcccagctgtgacatctcactcacagatcgctttgccccaatgtcagatgacgagagccctacatcatcctcggcagaagagtagccgtgagggaggcggggaccagccagaccgggagcaaaccgtcccttgtccccgtctcctccctgttcccgttcctccctggcccaccccactcacactccccaaggcccacggctcaaaggcaagcgagctctccctctgcttccctgggggagccccgacggccacaggactccagctccaagtgggttttcttggctcccctgttcaaagtggccacagcgcagaccgaagcaaaattcttgtatacattggcgccagggctgatgctggggtgtgggttttatgaagaacattgagaacaatcagctggtaattatggatggaggaagagggagaggaaaaaaatattgtatttttgaatcattgttgcaggagggggtgggaatcttaggatttgttgccagatttgaaagtcactggaacttgcatattttcattttaatcctaagtgttattacgcaccagttggggttcacccttcatcccccacatttaattgtctgatatagaatagtgttgtgtccactgccccgctagacggctttcttaggggaattttcttctggttgtttcacaagacagattctgtccttgtcacccgggacagaaaactcagtcttttcaccctcattcagatgaagggactcaggacaggctctgtgacttacagggacccaatcaattcacaatgagaaattaccggccaggcgtggtgactcacgtctgtaatcccagcactttgggagggcaaggcaagagcttgagcttgagcctagacgttaaagaccagcctgggcaacacagcaagacccatctctacaagaaatttaaaaactagccaggcgtggtggtgcgcgcctgtagtcccagctacttgggaggctgagccctggaggtcgaggctacagtgagctatgatcacaccattgcacttcagcctgggcgacacagcgagaccctgtctcaagaaagaaaagaaaaagagacaaattacccagaaacccctcccttccccacatggaggccttggcaaatgttaattttcctagaaaatccttcagacctgaagacgcaggaaaagaatctggctctcagggtggcttctgcgtccccgccgccaggccccagactatggtcacagggccgtcctgttcctccccgggactccagaatttctctcctcaaaggaaagaaaacagggcatgcgcttgttggcaaaacgcagggccggctcccaaaaaccccatgtgtgtacgattaaaagttggccgtccccaggcctcccagcgcaaacttcaagagacagggctttgctgaaaaccaaacatgggccagctgggctttttaacaacctagagactttccggagctgcctggaacagagcctgcgggaaacggggcttgccagagacactcacagtttccttcatggcctgttttggtcccctaagaatctccacatcattgtctttcttgtgccttttccttggtgagcaacagaaagggaagggttccaagcctctaaaaatgtgctttgtgatcaggagtgcgctccaaaccaaatacgcgcgctgccctttcgaggccagtgagctcagcctccaaggctttaaagccacatttcagcaagagaaagcgctgagagctcgcaggttcattaaagaaggcaaagcactggtttctctccttagaaaagtaggtttcttggcttgatgtagactggcttgctttgatttttagtgaagggaatgtacgtaaaacaaaatagggcttggctggtcaaaggagacaagcaggatggatggatggatggatggatggatggatggatggatggatggatgaatagatagatggtgtttgcatgtaaattgcagagaaaacaaaaccaaagctgattggaaacaattaattgtgggtgtctgagggggaaggtcgcagctttgggcagctttgagaagcggtacaagagttctgtgcctgtgtgtccagccctggagccagccagtgcatttattttaagctcttagaagcaactccttggcccaggaatgcgtgacccctgagatgggtccacgcatctctctacacttccttctctccgtgggatactggactcgtgcctctgcgcccattctcttctcacgcatatccatgagctttaatttcactttctgatcacggtacgtccataaagccagtattacacttaaatgaagtattcttttttgtaatcgttttttttagaaggtaaacaaatttaataaagctaccaataatgttga

SEQ ID NO: 146970 - DNA, 5162 bp, Homo sapiens
  Payload ID: 9070
  Gene Symbol: KANK2
  Gene Name: KN motif and ankyrin repeat domains 2
  Uniprot ID: Q63ZY3
  ENST ID: ENST00000586659
  CDS Start-End: 316-2871
gcgggacccagggaaggcagcggccggagcgcgcaaggtgttgaaagacagagaagcgaagacagagacgtggaaagacagggagagagacacggagagagacgcagaaggacagagacgtggagagagacgcagagagacagagacgtggagagacacagagagacgtggagagacacagagagacttggagagagacaaagcaagacaggacgggagaacaaggacaagctcaggtaagcctcagccggtgctgcaggcagtctgactcgcagtccctcaagtgacttccaaggagcatctgtagaaaagaagatggcccaggtcctgcacgtgcctgctcccttcccagggacccctggcccagcctccccacctgccttccctgccaaggaccccgatccaccctactccgtggagaccccctatggctaccgcctggacctggacttcctcaagtacgtggatgacatcgagaagggccacacgctgcgacgcgtggcagtgcagcgccgcccccgcctgagctcgctgccccgtggccctggctcctggtggacgtccactgagtcgctgtgctccaatgccagtggggacagccgccactcagcctattcctactgcggccgtggcttctaccctcagtatggtgctctggagacccgcggtggcttcaatccgcgggtggagcgcacgctgctggatgcccgtcgccgtctcgaggaccaggcggccacacccaccggcctgggctccctgacccccagtgcggccggctcgacagcctccctggtgggcgtggggttgccacccccgacaccacggagttcaggactgtccacaccggtgcctcccagtgccgggcacctggcccacgtgcgggagcagatggcgggtgccctgcggaagctgcggcagctggaggagcaggtgaagctgatccctgtgctccaggtgaagctctcggtgctccaggaggaaaagcggcagctcacagtacaacttaagagccagaagttcctgggccaccccacagcgggccggggtcgcagcgagctctgcctggacctccccgatcccccagaggacccagtggcactggagacccggagtgtgggcacctgggttcgagaacgggacttgggcatgcctgatggggaggctgccctcgccgccaaggtcgctgtgctggagacccagctcaagaaggcgctgcaggagctgcaggcagctcaggcccggcaggctgacccccagccccaggcctggccaccgccggacagcccggtccgcgtggatacagtccgggtggtagaagggccacgggaggtggaggtggtggccagcacagccgctggcgcccccgcacagcgggcccagagcctggagccttacggcacagggctgagggccctggcaatgcctggtaggcctgagagcccacctgtgttccgcagccaggaggtggtggagacaatgtgcccagtgcccgctgcagctaccagcaacgtccatatggtgaagaagattagcatcacagagcgaagctgcgatggagcagcaggcctcccagaagttcctgccgaatcgtcttcgtcacccccggggtccgaggtagcctcccttacacagcctgagaagagcacaggccgagtgcccacccaggagcccacccacagggagcccaccaggcaagcagcctcccaagagtccgaggaggccgggggcaccggcgggcccccggcaggcgtgcgatctatcatgaaacggaaagaggaggttgcagaccccacggcccaccggaggagcctccagttcgtgggggtcaacggcgggtatgagtcgtcatccgaggactccagcacagcagagaacatctcagacaacgacagcacagagaacgaggccccagagccgagggagagggttccgagtgtggccgaagccccccagctcaggcctgcagggacggcagcggccaagaccagccggcaggagtgtcagctgtctcgagaatctcagcacatacccactgctgagggggcatcaggatcaaacacggaggaggagatcaggatggagctaagccctgacctcatctcagcctgcttggccctggaaaagtacctggacaatcccaacgccctcacagagcgggagctgaaagtggcctacaccacagtgctgcaggagtggctgcgcctggcctgccgcagcgacgcacaccccgagctggtgcggcggcacctggtcacgttccgggccatgtctgcgcggctgctggactacgtggtcaacatcgccgacagcaacggcaacacagccctgcactactccgtgtctcatgccaacttccccgtggtgcagcagctgctcgacagcggtgtctgcaaggtggacaaacagaaccgtgctggctacagccctattatgctcaccgccctggccaccctgaagacccaggacgacatcgagactgtccttcagctcttccggcttggcaacatcaatgccaaagccagccaggcaggacagacggccctgatgctggccgtcagccacgggcgggtggacgttgtcaaagccctgctggcctgtgaggcagatgtcaacgtgcaagatgatgacggctccacggccctcatgtgcgcctgtgagcacggccacaaggagatcgcggggctgctgctggccgtgcccagctgtgacatctcactcacagatcgcgatgggagcacagctctgatggtggccttggacgcagggcagagtgagattgcgtccatgctgtattcccgcatgaacatcaagtgctcgtttgccccaatgtcagatgacgagagccctacatcatcctcggcagaagagtagccgtgagggaggcggggaccagccagaccgggagcaaaccgtcccttgtccccgtctcctccctgttcccgttcctccctggcccaccccactcacactccccaaggcccacggctcaaaggcaagcgagctctccctctgcttccctgggggagccccgacggccacaggactccagctccaagtgggttttcttggctcccctgttcaaagtggccacagcgcagaccgaagcaaaattcttgtatacattggcgccagggctgatgctggggtgtgggttttatgaagaacattgagaacaatcagctggtaattatggatggaggaagagggagaggaaaaaaatattgtatttttgaatcattgttgcaggagggggtgggaatcttaggatttgttgccagatttgaaagtcactggaacttgcatattttcattttaatcctaagtgttattacgcaccagttggggttcacccttcatcccccacatttaattgtctgatatagaatagtgttgtgtccactgccccgctagacggctttcttaggggaattttcttctggttgtttcacaagacagattctgtccttgtcacccgggacagaaaactcagtcttttcaccctcattcagatgaagggactcaggacaggctctgtgacttacagggacccaatcaattcacaatgagaaattaccggccaggcgtggtgactcacgtctgtaatcccagcactttgggagggcaaggcaagagcttgagcttgagcctagacgttaaagaccagcctgggcaacacagcaagacccatctctacaagaaatttaaaaactagccaggcgtggtggtgcgcgcctgtagtcccagctacttgggaggctgagccctggaggtcgaggctacagtgagctatgatcacaccattgcacttcagcctgggcgacacagcgagaccctgtctcaagaaagaaaagaaaaagagacaaattacccagaaacccctcccttccccacatggaggccttggcaaatgttaattttcctagaaaatccttcagacctgaagacgcaggaaaagaatctggctctcagggtggcttctgcgtccccgccgccaggccccagactatggtcacagggccgtcctgttcctccccgggactccagaatttctctcctcaaaggaaagaaaacagggcatgcgcttgttggcaaaacgcagggccggctcccaaaaaccccatgtgtgtacgattaaaagttggccgtccccaggcctcccagcgcaaacttcaagagacagggctttgctgaaaaccaaacatgggccagctgggctttttaacaacctagagactttccggagctgcctggaacagagcctgcgggaaacggggcttgccagagacactcacagtttccttcatggcctgttttggtcccctaagaatctccacatcattgtctttcttgtgccttttccttggtgagcaacagaaagggaagggttccaagcctctaaaaatgtgctttgtgatcaggagtgcgctccaaaccaaatacgcgcgctgccctttcgaggccagtgagctcagcctccaaggctttaaagccacatttcagcaagagaaagcgctgagagctcgcaggttcattaaagaaggcaaagcactggtttctctccttagaaaagtaggtttcttggcttgatgtagactggcttgctttgatttttagtgaagggaatgtacgtaaaacaaaatagggcttggctggtcaaaggagacaagcaggatggatggatggatggatggatggatggatggatggatggatggatgaatagatagatggtgtttgcatgtaaattgcagagaaaacaaaaccaaagctgattggaaacaattaattgtgggtgtctgagggggaaggtcgcagctttgggcagctttgagaagcggtacaagagttctgtgcctgtgtgtccagccctggagccagccagtgcatttattttaagctcttagaagcaactccttggcccaggaatgcgtgacccctgagatgggtccacgcatctctctacacttccttctctccgtgggatactggactcgtgcctctgcgcccattctcttctcacgcatatccatgagctttaatttcactttctgatcacggtacgtccataaagccagtattacacttaaatgaagtattcttttttgtaatcgttttttttagaaggtaaacaaatttaataaagctaccaataatgttgatga

SEQ ID NO: 146971 - DNA, 542 bp, Homo sapiens
  Payload ID: 9070
  Gene Symbol: KANK2
  Gene Name: KN motif and ankyrin repeat domains 2
  ENST ID: ENST00000588724
  CDS Start-End: 409-542
tgcggcgcgcgcgaagacgctcgggcggcgggacccagggaaggcagcggccggagcgcgcaaggtgttgaaagacagagaagcgaagacagagacgtggaaagacagggagagagacacggagagagacgcagaaggacagagacgtggagagagacgcagagagacagagacgtggagagacacagagagacgtggagagacacagagagacttggagagagacaaagcaagacaggacgggagaacaaggacaagctcaggtgcccctggagccccagccctgccttcatgcccagcaggtgccctacctggcccatcctcccaaggtaagcctcagccggtgctgcaggcagtctgactcgcagtccctcaagtgacttccaaggagcatctgtagaaaagaagatggcccaggtcctgcacgtgcctgctcccttcccagggacccctggcccagcctccccacctgccttccctgccaaggaccccgatccaccctactccgtggagaccccctatggctaccgcctggacctgga

SEQ ID NO: 146972 - DNA, 2703 bp, Homo sapiens
  Payload ID: 9070
  Gene Symbol: KANK2
  Gene Name: KN motif and ankyrin repeat domains 2
  Uniprot ID: Q63ZY3
  ENST ID: ENST00000589894
  CDS Start-End: 1-2526
atggcccaggtcctgcacgtgcctgctcccttcccagggacccctggcccagcctccccacctgccttccctgccaaggaccccgatccaccctactccgtggagaccccctatggctaccgcctggacctggacttcctcaagtacgtggatgacatcgagaagggccacacgctgcgacgcgtggcagtgcagcgccgcccccgcctgagctcgctgccccgtggccctggctcctggtggacgtccactgagtcgctgtgctccaatgccagtggggacagccgccactcagcctattcctactgcggccgtggcttctaccctcagtatggtgctctggagacccgcggtggcttcaatccgcgggtggagcgcacgctgctggatgcccgtcgccgtctcgaggaccaggcggccacacccaccggcctgggctccctgacccccagtgcggccggctcgacagcctccctggtgggcgtggggttgccacccccgacaccacggagttcaggactgtccacaccggtgcctcccagtgccgggcacctggcccacgtgcgggagcagatggcgggtgccctgcggaagctgcggcagctggaggagcaggtgaagctgatccctgtgctccaggtgaagctctcggtgctccaggaggaaaagcggcagctcacagtacaacttaagagccagaagttcctgggccaccccacagcgggccggggtcgcagcgagctctgcctggacctccccgatcccccagaggacccagtggcactggagacccggagtgtgggcacctgggttcgagaacgggacttgggcatgcctgatggggaggctgccctcgccgccaaggtcgctgtgctggagacccagctcaagaaggcgctgcaggagctgcaggcagctcaggcccggcaggctgacccccagccccaggcctggccaccgccggacagcccggtccgcgtggatacagtccgggtggtagaagggccacgggaggtggaggtggtggccagcacagccgctggcgcccccgcacagcgggcccagagcctggagccttacggcacagggctgagggccctggcaatgcctggtaggcctgagagcccacctgtgttccgcagccaggaggtggtggagacaatgtgcccagtgcccgctgcagctaccagcaacgtccatatggtgaagaagattagcatcacagagcgaagctgcgatggagcagcaggcctcccagaagttcctgccgaatcgtcttcgtcacccccggggtccgaggtagcctcccttacacagcctgagaagagcacaggccgagtgcccacccaggagcccacccacagggagcccaccaggcaagcagcctcccaagagtccgaggaggccgggggcaccggcgggcccccggcaggcgtgcgatctatcatgaaacggaaagaggaggttgcagaccccacggcccaccggaggagcctccagttcgtgggggtcaacggcgggtatgagtcgtcatccgaggactccagcacagcagagaacatctcagacaacgacagcacagagaacgaggccccagagccgagggagagggttccgagtgtggccgaagccccccagctcaggcctgcagggacggcagcggccaagaccagccggcaggagtgtcagctgtctcgagaatctcagcacatacccactgctgagggggcatcaggatcaaacacggaggaggagatcaggatggagctaagccctgacctcatctcagcctgcttggccctggaaaagtacctggacaatcccaacgccctcacagagcgggagctgaaagtggcctacaccacagtgctgcaggagtggctgcgcctggcctgccgcagcgacgcacaccccgagctggtgcggcggcacctggtcacgttccgggccatgtctgcgcggctgctggactacgtggtcaacatcgccgacagcaacggcaacacagccctgcactactccgtgtctcatgccaacttccccgtggtgcagcagctgctcgacagcggtgtctgcaaggtggacaaacagaaccgtgctggctacagccctattatgctcaccgccctggccaccctgaagacccaggacgacatcgagactgtccttcagctcttccggcttggcaacatcaatgccaaagccagccaggcaggacagacggccctgatgctggccgtcagccacgggcgggtggacgttgtcaaagccctgctggcctgtgaggcagatgtcaacgtgcaagatgatgacggctccacggccctcatgtgcgcctgtgagcacggccacaaggagatcgcggggctgctgctggccgtgcccagctgtgacatctcactcacagatcgcgatgggagcacagctctgatggtggccttggacgcagggcagagtgagattgcgtccatgctgtattcccgcatgaacatcaagtgctcggtgagtctcaatccggccgggtaggcacgggatgggtgggtctctgaaaggacagagatttgttgtttttgtttttgaggcagagtctcactctgtcgcccagggtggagtgcggtggcacgatctgggctcattgcaacctccgcctcccggcttcaagccattctgctgcctcagcctcctgagtagctgggataacag

SEQ ID NO: 146973 - DNA, 3048 bp, Homo sapiens
  Payload ID: 9070
  Gene Symbol: KANK2
  Gene Name: KN motif and ankyrin repeat domains 2
  Uniprot ID: Q63ZY3
  ENST ID: ENST00000589359
  CDS Start-End: 469-3048
gcggcgcgcgcgaagacgctcgggcggcgggacccagggaaggcagcggccggagcgcgcaaggggtgagcctccaggcaaatggaaaacggaatttcctgcaattggtgaccatgtgttccaggtgttgaaagacagagaagcgaagacagagacgtggaaagacagggagagagacacggagagagacgcagaaggacagagacgtggagagagacgcagagagacagagacgtggagagacacagagagacgtggagagacacagagagacttggagagagacaaagcaagacaggacgggagaacaaggacaagctcaggtgcccctggagccccagccctgccttcatgcccagcaggtgccctacctggcccatcctcccaaggtaagcctcagccggtgctgcaggcagtctgactcgcagtccctcaagtgacttccaaggagcatctgtagaaaagaagatggcccaggtcctgcacgtgcctgctcccttcccagggacccctggcccagcctccccacctgccttccctgccaaggaccccgatccaccctactccgtggagaccccctatggctaccgcctggacctggacttcctcaagtacgtggatgacatcgagaagggccacacgctgcgacgcgtggcagtgcagcgccgcccccgcctgagctcgctgccccgtggccctggctcctggtggacgtccactgagtcgctgtgctccaatgccagtggggacagccgccactcagcctattcctactgcggccgtggcttctaccctcagtatggtgctctggagacccgcggtggcttcaatccgcgggtggagcgcacgctgctggatgcccgtcgccgtctcgaggaccaggcggccacacccaccggcctgggctccctgacccccagtgcggccggctcgacagcctccctggtgggcgtggggttgccacccccgacaccacggagttcaggactgtccacaccggtgcctcccagtgccgggcacctggcccacgtgcgggagcagatggcgggtgccctgcggaagctgcggcagctggaggagcaggtgaagctgatccctgtgctccaggtgaagctctcggtgctccaggaggaaaagcggcagctcacagtacaacttaagagccagaagttcctgggccaccccacagcgggccggggtcgcagcgagctctgcctggacctccccgatcccccagaggacccagtggcactggagacccggagtgtgggcacctgggttcgagaacgggacttgggcatgcctgatggggaggctgccctcgccgccaaggtcgctgtgctggagacccagctcaagaaggcgctgcaggagctgcaggcagctcaggcccggcaggctgacccccagccccaggcctggccaccgccggacagcccggtccgcgtggatacagtccgggtggtagaagggccacgggaggtggaggtggtggccagcacagccgctggcgcccccgcacagcgggcccagagcctggagccttacggcacagggctgagggccctggcaatgcctggtaggcctgagagcccacctgtgttccgcagccaggaggtggtggagacaatgtgcccagtgcccgctgcagctaccagcaacgtccatatggtgaagaagattagcatcacagagcgaagctgcgatggagcagcaggcctcccagaagttcctgccgaatcgtcttcgtcacccccggggtccgaggtagcctcccttacacagcctgagaagagcacaggccgagtgcccacccaggagcccacccacagggagcccaccaggcaagcagcctcccaagagtccgaggaggccgggggcaccgcacctccgctgtcctcccctccaggcgggcccccggcaggcgtgcgatctatcatgaaacggaaagaggaggttgcagaccccacggcccaccggaggagcctccagttcgtgggggtcaacggcgggtatgagtcgtcatccgaggactccagcacagcagagaacatctcagacaacgacagcacagagaacgaggccccagagccgagggagagggttccgagtgtggccgaagccccccagctcaggcctgcagggacggcagcggccaagaccagccggcaggagtgtcagctgtctcgagaatctcagcacatacccactgctgagggggcatcaggatcaaacacggaggaggagatcaggatggagctaagccctgacctcatctcagcctgcttggccctggaaaagtacctggacaatcccaacgccctcacagagcgggagctgaaagtggcctacaccacagtgctgcaggagtggctgcgcctggcctgccgcagcgacgcacaccccgagctggtgcggcggcacctggtcacgttccgggccatgtctgcgcggctgctggactacgtggtcaacatcgccgacagcaacggcaacacagccctgcactactccgtgtctcatgccaacttccccgtggtgcagcagctgctcgacagcggtgtctgcaaggtggacaaacagaaccgtgctggctacagccctattatgctcaccgccctggccaccctgaagacccaggacgacatcgagactgtccttcagctcttccggcttggcaacatcaatgccaaagccagccaggcaggacagacggccctgatgctggccgtcagccacgggcgggtggacgttgtcaaagccctgctggcctgtgaggcagatgtcaacgtgcaagatgatgacggctccacggccctcatgtgcgcctgtgagcacggccacaaggagatcgcggggctgctgctggccgtgcccagctgtgacatctcactcacagatcgcgatgggagcacagctctgatggtggccttggacgcagggcagagtgagattgcgtccatgctgtattcccgcatgaacatcaagtgctcgtttgccccaatgtcagatgacgagagccctacatcatcctcggcagaagagtag

SEQ ID NO: 146974 - DNA, 624 bp, Homo sapiens
  Payload ID: 9070
  Gene Symbol: KANK2
  Gene Name: KN motif and ankyrin repeat domains 2
  ENST ID: ENST00000592675
  CDS Start-End: 257-624
gagacacagagagacttggagagagacaaagcaagacaggacgggagaacaaggacaagctcaggtgaagctctcggtgctccaggaggaaaagcggcagctcacagtacaacttaagagccagaagttcctgggccaccccacagcgggccggggtcgcagcgagctctgcctggacctccccgatcccccagaggacccagtggcactggagacccggagtgtgggcacctgggttcgagaacgggacttgggcatgcctgatggggaggctgccctcgccgccaaggtcgctgtgctggagacccagctcaagaaggcgctgcaggagctgcaggcagctcaggcccggcaggctgacccccagccccaggcctggccaccgccggacagcccggtccgcgtggatacagtccgggtggtagaagggccacgggaggtggaggtggtggccagcacagccgctggcgcccccgcacagcgggcccagagcctggagccttacggcacagggctgagggccctggcaatgcctggtaggcctgagagcccacctgtgttccgcagccaggaggtggtggagacaatgtgcccagtgcccgctgcagctaccagcaacgtcca

SEQ ID NO: 146975 - DNA, 923 bp, Homo sapiens
  Payload ID: 9070
  Gene Symbol: KANK2
  Gene Name: KN motif and ankyrin repeat domains 2
  ENST ID: ENST00000590685
  CDS Start-End: 481-923
agagaaaattgtttccataaaggggaaaggcttcactcctagctgcctccccaactttccctaccccttccccccgacccagtccaggcctgacccagctctcagctttggggtcactgggggtccccttcgccatgctttgcctctctttgtccccctgcgtctctgtctcctcagatccttgcaggaagacgaggttcccttcttccccaaccccttagcgcctcaacccccatccttccgtgtggccagctccgggcctgggctgaggggagggggtgcaggaagggtggggcctgttgggcttggggccccccagccccagggctatgtggaggctgggctatgggaacagctggagcctgtccagggcctggacagatgtgcaagcaggcagtgaggtaagcctcagccggtgctgcaggcagtctgactcgcagtccctcaagtgacttccaaggagcatctgtagaaaagaagatggcccaggtcctgcacgtgcctgctcccttcccagggacccctggcccagcctccccacctgccttccctgccaaggaccccgatccaccctactccgtggagaccccctatggctaccgcctggacctggacttcctcaagtacgtggatgacatcgagaagggccacacgctgcgacgcgtggcagtgcagcgccgcccccgcctgagctcgctgccccgtggccctggctcctggtggacgtccactgagtcgctgtgctccaatgccagtggggacagccgccactcagcctattcctactgcggccgtggcttctaccctcagtatggtgctctggagacccgcggtggcttcaatccgcgggtggagcgcacgctgctggatgcccgtcgccgtctcgaggaccaggcggccacacccaccggcctgggctccct

SEQ ID NO: 146976 - DNA, 2787 bp, Homo sapiens
  Payload ID: 9071
  Gene Symbol: KANK3
  Gene Name: KN motif and ankyrin repeat domains 3
  Uniprot ID: Q6NY19
  ENST ID: ENST00000330915
  CDS Start-End: 67-2532
gggctcgggtgcgggcgcggctggggctgcggcttcagggtgcctctgacagctgctgcaggaaacatggccaagtttgccctgaatcagaacctgcccgacctgggcggcccccgcctgtgcccggtccccgccgccgggggcgcacgcagcccgagctcgccctactcggtggagacgccctacggcttccacctggacctggacttcctcaagtacatagaggagctggagcgtggccccgctgcccgccgcgccccgggacccccgacctcgcgccgtccccgcgcgccccggcccggcctcgcgggcgcacgtagcccaggcgcctggacatccagcgagtccctggccagtgacgacggtggagcaccgggcatactctcccagggcgcgccctcggggctcctgatgcagccgctgtcgccgcgcgcgcccgtgcgcaacccgcgcgtcgagcacacgctccgggagaccagccggcggctggagctggcgcagacacacgagcgcgcgcccagccccggccgcggggtcccgcgcagcccacgcgggtccggccgcagcagccccgcccctaaccttgcccctgcttcgcccggccctgcccaactgcagctggtgcgcgagcagatggccgcggcgctgcggcgcctgcgcgagctcgaggaccaggcgcgaacgctgcccgagctgcaggagcaggtgcgcgcgctgcgcgccgagaaggcgcggctgctggccgggcgcgcgcagcccgagccggacggggaggctgagacgcgcccggacaagctcgcccagctgcggcggctcaccgagcgcctggccacctccgagcgcggcggccgtgccagggccagcccccgggctgacagcccagacggcctggctgcagggcgcagcgagggcgcgctccaggtcctcgacggggaggtcgggagtctcgatgggacgccccagacccgggaggtggccgccgaggccgtgcccgagacccgagaagcgggtgcccaggccgtgccggagacccgggaggccggcgtggaggctgcccccgagaccgtggaggcggacgcgtgggtgaccgaggcgctgctggggctgcctgcggccgccgagcgcgagctagagctgctgcgcgccagtctggagcaccagcgcggggtgagtgagcttctgcggggccggttgcgggagctggaggaagcccgcgaggctgcggaggaggcagcggcgggggcccgggcccagctacgcgaggccaccacccagaccccgtggagctgtgccgaaaaggccgcgcagaccgagtccccggcagaggcgccctccttgactcaggagagctcgcccggatccatggacggagacagggccgtggcgcccgcgggcatcctcaaatccatcatgaagaagagagacggcacacctggtgcccaacccagctccggacccaagagcctgcagtttgttggggtcctcaacggagagtacgagagctcctccagcgaggacgccagcgacagcgatggcgacagcgagaacggtggcgccgagcccccgggtagctcctcgggctccggggatgacagcggcgggggatccgactcgggcacccctggccctcccagcggcggggacatccgggaccctgagcccgaggcggaggcagagcctcagcaggtggcacaggggaggtgcgagctgagcccgcgtctgagggaggcgtgcgtagcgctgcagcggcagctgagccggccccgcggagtagccagcgacggcggcgcagtgcgcctcgtggcccaggagtggtttcgagtgtccagccagcggcgctctcaggcggagcccgtggccaggatgctggaaggggtgaggcgcctgggacccgaactgctggcgcacgtggtgaacctggcggatggcaacgggaacacggccctgcactacagtgtgtcccacgggaacctggccatcgcaagcctgctcctggatacgggggcctgcgaggtcaaccgccagaaccgagccggctactcggccctcatgctggctgcactcacctctgtgaggcaggaagaggaggacatggctgtggtccagagactcttctgcatgggtgatgtcaatgccaaggccagtcagacggggcagacagccctcatgctggccatcagccatggccgacaggacatggtggcaaccctactggcgtgtggggctgatgtgaatgcgcaggatgcggatggggccacagcgctgatgtgtgccagtgagtatgggcgcctggacaccgtgcggctgctgctcacccagccaggctgtgaccctgccatcctggacaatgagggcaccagtgccctggccatcgccctggaggctgagcaggatgaggtggccgctctgctacatgcccacctgagctcgggccagcccgacacccagagcgagtcaccccctggctcccagacagccacacctggtgaaggagaatgcggtgacaatggagagaacccccaggttcagtaagctgcctcgtctggctcactacacctagctgtggggagatctcctcgtcagtcacctcagcctttggcgcacagaagggtccagggtcccctgctcagaggctaacactggccgaagagaaaggcaatttcagttggggtgactgtggcaggaaggggctcactctggccccaccaaggtgaggtggggaccaagtgatagagccctgatccacccactctctgaaacttctttgctaataaaacattcctacta

SEQ ID NO: 146977 - DNA, 506 bp, Homo sapiens
  Payload ID: 9071
  Gene Symbol: KANK3
  Gene Name: KN motif and ankyrin repeat domains 3
  ENST ID: ENST00000595639
  CDS Start-End: 67-506
gggctcgggtgcgggcgcggctggggctgcggcttcagggtgcctctgacagctgctgcaggaaacatggccaagtttgccctgaatcagaacctgcccggcatcctcaaatccatcatgaagaagagagacggcacacctggtgcccaacccagctccggacccaagagcctgcagtttgttggggtcctcaacggagagtacgagagctcctccagcgaggacgccagcgacagcgatggcgacagcgagaacggtggcgccgagcccccgggtagctcctcgggctccggggatgacagcggcgggggatccgactcgggcacccctggccctcccagcggcggggacatccgggaccctgagcccgaggcggaggcagagcctcagcaggtggcacaggggaggtgcgagctgagcccgcgtctgagggaggcgtgcgtagcgctgcagcggcagctgagccggccccgcggagtagccagcgacggcggcgcagtgcgcct

SEQ ID NO: 146978 - DNA, 2672 bp, Homo sapiens
  Payload ID: 9071
  Gene Symbol: KANK3
  Gene Name: KN motif and ankyrin repeat domains 3
  Uniprot ID: Q6NY19
  ENST ID: ENST00000593649
  CDS Start-End: 67-2589
gggctcgggtgcgggcgcggctggggctgcggcttcagggtgcctctgacagctgctgcaggaaacatggccaagtttgccctgaatcagaacctgcccgacctgggcggcccccgcctgtgcccggtccccgccgccgggggcgcacgcagcccgagctcgccctactcggtggagacgccctacggcttccacctggacctggacttcctcaagtacatagaggagctggagcgtggccccgctgcccgccgcgccccgggacccccgacctcgcgccgtccccgcgcgccccggcccggcctcgcgggcgcacgtagcccaggcgcctggacatccagcgagtccctggccagtgacgacggtggagcaccgggcatactctcccagggcgcgccctcggggctcctgatgcagccgctgtcgccgcgcgcgcccgtgcgcaacccgcgcgtcgagcacacgctccgggagaccagccggcggctggagctggcgcagacacacgagcgcgcgcccagccccggccgcggggtcccgcgcagcccacgcgggtccggccgcagcagccccgcccctaaccttgcccctgcttcgcccggccctgcccaactgcagctggtgcgcgagcagatggccgcggcgctgcggcgcctgcgcgagctcgaggaccaggcgcgaacgctgcccgagctgcaggagcaggtgcgcgcgctgcgcgccgagaaggcgcggctgctggccgggcgcgcgcagcccgagccggacggggaggctgagacgcgcccggacaagctcgcccagctgcggcggctcaccgagcgcctggccacctccgagcgcggcggccgtgccagggccagcccccgggctgacagcccagacggcctggctgcagggcgcagcgagggcgcgctccaggtcctcgacggggaggtcgggagtctcgatgggacgccccagacccgggaggtggccgccgaggccgtgcccgagacccgagaagcgggtgcccaggccgtgccggagacccgggaggccggcgtggaggctgcccccgagaccgtggaggcggacgcgtgggtgaccgaggcgctgctggggctgcctgcggccgccgagcgcgagctagagctgctgcgcgccagtctggagcaccagcgcggggtgagtgagcttctgcggggccggttgcgggagctggaggaagcccgcgaggctgcggaggaggcagcggcgggggcccgggcccagctacgcgaggccaccacccagaccccgtggagctgtgccgaaaaggccgcgcagaccgagtccccggcagaggcgccctccttgactcaggagagctcgcccggatccatggacggagacagggccgtggcgcccgcgggcatcctcaaatccatcatgaagaagagagacggcacacctggtgcccaacccagctccggacccaagagcctgcagtttgttggggtcctcaacggagagtacgagagctcctccagcgaggacgccagcgacagcgatggcgacagcgagaacggtggcgccgagcccccgggtagctcctcgggctccggggatgacagcggcgggggatccgactcgggcacccctggccctcccagcggcggggacatccgggaccctgagcccgaggcggaggcagagcctcagcaggtggcacaggggaggtgcgagctgagcccgcgtctgagggaggcgtgcgtagcgctgcagcggcagctgagccggccccgcggagtagccagcgacggcggcgcagtgcgcctcgtggcccaggagtggtttcgagtgtccagccagcggcgctctcaggcggagcccgtggccaggatgctggaaggggtgaggcgcctgggacccgaactgctggcgcacgtggtgaacctggcggatggcaacgggaacacggccctgcactacagtgtgtcccacgggaacctggccatcgcaagcctgctcctggatacgggggcctgcgaggtcaaccgccagaaccgagccggctactcggccctcatgctggctgcactcacctctgtgaggcaggaagaggaggacatggctgtggtccagagactcttctgcatgggtgatgtcaatgccaaggccagtcagacggggcagacagccctcatgctggccatcagccatggccgacaggacatggtggcaaccctactggcgtgtggggctgatgtgaatgcgcaggatgcggatggggccacagcgctgatgtgtgccagtgagtatgggcgcctggacaccgtgcggctgctgctcacccagccaggctgtgaccctgccatcctggacaatgagggcaccagtgccctggccatcgccctggaggctgagcaggatgaggtggccgctctgctacatgcccacctgagctcgggccagcccgacacccaggctggagtgcagcggcacaatctcagttcactgcaacctccacctcccaggttcaagaaattctcctgcctcagcctcccaagtagctgggattacaacagctgtgagccatcgcgcctggcacaacttacaattttttgacttcatgatagcataaaagcaatgtgtgcttagtaaaaaccacacttcagcagagtattcaataaattacataagacattcaa

SEQ ID NO: 146979 - DNA, 1191 bp, Homo sapiens
  Payload ID: 9071
  Gene Symbol: KANK3
  Gene Name: KN motif and ankyrin repeat domains 3
  ENST ID: ENST00000610351
  CDS Start-End: 353-991
atccccgccaggcatcctcaaatccatcatgaagaagagagacggcacacctggtgcccaacccagctccggacccaagagcctgcagtttgttggggtcctcaacggagagtgagcgcctttcccctcctgtggcagcttctgccgggacatagactggggttggaaccccagctctgcccctctactggcagcgtggtctgggcaatcctcagtttcctcatcgttaaatgggaacggccacacccacatcgcaggactccagaacgagcccacaggggaggtttagcagacacctcccaccctgcccccaggtacgagagctcctccagcgaggacgccagcgacagcgatggcgacagcgagaacggtggcgccgagcccccgggtagctcctcgggctccggggatgacagcggcgggggatccgactcgggcacccctggccctcccagcggcggggacatccgggaccctgagcccgaggcggaggcagagcctcagcaggtggcacaggggaggtgagcggcgctcgctagttgtttggagaggaggcggctgccctcctcctggtcggcgctgtccccgatccatcctgagtctctcctggcctcctctgcaggtgcgagctgagcccgcgtctgagggaggcgtgcgtagcgctgcagcggcagctgagccggccccgcggagtgccagcgacggcggcgcagtgcgcctcgtggcccaggagtggtttcgagtgtccagccagcggcgctctcaggcggagcccgtggccaggatgctggaaggggtgaggcgcctgggacccgaactgctggcgcacgtggtgaacctggcggatggcaacgggaacacggccctgcactacagtgtgtcccacgggaacctggccatcgcaagcctgctcctggatacgggtcagagccaagggagggtgggtggacaccaggaaatgggtggggggagagggcaggggctgacctaggctcaaagactctggagaggaaagcagagaatggctgtccagcacagggcaccactcctccttgagtttattttattttattttaattttattattttattttattttattttattttattttatttttgagacggagtttcacactgtcaccaggcaggagtgcagtggcgcgatctcggctcactgcaacctccgcct

SEQ ID NO: 146980 - DNA, 2080 bp, Homo sapiens
  Payload ID: 9072
  Gene Symbol: KANK4
  Gene Name: KN motif and ankyrin repeat domains 4
  ENST ID: ENST00000317477
  CDS Start-End: 381-782
ggcaagctggagggagctgcagggacagaggccaaagctgtctttccttgtgtaagggaggaactcttgctggccggggaacctcttggaattggtcttttttggggtttcagaggcaaagcttgaacaccatcagtcaagagtggttccgcgtctccagccggaagtcgtctagccccgccgtggtggcctcctacctccacgaggtccagcctcactccccacacttcctgaaactgcttgtcaacttggccgatcacaacgggaacacggcccttcactacagcgtgtcccactccaacttctccatcgtgaagctgctgctggagacaggcgtctgcaatgtggaccatcagaacaaagctggctacactgccgtaatgatcactcccttggcttccgcagagaccaatgaagacatggctgttgtctggaagctcttaagagaaggaaatgtgaacattcaagctactcagggaggccagactgcgctgatgctgggagtcagccacgacagggaggacatggttcaagcgctgcttagctgccaggcagatgtcaatctgcaggaccacgatggatcctcggccctcatggtggcctgtcaccatggcaacgtggacctggtgcggctgctcctggcacacccagcctgcgacagcagcctgactgacaaggctggccgcacagctttgtccatcgctctgaagtcacccacccatatggaaattgctgggcttctgagagcccacgcggagcagggcaggtccctggggctgtaggggctgcagaagaactggccgtggggaacaaaagccttcttctctggactcctccctcgcccttgaagagggcagaggtcacaggccagagagccacccttctagagaagaaactatgtcaaatatgcacatacattcctgttgtataattctgctcattaggatgctttgtagtttttgccttaggccaagcctgaaaactacacgggcttcagagcagggttcaaggtgcaaggtgaggggtacgtcggtgtcatccaaacatccaaaacatcttcagccttgaattcctcatgactctaccctctgtaacattgtgtagcaagcaggcaggcaggagcacattagcacattagaaaagcaatactttttacatggaattttacagtgcactatctttctgttttttaagcaagtgtatacaaatatgtcccattgatatgcatgtctatagatgggaggggatttaagccaaccccctggcaagcattctgtaggggaccctagaagaatcaccgtgcagactggtgaaactgaacaagcaccatttgggagctttgtttcgatggggttgacagagaaatcttaaaatctgacagggtagaagaagcactttggcatcaatgccatatgtacagtcttgactatttctgagtcatctagtggctccaatttgctccagggaaattggaattaattaagaaatttattatctagtaagttgctatgtaataaagaaaaaaaagaaattcaatccaatgacacacaccacatgtatttgggcagagtcagattctctcagctattttgagtctgtggaagaaacaaaaaaaagcttcctcctgaggatgggttattgtcatcaagaagccacctgcatagccgtatccattacctcatggtaattcccggtgctttcccctcatatcccctagaagcaaatatctgttctgaggttttttgggacttctggctgcaataggagcaagggacccaggcagggcagagcaataccttccgaagcttccatattccctggggccagcacatgcaaggtttatatggtcagtagctcacgtgaagtcatctgaatctttcttaaatctgctctcttaaaatctcttatgcaaaaaaaaaaaaaaaaagccccttatataaaaagaagtaatgtcaaagtttgatgagctttacattggaaactcaaaagcttgcactctcattttggctcagatgccaatttgctgggtgcccctgtggtgagtcatgaaacctccttgggccgcaatttcatcatctct

SEQ ID NO: 146981 - DNA, 2103 bp, Homo sapiens
  Payload ID: 9072
  Gene Symbol: KANK4
  Gene Name: KN motif and ankyrin repeat domains 4
  Uniprot ID: Q5T7N3
  ENST ID: ENST00000354381
  CDS Start-End: 267-1370
gagaccgtcggccagagggcgcctggagggtgtgcgcgccgcggacgaccagggtgcgccagccccggggtgcgcgcctgggacgcggacagtgcacccggaggttgcgtgcgctccgaagccggggtgtgcgcctagctgccccggccccgtgcaccgcgggccgcctcgcgcaggacttccgcagctcgccaagaaccttcaacaagttttacagactcattggatgaagagtgcctgagacactgagggtcagcgctccaaagatggagaagacagatgagatctccccatcgaccagccttaaatccataatgaaaaagaaagactatggcttccgtgcaggaggtaatgggaccaaaaagaaccttcagtttgttggggttaacggtgggtatgagaccacctcaagtgaggagaccagcggtgaggacagcaccccagaggacttgtctgacagcgaggcagagaagaagtgtgacggcccagatcacaagcatgtcaaagatgcccatctcacctgcgaggctgggcagggcatccctgagggcacctgccatgctgcccaggaaagtgggcctggggaagaagtcccccactccaaggccgagagatataaaccctcagaagaatttcttaatgcatgccgggcactgagccagcatctgccagaaactgggaccaccacagaccagctcttgaggcaaagcttgaacaccatcagtcaagagtggttccgcgtctccagccggaagtcgtctagccccgccgtggtggcctcctacctccacgaggtccagcctcactccccacacttcctgaaactgcttgtcaacttggccgatcacaacgggaacacggcccttcactacagcgtgtcccactccaacttctccatcgtgaagctgctgctggagacaggcgtctgcaatgtggaccatcagaacaaagctggctacactgccgtaatgatcactcccttggcttccgcagagaccaatgaagacatggctgttgtctggaagctcttaagagaaggaaatgtgaacattcaagctactcagggaggccagactgcgctgatgctgggagtcagccacgacagggaggacatggttcaagcgctgcttagctgccaggcagatgtcaatctgcaggaccacgatggatcctcggccctcatggtggcctgtcaccatggcaacgtggacctggtgcggctgctcctggcacacccagcctgcgacagcagcctgactgacaaggctggccgcacagctttgtccatcgctctgaagtcacccacccatatggaaattgctgggcttctgagagcccacgcggagcagggcaggtccctggggctgtaggggctgcagaagaactggccgtggggaacaaaagccttcttctctggactcctccctcgcccttgaagagggcagaggtcacaggccagagagccacccttctagagaagaaactatgtcaaatatgcacatacattcctgttgtataattctgctcattaggatgctttgtagtttttgccttaggccaagcctgaaaactacacgggcttcagagcagggttcaaggtgcaaggtgaggggtacgtcggtgtcatccaaacatccaaaacatcttcagccttgaattcctcatgactctaccctctgtaacattgtgtagcaagcaggcaggcaggagcacattagcacattagaaaagcaatactttttacatggaattttacagtgcactatctttctgttttttaagcaagtgtatacaaatatgtcccattgatatgcatgtctatagatgggaggggatttaagccaaccccctggcaagcattctgtaggggaccctagaagaatcaccgtgcagactggtgaaactgaacaagcaccatttgggagctttgtttcgatggggttgacagagaaatcttaaaatctgacagggtagaagaagcactttggcatcaatgccatatgtacagtcttgactatttctgagtcatctagtggctccaatttgctccagggaaattggaattaattaagaaatttattatctagtaagttgctatgtaat

SEQ ID NO: 146982 - DNA, 3023 bp, Homo sapiens
  Payload ID: 9072
  Gene Symbol: KANK4
  Gene Name: KN motif and ankyrin repeat domains 4
  ENST ID: ENST00000371150
  CDS Start-End: 1235-2290
aaaaaagattttagtacttccaggaacccagtggaataaaaactgatgtgtgtgacagtggaggctcgggacctctactcttgcctttgctctaaggttgggtctgactatgggcccactgcctacagctgtatggatagcacagggcacaaagatgccagccagggagggcaaatgagagttgaaagccagcccacactccatttgccaagccttgcgctgcagcaccacatccacccagagggggctgttctcatttgcattgtgcaaaggcagtgtctggggccaagaatggccctgctgcgtggactccagacctcttcctgggcttttgcattcctgtgttcctctctggttcttgcatagtagaggttttctctggcctggttttggaggagcattatattgatatctggtatagttcactgaatattttctctgcgtgcatgtgtgtgtgtacgtgcatgtgtgtgtgtacaggggcaggagattaagtgctgctcacatatggaaatgggcccttcggctgagcagcacttcctgttgtaacagatcaaaccctcttcactgtcgggtaaagtggaaccacgttttgctttgcagggcagcatgcgagtctgcttcctgccacaaatcacaatttgactgctttctcattgtttcagtgctagttctagccttccccgttgggagccgcctcctgtcctgttgagcacattgcaagatctgtgtccttgctcgtgtatctactgtgagcacggtgtcatcaccacccccacaaccctagtgtcagtatgcacttgtgagccaggaaggaccactgaggtgcccttgagcagaagtgggtgctagaccatgagtccagaggcctacgttctgctcctacactcccattcactgagcaagtctgggcctcagatttcccagctgtaagacagggacaacaatggcacctacgccacatggttcttcatccacacttagaggggcattgttaacagagacagttctcccaacattgagcagaaagcaaggctcctccaagaggtccccaaaacattgatttacatgatctggttccctgtccctccttacctctccacacacctgcaacccttgtcccctcaaagcaatatcctggttttgctacattcccatgcatccccaagatcattctaacctgtgatgttgtgtctgcctagagatctccccatcgaccagccttaaatccataatgaaaaagaaagactatggcttccgtgcaggaggtaatgggaccaaaaagaaccttcagtttgttggggttaacggtgggtatgagaccacctcaagtgaggagaccagcggtgaggacagcaccccagaggacttgtctgacagcgaggcagagaagaagtgtgacggcccagatcacaagcatgtcaaagatgcccatctcacctgcgaggctgggcagggcatccctgagggcacctgccatgctgcccaggaaagtgggcctggggaagaagtcccccactccaaggccgagagatataaaccctcagaagaatttcttaatgcatgccgggcactgagccagcatctgccagaaactgggaccaccacagaccagctcttgaggcaaagcttgaacaccatcagtcaagagtggttccgcgtctccagccggaagtcgtctagccccgccgtggtggcctcctacctccacgaggtccagcctcactccccacacttcctgaaactgcttgtcaacttggccgatcacaacgggaacacggcccttcactacagcgtgtcccactccaacttctccatcgtgaagctgctgctggagacaggcgtctgcaatgtggaccatcagaacaaagctggctacactgccgtaatgatcactcccttggcttccgcagagaccaatgaagacatggctgttgtctggaagctcttaagagaaggaaatgtgaacattcaagctactcagggaggccagactgcgctgatgctgggagtcagccacgacagggaggacatggttcaagcgctgcttagctgccaggcagatgtcaatctgcaggaccacgatggatcctcggccctcatggtggcctgtcaccatggcaacgtggacctggtgcggctgctcctggcacacccagcctgcgacagcagcctgactgacaaggctggccgcacagctttgtccatcgctctgaagtcacccacccatatggaaattgctgggcttctgagagcccacgcggagcagggcaggtccctggggctgtaggggctgcagaagaactggccgtggggaacaaaagccttcttctctggactcctccctcgcccttgaagagggcagaggtcacaggccagagagccacccttctagagaagaaactatgtcaaatatgcacatacattcctgttgtataattctgctcattaggatgctttgtagtttttgccttaggccaagcctgaaaactacacgggcttcagagcagggttcaaggtgcaaggtgaggggtacgtcggtgtcatccaaacatccaaaacatcttcagccttgaattcctcatgactctaccctctgtaacattgtgtagcaagcaggcaggcaggagcacattagcacattagaaaagcaatactttttacatggaattttacagtgcactatctttctgttttttaagcaagtgtatacaaatatgtcccattgatatgcatgtctatagatgggaggggatttaagccaaccccctggcaagcattctgtaggggaccctagaagaatcaccgtgcagactggtgaaactgaacaagcaccatttgggagctttgtttcgatggggttgacagagaaatcttaaaatctgacagggtagaagaagcactttggcatcaatgccatatgtacagtcttgactatttctgagtcatctagtggctccaatttgctccagggaaattggaattaattaagaaatttattatctagtaagttgctatgtaat

SEQ ID NO: 146983 - DNA, 4665 bp, Homo sapiens
  Payload ID: 9072
  Gene Symbol: KANK4
  Gene Name: KN motif and ankyrin repeat domains 4
  Uniprot ID: Q5T7N3
  ENST ID: ENST00000371153
  CDS Start-End: 380-3367
tcgggcgctgttggcagctggcgacgcggggcgaagccgcggctggcggcgcctggccagtcccgcatccgccgcggtgggtgtgcccgcaggggtgcgccggggccagggccgagaccgtcggccagagggcgcctggagggtgtgcgcgccgcggacgaccagggtgcgccagccccggggtgcgcgcctgggacgcggacagtgcacccggaggttgcgtgcgctccgaagccggggtgtgcgcctagctgccccggccccgtgcaccgcgggccgcctcgcgcaggacttccgcagctcgccaagaaccttcaacaagttttacagactcattggatgaagagtgcctgagacactgagggtcagcgctccaaagatggagaagacagatgccaaagaccagtcctctcagggggatgaagagaaagaccctccgaagagccacccttattctgtggagaccccatatggctttcatttagacctggacttcctcaagtatgtggatgacatcgagaagggaaacactatcaaaagaattcctatccacagaagggccaagcaggccaaatttagcactctgccccgaaacttcagccttcctgacagtggggctcgcccccctgcagccccgcccctccaaaactggtctcccgtggtgccaagggaggcatcacttgggacacaggagcaaaaccagtcaccaccgcttggtaatgccccccaggcctcaacaagcaggagtgaggtgagctaccacaggaaggctctgttggcagaggccaccagacagttggaagctgctgagccagaggatgccgagctcacttttgggagtggacggccccagctcttgagagcatccagcatgcctgccacgctgctgcacagcagggcttctgaggagccaggcctgagcctggggccccctgcccctcctgccctccctccccttcagggtgaaggcagtgtctgtgatggcacctttgaacctgcagaaggattggcaggtttccacagctccagcccacgagcatcaactcggattccagagctggtccaggagggagctgagcctccagagggtgtggtgaaggttccaaatcacctccctctcccaggccctcctttctcattccagaatgtgcttgtagttctagaggacaaggaagatgaacacaatgccagagaagcagaggtgttgttcacccctggctcccctacgccaagcccgccacctctgccatcacccatccctgagaatgagctcctcctggaagaaatcgagctcaacatcagcgagattccacccccgccacctgtagaggtggacatgagaagcattggcatcagggtaactgaggaaagcctgggccttgccagggtggatccaggcagcatctccagcctgaaacagcaggtctcggccctggagggagagttgtctggaagaaccgaggaactggcacaggtcagaactgctctccagcagcaggaagaggaaatcaaagctagggagcaaagaattcgagagctggagttcactgtagcccaactggaaggacagtttcaccaagagaacgccaaagacactcagggccagacggacgtgatggtgaacactgaccctgtccatggactcttgaccagggagtcgtgtgataagggcattgaagtcaaccttctaggcagcatggagtctgaaagctgggggcaccgaggagaggagaatggcctcctatgggggccagatggtcataaacaagggaatcagagcccagcagaacgtgtgcttctgccccagctgtcactgccacagggacccgagcaggtccttacctcctctgtacatagcttcctctccactgaactcaggattgaagaagcaggcactgaacaggaaggaggccctcagggaggaaccaggggagcaggaggctttctgtggggcagcgacagaaagactcccccagcagggagggaggagaccagttccaatctcccagggaaggagcacccgggaaggccaccaagctcgccaacggatgccactattgggcagtatgtgaagaagatccaggagctcctgcaggagcagtggaactgcctggagcatgggtacccggagctggccagcgccatcaagcagccagcctccaagctcagcagcatccagagccagctgctgagctccctcaacctgctgctgtcggcctactcggcccaggctcacccacccaaggagccaccggcctcctcctcctccccgccagtggagatctccccatcgaccagccttaaatccataatgaaaaagaaagactatggcttccgtgcaggaggtaatgggaccaaaaagaaccttcagtttgttggggttaacggtgggtatgagaccacctcaagtgaggagaccagcggtgaggacagcaccccagaggacttgtctgacagcgaggcagagaagaagtgtgacggcccagatcacaagcatgtcaaagatgcccatctcacctgcgaggctgggcagggcatccctgagggcacctgccatgctgcccaggaaagtgggcctggggaagaagtcccccactccaaggccgagagatataaaccctcagaagaatttcttaatgcatgccgggcactgagccagcatctgccagaaactgggaccaccacagaccagctcttgaggcaaagcttgaacaccatcagtcaagagtggttccgcgtctccagccggaagtcgtctagccccgccgtggtggcctcctacctccacgaggtccagcctcactccccacacttcctgaaactgcttgtcaacttggccgatcacaacgggaacacggcccttcactacagcgtgtcccactccaacttctccatcgtgaagctgctgctggagacaggcgtctgcaatgtggaccatcagaacaaagctggctacactgccgtaatgatcactcccttggcttccgcagagaccaatgaagacatggctgttgtctggaagctcttaagagaaggaaatgtgaacattcaagctactcagggaggccagactgcgctgatgctgggagtcagccacgacagggaggacatggttcaagcgctgcttagctgccaggcagatgtcaatctgcaggaccacgatggatcctcggccctcatggtggcctgtcaccatggcaacgtggacctggtgcggctgctcctggcacacccagcctgcgacagcagcctgactgacaaggctggccgcacagctttgtccatcgctctgaagtcacccacccatatggaaattgctgggcttctgagagcccacgcggagcagggcaggtccctggggctgtaggggctgcagaagaactggccgtggggaacaaaagccttcttctctggactcctccctcgcccttgaagagggcagaggtcacaggccagagagccacccttctagagaagaaactatgtcaaatatgcacatacattcctgttgtataattctgctcattaggatgctttgtagtttttgccttaggccaagcctgaaaactacacgggcttcagagcagggttcaaggtgcaaggtgaggggtacgtcggtgtcatccaaacatccaaaacatcttcagccttgaattcctcatgactctaccctctgtaacattgtgtagcaagcaggcaggcaggagcacattagcacattagaaaagcaatactttttacatggaattttacagtgcactatctttctgttttttaagcaagtgtatacaaatatgtcccattgatatgcatgtctatagatgggaggggatttaagccaaccccctggcaagcattctgtaggggaccctagaagaatcaccgtgcagactggtgaaactgaacaagcaccatttgggagctttgtttcgatggggttgacagagaaatcttaaaatctgacagggtagaagaagcactttggcatcaatgccatatgtacagtcttgactatttctgagtcatctagtggctccaatttgctccagggaaattggaattaattaagaaatttattatctagtaagttgctatgtaataaagaaaaaaaagaaattcaatccaatgacacacaccacatgtatttgggcagagtcagattctctcagctattttgagtctgtggaagaaacaaaaaaaagcttcctcctgaggatgggttattgtcatcaagaagccacctgcatagccgtatccattacctcatggtaattcccggtgctttcccctcatatcccctagaagcaaatatctgttctgaggttttttgggacttctggctgcaataggagcaagggacccaggcagggcagagcaataccttccgaagcttccatattccctggggccagcacatgcaaggtttatatggtcagtagctcacgtgaagtcatctgaatctttcttaaatctgctctcttaaaatctcttatgcaaaaaaaaaaaaaaaaagccccttatataaaaagaagtaatgtcaaagtttgatgagctttacattggaaactcaaaagcttgcactctcattttggctcagatgccaatttgctgggtgcccctgtggtgagtcatgaaacctccttgggccgcaatttcatcatctct

SEQ ID NO: 146984 - DNA, 674 bp, Homo sapiens
  Payload ID: 9073
  Gene Symbol: KRBOX1
  Gene Name: KRAB box domain containing 1
  Uniprot ID: C9JBD0
  ENST ID: ENST00000383748
  CDS Start-End: 143-529
gtttttgtcgcgcgaggttttggtttgtgaggatcggcgagtggcgcccaccatctctgcttgctgaaaagctgcagaggccgccaggagcccacgcacctgagacttttacctttacccagaaaggaataaaagaggtcagatgatgacagctgtgtccttaacaaccaggccccaggaatcagtggcttttgaggacgtggctgtgtacttcactacgaaggaatgggccatcatggtgcctgccgagagggccttgtacagggatgtgatgctggagaactatgaggctgtggcctttgtagtgccacccacttccaaaccagctttggtctctcatctggagcaagggaaagagtcctgtttcacccagccacagggagtcctaagcaggaatgactggagagcaggctggataggatacttggaactaagaagatatacttacttagctaaagcagtgttacgtagaatagtatcaaaaatttttcgaaatcgtcaatgctgggaagacaggagaaaagcttaattcttgacatttaaataccagttttccaagtaaggagttgatgtaagagccaccttaaacgatgtcaaatacacattttctttttctgtagactggtagatttaatgtttttcattcattaaaataactcattttgatgtacaaa

SEQ ID NO: 146985 - DNA, 2566 bp, Homo sapiens
  Payload ID: 9073
  Gene Symbol: KRBOX1
  Gene Name: KRAB box domain containing 1
  Uniprot ID: C9JBD0
  ENST ID: ENST00000418176
  CDS Start-End: 2035-2421
agttattttcgcctgccatagtgtacaccagtcttgaaacttgttactgtcgtagagcaaccaaaaatttgagaataccgaattgtattccctacccgtccccaggatgtcccattttggaaaatatggagccctgcgatctggattggctcataagaatgttaaatctaaaaagactgatcgtatccgtcatgcacctaatgtgtgtccagtgtttaacatagtttcctatgtacaggattggagatgtcgaaagatttcttgacctcttaacattgttcattatattcttttctttagattctctgaacttttactccactgtcataatttaattgtcaaggttcataggataacattcgatgtccctgccattagtcaactatgttgggagtgtgatttgttctccaatgtggcttgttatttatgtttcatctccacttagctttccccataggaagacacttccatagggagtgttttgtgttttgtagggtgacctctgttgtagttctatttccagatgatttccctttcgcagattgtcagctgtgcagatcagacctttttgcttaagtccttttgtttgatacgctaatcctattaagtatccactgtaagggacatttactgccgatacaatgacagtatcatgattttagagaattagattccacaattacaagggttaactatttacttagtatgaatcactgcttttgttaccctttcttggacagaaaccatccatgaatttagcagcattacttgtgtaggtttacattgtgttttcttttaaagtacttctctttacactcataaatatttctccttactggactccctgttaacttccaagatgccttttctggcgtctcctgacagctgtttctctgacaccttcagcttcctctaccttcctgaatggctttctggattcactaagaagagtcattggagggaggggcagtgcactggctttatagtgttttgtctgatgctgttgcagtaccctaagacttacagcaaactgcagatatggagttggaacggaagttgtttttaaggtctatgagtatatgcacttttatgtgtttgtttatatgctttttgaatatctctgatccaactgttggcagctctttgtatttcaggtgttgtctttaatgcataaatattgatgattcactcttgaaaggcaaaagacttacttcctaatgatgaactaattaaatgacccagaatgagagttggaactagtttagaaatgaaattgttttgtttccttatactataacatttggaacttgaagtatttgggacatgttatgaagttgatggattcttttaatatggtaatgttttctttctcatcacccactccaaacacctttataaaactgaatgagtatcttgtatttaggggaaaaatagtagtagggaggcatcaaaatatttctgataactattttcaaagtctgttcaactttcattacttcagtcatagaaactcttgttctaatattaagtagcataggaggaaaaacatgctgaggtcttacagtgtttaatggatttcttttatataactcattcctatctgtactacataactcattcttatctgtactgtatggatttcagggatcttaactgtttagaattccaactttcttttctgcctataacactctgtccactgtctaccttagtttccttttctgtttcctgtcctgtgatgtattctatggattagctgaaattatagttttctcagtccactttttcatcactcattccgtggatgattctacctcctttttgcatttctctgtatgcctgctatctcgcctttgtgagattgataataagcaataactaatgaacggttattgatatagccttcaaaacagatgggtcagaggttgtttgtaggacttatggtcaataaagttattatcgttaatgttttttttctttaccttcagcacctgagacttttacctttacccagaaaggaataaaagaggtcagatgatgacagctgtgtccttaacaaccaggccccaggaatcagtggcttttgaggacgtggctgtgtacttcactacgaaggaatgggccatcatggtgcctgccgagagggccttgtacagggatgtgatgctggagaactatgaggctgtggcctttgtagtgccacccacttccaaaccagctttggtctctcatctggagcaagggaaagagtcctgtttcacccagccacagggagtcctaagcaggaatgactggagagcaggctggataggatacttggaactaagaagatatacttacttagctaaagcagtgttacgtagaatagtatcaaaaatttttcgaaatcgtcaatgctgggaagacaggagaaaagcttaattcttgacatttaaataccagttttccaagtaaggagttgatgtaagagccaccttaaacgatgtcaaatacacattttctttttctgtagactggtagatttaatgtttttcattcattaaaataactcattttgatgtacaaa

SEQ ID NO: 146986 - DNA, 826 bp, Homo sapiens
  Payload ID: 9073
  Gene Symbol: KRBOX1
  Gene Name: KRAB box domain containing 1
  Uniprot ID: C9JBD0
  ENST ID: ENST00000426937
  CDS Start-End: 295-681
gggatcctttctggaatggaggtcttatgagctgctattgaacacggcagagcctgttggtgacctgcacacaggagccctccagtcagtactgattgaattactcaaggctgcctctctgcaaagttgagcagcatttccatttcccaaaccggctctgatttcccagctggagcgaggggaaacaccctggtgctcggttcctcggggagctctggatggagaggccccaaggggcatctcctcagcacctgagacttttacctttacccagaaaggaataaaagaggtcagatgatgacagctgtgtccttaacaaccaggccccaggaatcagtggcttttgaggacgtggctgtgtacttcactacgaaggaatgggccatcatggtgcctgccgagagggccttgtacagggatgtgatgctggagaactatgaggctgtggcctttgtagtgccacccacttccaaaccagctttggtctctcatctggagcaagggaaagagtcctgtttcacccagccacagggagtcctaagcaggaatgactggagagcaggctggataggatacttggaactaagaagatatacttacttagctaaagcagtgttacgtagaatagtatcaaaaatttttcgaaatcgtcaatgctgggaagacaggagaaaagcttaattcttgacatttaaataccagttttccaagtaaggagttgatgtaagagccaccttaaacgatgtcaaatacacattttctttttctgtagactggtagatttaatgtttttcattcattaaaataactcattttgatgtacaaa

SEQ ID NO: 146987 - DNA, 1354 bp, Homo sapiens
  Payload ID: 9074
  Gene Symbol: KRBOX4
  Gene Name: KRAB box domain containing 4
  Uniprot ID: Q5JUW0
  ENST ID: ENST00000298190
  CDS Start-End: 197-697
agttcacactggctgttgtcagcggcctctgaggtttcaggctcttggcggtgaaggtcagagtgcagacctgagaccactgctcaccgacttcagactccagtttatctgtgccccagcttcctcacttagtctcagaagacttaggctgaggcctcagaaggagatctccatcctttgtccagagcagaacaggatggccatgtcccaggaatcattgaccttcaaggacgtgtttgtggacttcaccctggaggagtggcagcaactggactctgcccagaagaacctctacagggatgtcatgcttgagaactacagccacctggtgtccgtggggtatctagttgcgaagccagatgtgatcttcaggttgggaccaggtgaagagtcctggatggcagatggggggaccccggtacggacctgtgcagaagtctggcaagttgatgagcagatagatcactacaaggaaagccaagacaaacttccttggcaagctgcattcataggcaaggaaacactgaaggatgaaagcggtcaagaatccagaacatgtagaaaaagcatttatctgagcacagaatttgattctgtaaggcaaagactccctaaatattattcgtgggaaaaggcattcaaaacatcatttaaactttcttggtcaaaatggaagctatgtaagaaagaaagatgatggatgtaaagcatattggaaagtatgcttccattataatcttcataaagctcaacctgcagagagattttttgaccctaatcaacgagggaaagccctccaccaaaagcaagcccttagaaaaagtcagagaagtcaaactggggagaaactctacaaatgtactgaatgtggaaaagtgtttatccagaaagcaaacttagttgtacatcaaagaactcacaccggagagaaaccttatgaatgctgcgaatgtgcaaaagccttcagccagaagtcaaccctcatagcacaccagagaactcacacaggggagaagccctatgaatgcagtgaatgtggaaaaacctttatccagaagtcaactctgattaaacataagaaaattcatatggagagagaccctataaatgcagtgtctgtgagaaagccttcagtaggaagtcaactctcattaaacatcagataattcatatgggagaaaccttatgaatgtaataaatgtgggaaatcttttagtgttaaatcaactctcattgtatgtcacagaacataaatgcataagttgcatgctattgtgaatagtgtgatgaaattttgcactgtcctgctctttcctgctcaggatgcaaatcagtgaatctttttttttttttt

SEQ ID NO: 146988 - DNA, 2774 bp, Homo sapiens
  Payload ID: 9074
  Gene Symbol: KRBOX4
  Gene Name: KRAB box domain containing 4
  Uniprot ID: Q5JUW0
  ENST ID: ENST00000344302
  CDS Start-End: 632-1147
ctattcccaggagggtaaaaaagcgggaacaatggctttcaggacggagggacacaaacacccaatgccgcagcgactgggagggtcgcgatgcaggaggacgaaatgggagaagggggacaagggggacttcggcctccctgcgggcgggagctaggccgctggaaagtccgctcgcctctcgccggcaagggatgacgccctgggccttttgtaccactcgccacggaaaatggtcacacgcttttgtcctcaagccgaacactatcagaaacacggggtccctggaagccgccatcttggccattggcggtggcgcacccacccccgtgctactgcgcgtgcgcggcgctgcgacacactccgaccccatcccgcgttcccagggggcggtgggaagcggaagtgctccgctgacccgggagggcggtccctagttcacactggctgttgtcagcggcctctgaggtttcaggctcttggcggtgaaggtcagagtgcagacctgagaccactgctcaccgacttcagactccagtttatctgtgccccagcttcctcacttagtctcagaagacttaggctgaggcctcagaaggagatctccatcctttgtccagagcagaacaggatggccatgtcccaggaatcattgaccttcaaggacgtgtttgtggacttcaccctggaggagtggcagcaactggactctgcccagaagaacctctacagggatgtcatgcttgagaactacagccacctggtgtccgtggggtatctagttgcgaagccagatgtgatcttcaggttgggaccaggtgaagagtcctggatggcagatggggggaccccggtacggacctgtgcaggtgaggacaggccagaagtctggcaagttgatgagcagatagatcactacaaggaaagccaagacaaacttccttggcaagctgcattcataggcaaggaaacactgaaggatgaaagcggtcaagaatccagaacatgtagaaaaagcatttatctgagcacagaatttgattctgtaaggcaaagactccctaaatattattcgtgggaaaaggcattcaaaacatcatttaaactttcttggtcaaaatggaagctatgtaagaaagaaagatgatggatgtaaagcatattggaaagtatgcttccattataatcttcataaagctcaacctgcagagagattttttgaccctaatcaacgagggaaagccctccaccaaaagcaagcccttagaaaaagtcagagaagtcaaactggggagaaactctacaaatgtactgaatgtggaaaagtgtttatccagaaagcaaacttagttgtacatcaaagaactcacaccggagagaaaccttatgaatgctgcgaatgtgcaaaagccttcagccagaagtcaaccctcatagcacaccagagaactcacacaggggagaagccctatgaatgcagtgaatgtggaaaaacctttatccagaagtcaactctgattaaacataagaaaattcatatggagagagaccctataaatgcagtgtctgtgagaaagccttcagtaggaagtcaactctcattaaacatcagataattcatatgggagaaaccttatgaatgtaataaatgtgggaaatcttttagtgttaaatcaactctcattgtatgtcacagaacataaatgcataagttgcatgctattgtgaatagtgtgatgaaattttgcactgtcctgctctttcctgctcaggatgcaaatcagtgaatctttttttttttttttttgagacagagtcttgctctgtcatccaaactggagtgcagtggcacaatcttggctcactgcaacctccgcctcttgggttcaaccgattctcctgcctcaacctcccaaatagttgggattacaggcacatgccaccatacgcagctaatttgtatttttagtagagacagggtttcaccatgttggccagcctggtcttgaactcctgacctcaagtgatccgcctgcctcagcttcccaaagtgctgggattacaggcatgagccactgcacccggcttgaatcatccttttgtccagtattatatccatgctgtatatgctacccgcccactagtcccttagctgtctcagttgtcagattgactgtcatgggattgcagtgcttgcattaaagctacccttattgtataatgaccccaaagtgcaagagtagtgatgttggcaatttgcatacaccaaaaataagttataaagtgcttccttaaagtgaaatggttaaagttcttgacttaataaagaaaaaaaatgtatgctgaggttgttaagatttacagtaagaatgaatcttctatccaagaaattgtgaaggaggaaaaagaaacttgtgctagttttgctgtcacatctgaaactgcaaaagttgtggccacagtgcatcataagtgctaagacgaaaaagacattaaatttgcggatggaaggcgtgaatagaaatgggttctgacagcaatcaggttcggtactattcacagtttcaggcatccgctagggatcttggaacatatcccccatggataagggaggggtactgtaccttgtcatattgtgcattaaagaattcattgagtgtaatcatgtaagtctaacacacatttaaaaagctctcagatatcatttcgccttcggttgatgtaagaaaattcaaaagctactcaaatcattcaataaatgataaaattattta

SEQ ID NO: 146989 - DNA, 993 bp, Homo sapiens
  Payload ID: 9074
  Gene Symbol: KRBOX4
  Gene Name: KRAB box domain containing 4
  Uniprot ID: Q5JUW0
  ENST ID: ENST00000377919
  CDS Start-End: 195-491
ttcacactggctgttgtcagcggcctctgaggtttcaggctcttggcggtgaaggtcagagtgcagacctgagaccactgctcaccgacttcagactccagtttatctgtgccccagcttcctcacttagtctcagaagacttaggctgaggcctcagaaggagatctccatcctttgtccagagcagaacaggatggccatgtcccaggaatcattgaccttcaaggacgtgtttgtggacttcaccctggaggagtggcagcaactggactctgcccagaagaacctctacagggatgtcatgcttgagaactacagccacctggtgtccgtggggtatctagttgcgaagccagatgtgatcttcaggttgggaccaggtgaagagtcctggatggcagatggggggaccccggtacggacctgtgcaggtgaggacaggccagatgtatccatttttgcctcatgtattttgaagtgctgttattagtgagagttattttccatggaaattctgtgtaccctaagctatgaaagcatcactgcagaactatttggattgccactgctggggcccactggtttcactaatgcaggaacaatttataggtgaatttatcaacttcgggggttttgtattatacttcaaatgtccatttggaatgcactcctacatgtggtacaggactgtggttctgacttcttgtaagtaacccctgattcttcttaacattttcattagccagtgggtgacatctttctagttcctattttacacacagagatgtcctttgtgactcccagctttaagcaggtagctcaattctaattctctgcacatttgtgccctgtggcctagaattcacctcacactcatgattagagccttagtcccccaactgcaaagccacacagcttcaatttctgttcactccctcactttaaatttcttcttcatttttgtcacataataaatttattttctggtttga

SEQ ID NO: 146990 - DNA, 1247 bp, Homo sapiens
  Payload ID: 9074
  Gene Symbol: KRBOX4
  Gene Name: KRAB box domain containing 4
  Uniprot ID: Q5JUW0
  ENST ID: ENST00000487081
  CDS Start-End: 109-405
gacttcagactccagtttatctgtgccccagcttcctcacttagtctcagaagacttaggctgaggcctcagaaggagatctccatcctttgtccagagcagaacaggatggccatgtcccaggaatcattgaccttcaaggacgtgtttgtggacttcaccctggaggagtggcagcaactggactctgcccagaagaacctctacagggatgtcatgcttgagaactacagccacctggtgtccgtggggtatctagttgcgaagccagatgtgatcttcaggttgggaccaggtgaagagtcctggatggcagatggggggaccccggtacggacctgtgcaggtgaggacaggccagatgtatccatttttgcctcatgtattttgaagtgctgttattagtctggcaagttgatgagcagatagatcactacaaggaaagccaagacaaacttccttggcaagctgcattcataggcaaggaaacactgaaggatgaaagcggtcaagaatccagaacatgtagaaaaagcatttatctgagcacagaatttgattctgtaaggcaaagactccctaaatattattcgtgggaaaaggcattcaaaacatcatttaaactttcttggtcaaaatggaagctatgtaagaaagaaagatgatggatgtaaagcatattggaaagtatgcttccattataatcttcataaagctcaacctgcagagagattttttgaccctaatcaacgagggaaagccctccaccaaaagcaagcccttagaaaaagtcagagaagtcaaactggggagaaactctacaaatgtactgaatgtggaaaagtgtttatccagaaagcaaacttagttgtacatcaaagaactcacaccggagagaaaccttatgaatgctgcgaatgtgcaaaagccttcagccagaagtcaaccctcatagcacaccagagaactcacacaggggagaagccctatgaatgcagtgaatgtggaaaaacctttatccagaagtcaactctgattaaacataagaaaattcatatggagagagaccctataaatgcagtgtctgtgagaaagccttcagtaggaagtcaactctcattaaacatcagataattcatatgggagaaaccttatgaatgtaataaatgtgggaaatcttttagtgttaaatcaactctcattgtatgtcacagaacataaatgcataagttgcatgctattgtgaa

SEQ ID NO: 146991 - DNA, 730 bp, Homo sapiens
  Payload ID: 9074
  Gene Symbol: KRBOX4
  Gene Name: KRAB box domain containing 4
  ENST ID: ENST00000478600
  CDS Start-End: 192-473
acactggctgttgtcagcggcctctgaggtttcaggctcttggcggtgaaggtcagagtgcagacctgagaccactgctcaccgacttcagactccagtttatctgtgccccagcttcctcacttagtctcagaagacttaggctgaggcctcagaaggagatctccatcctttgtccagagcagaacaggatggccatgtcccaggaatcattgaccttcaaggacgtgtttgtggacttcaccctggaggagtggcagcaactggactctgcccagaagaacctctacagggatgtcatgcttgagaactacagccacctggtgtccgtggggtatctagttgcgaagccagatgtgatcttcaggttgggaccaggtgaagagtcctggatggcagatggggggaccccggtacggacctgtgcaggtacagtccttcagagattccagctgaaagcctgtggtatttaacaaggcccatcatcactggtggaatctgaacttcaagtctgatttccttggcacataattttctactaaaagctctgcacctggctgctgtgaatttccaaatctatcccaagtccctgtgtgtcacagtacaatccattaggatttggaagctgtattaatccattttcatgctgctgataaagacagacccgagactgagcaatttacaaaacaaagaggtttaatggacttacagttccatgtggctggggagg

SEQ ID NO: 146992 - DNA, 585 bp, Homo sapiens
  Payload ID: 9074
  Gene Symbol: KRBOX4
  Gene Name: KRAB box domain containing 4
  ENST ID: ENST00000476762
  CDS Start-End: 192-585
acactggctgttgtcagcggcctctgaggtttcaggctcttggcggtgaaggtcagagtgcagacctgagaccactgctcaccgacttcagactccagtttatctgtgccccagcttcctcacttagtctcagaagacttaggctgaggcctcagaaggagatctccatcctttgtccagagcagaacaggatggccatgtcccaggaatcattgaccttcaaggacgtgtttgtggacttcaccctggaggagtggcagcaactggactctgcccagaagaacctctacagggatgtcatgcttgagaactacagccacctggtgtccgtggggtatctagttgcgaagccagatgtgatcttcaggttgggaccaggtgaagagtcctggatggcagatggggggaccccggtacggacctgtgcaggtgaggacaggccaggtgagtcaggccggggaaaggagaccaggttggttggtgagagcttggcctctgggatgtgctcaggagcccttctcagagcctcggacttgtggacatgcctaggctctgatgagcagaactgttgtcatgtccaaatga

SEQ ID NO: 146993 - DNA, 4020 bp, Homo sapiens
  Payload ID: 9075
  Gene Symbol: KRBA1
  Gene Name: KRAB-A domain containing 1
  Uniprot ID: A5PL33
  ENST ID: ENST00000319551
  CDS Start-End: 400-3492
ggcgcgccaggtaaggcaggcggacgcgcggacccctcggcgcagtgcggccccgaaggcggtagggcgagaaagagctgggacccccccgcaacttcgggatcggctgggtgaggctgggcaggcctgatgctcaggggttcgtgccgggaagttcaggtcctcggacaacctctctccagctctccgccgccggtacccacggcccagtctccacctggggaaacccccttggcgtggcttgtttcgttacaagttatcctggtagagtgggcatgaaggcctcggaggcaactgtgcctgcaggtgtccatcaccttcaaggacttggccgtgcggttctcggaggaggagtggcggctcctggaggaggggcagagggagttctaccgagacgtgatgcgggagaactacgagacgctggtctctgtggggacagctgagctgctccccctctctgctttcctgtcaccctcagagcctggaagagctgttgggggagggagccacgctgatgaggggcaggagcctgctggttgtggagatccccaggggggacagccccggcacagcctgcacctcacagccctggtgcagctggtgaaggagatcccagagttcttgtttggagaagtcaagggcgctatggacagccccgagagcgagagccggggagccagcctggatggagagagagcgagccccgaggcagctgcggcaagagagccctgccctctccgaggcctgctcagctgccttccagacggccctaccagccagccccacctggccaccacgcccaccgacagctcgtgttccagtggcccaactggtgacggggtccagggaagtcctctccccatcaaaactgccgacaaaccgtggcctacaaggaaggaaggcccaggagccctgggcggggagcccagccctcccacccatagccccagcaggaggaagagccacagaggacaggagagagggacctcagaggccggaatttctcctgggaacagccccttgcaaggcctcatcaactgtctgaaggaaatccttgtgcctgggccccggcaccccgagacatccccaagcttcttgccacctctccctagcctgggcacgtccaggctaaccagagcagacctggggcctgggagcccgccctgggcagtgaagaccgaggcggtttcaggggattgtcccctccagggtctgctacactgtctgaaggagctccccgaggcccaggacaggcatcccagtccctcaggagtggggaaccgacggctacaggagaatccaggagcctggaaaaggggttctggagggcctggatacctcctgacccctcctccccatcctgatcttggagctggcggtctgctctctgtgaagatggagaacagctgggtccagagccccccaggacctgcatcctgtcagcctggcaggcagcccctcagtccctcagccactggagacaccagaggggtcccccaacccagctggggccctgaggctcaagctgccagtgcctcaagctcaccgctggaagccctggaagcctgtctgaagggcattcccccaaatgggtcgtcaccttcccagctgccacccacttcttgttcccagaacccccagccaggagactctaggtctcagaagcctgaactgcaaccccacagatcacacagtgaagaagcgaccagagagcctgttctgcctctgggtctgcagagctgtgtgagagatggccccagcaggcccctggccccccgaggaacccccaccagcttctcctcatccagcagcaccgactgggacctggattttgggagtcctgtggggaaccaggggcagcatcctggaaaaggaagcccaccaggaagctccccactgcagggtctggagaattgtctcaaggagatacctgtgcctgtgctgcggcctgcctggccctgctcctcagcagcagacaggggaccgaggagagcagagcccaggaactggacagcagacaaggaaggactgagggctgaggcctgcgagtcagcccgtctcgggcagggtaggggagaagcgcccacccggagcctccatctggtcagcccacaggtgttcacctccagctgcgtccccgcctgccaccagcgggggttcaaagaccctggggccaccaggccaggagtgtggaggtggctcccagaggggtctgcccccaagccctccccgctgcactgcctggagagcgccctgagggggatcttgcctgtaaggcccttgcgcttcgcctgcgtgggaggccccagccccagccccagccccggctccagctcgagcttcagcggctctgaaggagaagacccgaggccagagcctgatctctggaagccgctcccccaggagagggaccgccttcccagctgtaagcctcctgtccctctgtccccatgtcctggtgggacccctgctggcagcagtggcggcagccctggtgaagaccccaggagaacagagcccaggtactgcagcggcctcggtgcaggtacagctcaggatccctgcccggtttctcagctggagaaaaggcccagggttagtgaagcatccagaggcctggagcttggacatggaagacccagagttgcagccaagacccatgagaggctgctcccccagggcccgcctgagctgcccagtgagtctccccctccggagctgccccctccggaagctgcgcctcctgtgttgccagcctcctccctgcagccgccatgccactgtgggaagcccctgcagcaggagctgcacagcctcggtgctgcccttgcggagaagctggatcggctcgccacagcgctggcaggcctggctcaggaagtggccaccatgaggacccaggtgaatcggctggggaggcgcccccaaggccctgggccaatgggccaagcttcctggatgtggaccctcccacggggacctcgctgggctcatggccctggtcacagacatctgccctactggaggcagaagggacccacgaggcctaaaccaaagatcctgcgtggccagggagagagctgcagggctggtgacctgcaaggactctccagagggaccgctcgccgggcacgtccgctgcctccagacgctcccccggcagaacctcctgggctccactgcagctcttcccagcagctgctgtcctctacacccagctgccatgctgcgccgcctgcacaccccctcctcgcacataccgggggccaccagagcccccttccccctttagtgcctgctgccttacccctgcagggagcctctcctcctgcagccagtgcagatgcagacgtgccgacctcaggagtggcaccagacgggatcccagagcggcccaaggagccgagcagcctgctgggaggagtgcagagggccctccaggaagaactgtggggtggggagcacagggacccgagatggggggcgcattgatggcattcctcttctccacatctgctcgttcttgccgagggtgcagtggtggcgtggaagccctgtcaccccaccccaggccaccctctcccagaggacgccatctcccttactgttgctgggagcctcgccctttgtcccaactgggtagagcccccaggtgctgtttgctcaggaggctgctgtgggggtgccttcctcagcctctggccctcttggctcagattcaatcaaatgttgcttccctctcctgtctttcccactggagccgcccaagcttgtaggtgggtggtgtgcataggccacgtgtgccccacatatgcagggggtgccccacacagctagagcggccaggagagcgcctcctaaccaccagccgttcctgatctcaggagccttgaagggctgggctcttgccttcctggagtaaatattggcacagatttcatttgagagaactcagccccctggtctaagctggacttacctctgtggattctgaaattaaagaagtgagttgctaaggaa

SEQ ID NO: 146994 - DNA, 527 bp, Homo sapiens
  Payload ID: 9075
  Gene Symbol: KRBA1
  Gene Name: KRAB-A domain containing 1
  ENST ID: ENST00000497895
  CDS Start-End: 218-527
cagaccctggctattatcctggagtgtgcgcctggaggcctaggtggggttaccaagtgcagggacagctaggctgtcccctctgggatggaacaaccaacccccccggagactgtgcctgcaggtgtccatcaccttcaaggacttggccgtgcggttctcggaggaggagtggcggctcctggaggaggggcagagggagttctaccgagacgtgatgcgggagaactacgagacgctggtctctgtggggacagctgagctgctccccctctctgctttcctgtcaccctcagagcctggaagagctgttgggggagggagccacgctgatgaggggcaggagcctgctggttgtggagatccccaggggggacagccccggcacagcctgcacctcacagccctggtgcagctggtgaaggagatcccagagttcttgtttggagaagtcaagggcgctatggacagccccgagagcgagagccggggagccagcctggatggagagagagcgagccccgagg

SEQ ID NO: 146995 - DNA, 3763 bp, Homo sapiens
  Payload ID: 9075
  Gene Symbol: KRBA1
  Gene Name: KRAB-A domain containing 1
  ENST ID: ENST00000496259
  CDS Start-End: 45-3239
cccgcgccggaaaccgaggagtggcggggaggctgagcccggggatggcgcgccaggtgtccatcaccttcaaggacttggccgtgcggttctcggaggaggagtggcggctcctggaggaggggcagagggagttctaccgagacgtgatgcgggagaactacgagacgctggtctctgtggggacagctgagctgctccccctctctgctttcctgtcaccctcagagcctggaagagctgttgggggagggagccacgctgatgaggggcaggagcctgctggttgtggagatccccaggggggacagccccggcacagcctgcacctcacagccctggtgcagctggtgaaggagatcccagagttcttgtttggagaagtcaagggcgctatggacagccccgagagcgagagccggggagccagcctggatggagagagagcgagccccgaggctgcggcaagagagccctgccctctccgaggcctgctcagctgccttccagacggccctaccagccagccccacctggccaccacgcccaccgacagctcgtgttccagtggcccaactggtgacggggtccagggaagtcctctccccatcaaaactgccgacaaaccgtggcctacaaggaaggaaggcccaggagccctgggcggggagcccagccctcccacccatagccccagcaggaggaagagccacagaggacaggagagagggacctcagaggccggaatttctcctgggaacagccccttgcaaggcctcatcaactgtctgaaggaaatccttgtgcctgggccccggcaccccgagacatccccaagcttcttgccacctctccctagcctgggcacgtccaggctaaccagagcagacctggggcctgggagcccgccctgggcagtgaagaccgaggcggtttcaggggattgtcccctccagggtctgctacactgtctgaaggagctccccgaggcccaggacaggcatcccagtccctcaggagtggggaaccgacggctacaggagaatccaggagcctggaaaaggggttctggagggcctggatacctcctgacccctcctccccatcctgatcttggagctggcggtctgctctctgtgaagatggagaacagctgggtccagagccccccaggacctgcatcctgtcagcctggcaggcagcccctcagtccctcagccactggagacaccagaggggtcccccaacccagctggggccctgaggctcaagctgccagtgcctcaagctcaccgctggaagccctggaagcctgtctgaagggcattcccccaaatgggtcgtcaccttcccagctgccacccacttcttgttcccagaacccccagccaggagactctaggtctcagaagcctgaactgcaaccccacagatcacacagtgaagaagcgaccagagagcctgttctgcctctgggtctgcagagctgtgtgagagatggccccagcaggcccctggccccccgaggaacccccaccagcttctcctcatccagcagcaccgactgggacctggattttgggagtcctgtggggaaccaggggcagcatcctggaaaaggaagcccaccaggaagctccccactgcagggtctggagaattgtctcaaggagatacctgtgcctgtgctgcggcctgcctggccctgctcctcagcagcagacaggggaccgaggagagcagagcccaggaactggacagcagacaaggaaggactgagggctgaggcctgcgagtcagcccgtctcgggcagggtaggggagaagcgcccacccggagcctccatctggtcagcccacaggtgttcacctccagctgcgtccccgcctgccaccagcgggggttcaaagaccctggggccaccaggccaggagtgtggaggtggctcccagaggggtctgcccccaagccctccccgctgcactgcctggagagcgccctgagggggatcttgcctgtaaggcccttgcgcttcgcctgcgtgggaggccccagccccagccccagccccggctccagctcgagcttcagcggctctgaaggagaagacccgaggccagagcctgatctctggaagccgctcccccaggagagggaccgccttcccagctgtaagcctcctgtccctctgtccccatgtcctggtgggacccctgctggcagcagtggcggcagccctggtgaagaccccaggagaacagagcccaggtactgcagcggcctcggtgcaggtacagctcaggatccctgcccggtttctcagctggagaaaaggcccagggttagtgaagcatccagaggcctggagcttggacatggaagacccagagttgcagccaagacccatgagaggctgctcccccagggcccgcctgagctgcccagtgagtctccccctccggagctgccccctccggaagctgcgcctcctgtgttgccagcctcctccctgcagccgccatgccactgtgggaagcccctgcagcaggagctgcacagcctcggtgctgcccttgcggagaagctggatcggctcgccacagcgctggcaggcctggctcaggaagtggccaccatgaggacccaggtgaatcggctggggaggcgcccccaaggccctgggccaatgggccaagcttcctggatgtggaccctcccacggggacctcgctgggctcatggccctggtcacagacatctgccctactggaggcagaagggacccacgaggcctaaaccaaagatcctgcgtggccagggagagagctgcagggctggtgacctgcaaggactctccagagggaccgctcgccgggcacgtccgctgcctccagacgctcccccggcagaacctcctgggctccactgcagctcttcccagcagctgctgtcctctacacccagctgccatgctgcgccgcctgcacaccccctcctcgcacataccgggggccaccagagcccccttccccctttagtgcctgctgccttacccctgcagggagcctctcctcctgcagccagtgcagatgcagacgtgccgacctcaggagtggcaccagacgggatcccagagcggcccaaggagccgagcagcctgctgggaggagtgcagagggccctccaggaagaactgtggggtggggagcacagggacccgagatggggggcgcattgatggcattcctcttctccacatctgctcgttcttgccgagggtgcagtggtggcgtggaagccctgtcaccccaccccaggccaccctctcccagaggacgccatctcccttactgttgctgggagcctcgccctttgtcccaactgggtagagcccccaggtgctgtttgctcaggaggctgctgtgggggtgccttcctcagcctctggccctcttggctcagattcaatcaaatgttgcttccctctcctgtctttcccactggagccgcccaagcttgtaggtgggtggtgtgcataggccacgtgtgccccacatatgcagggggtgccccacacagctagagcggccaggagagcgcctcctaaccaccagccgttcctgatctcaggagccttgaagggctgggctcttgccttcctggagtaaatattggcacagatttcatttgagagaactcagccccctggtctaagctggacttacctctgtggattctgaaattaaagaagtgagttgctaa

SEQ ID NO: 146996 - DNA, 699 bp, Homo sapiens
  Payload ID: 9075
  Gene Symbol: KRBA1
  Gene Name: KRAB-A domain containing 1
  ENST ID: ENST00000467333
  CDS Start-End: 1-502
ccggggagccagcctggatggagagagagcgagccccgaggctgcggcaagagagccctgccctctccgaggcctgctcagctgccttccagacggccctaccagccagccccacctggccaccacgcccaccgacagctcgtgttccagtggcccaactggtgacggggtccagggaagtcctctccccatcagtgagtctgacacagcagggacagggagaaccagcatttcaaaagccctgatcgtggcgtcagaggacctggaccctgtgccctcttcatttttttctaggactcagttcccctgttgtgctgttcttttgttaacaaagtacgccagggagcaggacaacatatttagcctctggtgtaaccaccaaagaggaggcatgatgctcagcccctggggagcctgtcatcccgccccgatcactgagcactttgtacacagaaagtctccggcagtttctaacatgcaggcccacggccagcagcattgacctacctgtgtgcactggtctgatccttagaccgtctcatcacagcaaccctaactgcagagcagggcaaggggagctcctaggatttctctggggtctcattttatttttaaaacttctcacaaattttgcatgtctgtttttataaaaaagtacttcaaatttatatggaataaaattggcactcccaaagagca

SEQ ID NO: 146997 - DNA, 596 bp, Homo sapiens
  Payload ID: 9075
  Gene Symbol: KRBA1
  Gene Name: KRAB-A domain containing 1
  ENST ID: ENST00000486744
  CDS Start-End: 491-596
gtagtccgcgtctgcgccggccggccgggccgccgaagccgggggctccgggcggaaacggcaccacccaccaagggatgcgaggcgctcggggcgggctcaacgaggccgggggcgggcccgggcgcgcccacccccgcccctccccctcggcccaggcccccggccccgccttctcctgcgcggacctgggccgccgccgacgagggtcgcgtgcgcccgcgccagggcccgcgccggaaaccgaggagtggcggggaggctgagcccggggatggcgcgccagctctccgccgccggtacccacggcccagtctccacctggggaaacccccttggcgtggcttgtttcgttacaagttatcctggtagagtgggcatgaaggcctcggaggcagtgtccatcaccttcaaggacttggccgtgcggttctcggaggaggagtggcggctcctggaggaggggcagagggagttctaccgagacgtgatgcgggagaactacgagacgctggtctctgtggagcctggaagagctgttgggggagggagccacgctgatgaggggcaggagcctgctggttgtggagatcccc

SEQ ID NO: 146998 - DNA, 3434 bp, Homo sapiens
  Payload ID: 9075
  Gene Symbol: KRBA1
  Gene Name: KRAB-A domain containing 1
  Uniprot ID: A5PL33
  ENST ID: ENST00000485033
  CDS Start-End: 1-2910
atgcgggagaactacgagacgctggtctctgtggggacagctgagctgctccccctctctgctttcctgtcaccctcagagcctggaagagctgttgggggagggagccacgctgatgaggggcaggagcctgctggttgtggagatccccaggggggacagccccggcacagcctgcacctcacagccctggtgcagctggtgaaggagatcccagagttcttgtttggagaagtcaagggcgctatggacagccccgagagcgagagccggggagccagcctggatggagagagagcgagccccgaggcagctgcggcaagagagccctgccctctccgaggcctgctcagctgccttccagacggccctaccagccagccccacctggccaccacgcccaccgacagctcgtgttccagtggcccaactggtgacggggtccagggaagtcctctccccatcaaaactgccgacaaaccgtggcctacaaggaaggaaggcccaggagccctgggcggggagcccagccctcccacccatagccccagcaggaggaagagccacagaggacaggagagagggacctcagaggccggaatttctcctgggaacagccccttgcaaggcctcatcaactgtctgaaggaaatccttgtgcctgggccccggcaccccgagacatccccaagcttcttgccacctctccctagcctgggcacgtccaggctaaccagagcagacctggggcctgggagcccgccctgggcagtgaagaccgaggcggtttcaggggattgtcccctccagggtctgctacactgtctgaaggagctccccgaggcccaggacaggcatcccagtccctcaggagtggggaaccgacggctacaggagaatccaggagcctggaaaaggggttctggagggcctggatacctcctgacccctcctccccatcctgatcttggagctggcggtctgctctctgtgaagatggagaacagctgggtccagagccccccaggacctgcatcctgtcagcctggcaggcagcccctcagtccctcagccactggagacaccagaggggtcccccaacccagctggggccctgaggctcaagctgccagtgcctcaagctcaccgctggaagccctggaagcctgtctgaagggcattcccccaaatgggtcgtcaccttcccagctgccacccacttcttgttcccagaacccccagccaggagactctaggtctcagaagcctgaactgcaaccccacagatcacacagtgaagaagcgaccagagagcctgttctgcctctgggtctgcagagctgtgtgagagatggccccagcaggcccctggccccccgaggaacccccaccagcttctcctcatccagcagcaccgactgggacctggattttgggagtcctgtggggaaccaggggcagcatcctggaaaaggaagcccaccaggaagctccccactgcagggtctggagaattgtctcaaggagatacctgtgcctgtgctgcggcctgcctggccctgctcctcagcagcagacaggggaccgaggagagcagagcccaggaactggacagcagacaaggaagggtctgcccccaagccctccccgctgcactgcctggagagcgccctgagggggatcttgcctgtaaggcccttgcgcttcgcctgcgtgggaggccccagccccagccccagccccggctccagctcgagcttcagcggctctgaaggagaagacccgaggccagagcctgatctctggaagccgctcccccaggagagggaccgccttcccagctgtaagcctcctgtccctctgtccccatgtcctggtgggacccctgctggcagcagtggcggcagccctggtgaagaccccaggagaacagagcccaggtactgcagcggcctcggtgcaggtacagctcaggatccctgcccggtttctcagctggagaaaaggcccagggttagtgaagcatccagaggcctggagcttggacatggaagacccagagttgcagccaagacccatgagaggctgctcccccagggcccgcctgagctgcccagtgagtctccccctccggagctgccccctccggaagctgcgcctcctgtgttgccagcctcctccctgcagccgccatgccactgtgggaagcccctgcagcaggagctgcacagcctcggtgctgcccttgcggagaagctggatcggctcgccacagcgctggcaggcctggctcaggaagtggccaccatgaggacccaggtgaatcggctggggaggcgcccccaaggccctgggccaatgggccaagcttcctggatgtggaccctcccacggggacctcgctgggctcatggccctggtcacagacatctgccctactggaggcagaagggacccacgaggcctaaaccaaagatcctgcgtggccagggagagagctgcagggctggtgacctgcaaggactctccagagggaccgctcgccgggcacgtccgctgcctccagacgctcccccggcagaacctcctgggctccactgcagctcttcccagcagctgctgtcctctacacccagctgccatgctgcgccgcctgcacaccccctcctcgcacataccgggggccaccagagcccccttccccctttagtgcctgctgccttacccctgcagggagcctctcctcctgcagccagtgcagatgcagacgtgccgacctcaggagtggcaccagacgggatcccagagcggcccaaggagccgagcagcctgctgggaggagtgcagagggccctccaggaagaactgtggggtggggagcacagggacccgagatggggggcgcattgatggcattcctcttctccacatctgctcgttcttgccgagggtgcagtggtggcgtggaagccctgtcaccccaccccaggccaccctctcccagaggacgccatctcccttactgttgctgggagcctcgccctttgtcccaactgggtagagcccccaggtgctgtttgctcaggaggctgctgtgggggtgccttcctcagcctctggccctcttggctcagattcaatcaaatgttgcttccctctcctgtctttcccactggagccgcccaagcttgtaggtgggtggtgtgcataggccacgtgtgccccacatatgcagggggtgccccacacagctagagcggccaggagagcgcctcctaaccaccagccgttcctgatctcaggagccttgaagggctgggctcttgccttcctggagtaaatattggcacagatttcatttgagagaactcagccccctggtctaagctggacttacctctgtggattctgaaattaaagaagtgagttgctaa

SEQ ID NO: 146999 - DNA, 3449 bp, Homo sapiens
  Payload ID: 9075
  Gene Symbol: KRBA1
  Gene Name: KRAB-A domain containing 1
  ENST ID: ENST00000621069
  CDS Start-End: 1-1853
agcctgctggttgtggagatccccaggggggacagccccggcacagcctgcacctcacagccctggtgcagctggtgaaggagatcccagagttcttgtttggagaagtcaagggcgctatggacagccccgagagcgagagccggggagccagcctggatggagagagagcgagccccgaggctgcggcaagagagccctgccctctccgaggcctgctcagctgccttccagacggccctaccagccagccccacctggccaccacgcccaccgacagctcgtgttccagtggcccaactggtgacggggtccagggaagtcctctccccatcaaaactgccgacaaaccgtggcctacaaggaaggaaggcccaggagccctgggcggggagcccagccctcccacccatagccccagcaggaggaagagccacagaggacaggagagagggacctcagaggccggaatttctcctgggaacagccccttgcaaggcctcatcaactgtctgaaggaaatccttgtgcctgggccccggcaccccgagacatccccaagcttcttgccacctctccctagcctgggcacgtccaggctaaccagagcagacctggggcctgggagcccgccctgggcagtgaagaccgaggcggtttcaggggattgtcccctccagggtctgctacactgtctgaaggagctccccgaggcccaggacaggcatcccagtccctcaggagtggggaaccgacggctacaggagaatccaggagcctggaaaaggggttctggagggcctggatacctcctgacccctcctccccatcctgatcttggagctggcggtctgctctctgtgaagatggagaacagctgggtccagagccccccaggacctgcatcctgtcagcctggcaggcagcccctcagtccctcagccactggagacaccagaggggtcccccaacccagctggggccctgaggctcaagctgccagtgcctcaagctcaccgctggaagccctggaagcctgtctgaagggcattcccccaaatgggtcgtcaccttcccagctgccacccacttcttgttcccagaacccccagccaggagactctaggtctcagaagcctgaactgcaaccccacagatcacacagtgaagaagcgaccagagagcctgttctgcctctgggtctgcagagctgtgtgagagatggccccagcaggcccctggccccccgaggaacccccaccagcttctcctcatccagcagcaccgactgggacctggattttgggagtcctgtggggaaccaggggcagcatcctggaaaaggaagcccaccaggaagctccccactgcagggtctggagaattgtctcaaggagatacctgtgcctgtgctgcggcctgcctggccctgctcctcagcagcagacaggggaccgaggagagcagagcccaggaactggacagcagacaaggaagggtctgcccccaagccctccccgctgcactgcctggagagcgccctgagggggatcttgcctgtaaggcccttgcgcttcgcctgcgtgggaggccccagccccagccccagccccggctccagctcgagcttcagcggctctgaaggagaagacccgaggccagagcctgatctctggaagccgctcccccaggagagggaccgccttcccagctgtaagcctcctgtccctctgtccccatgtcctggtgggacccctgctggcagcagtggcggcagccctggtgaagaccccaggagaacagagcccaggtactgcagcggcctcggtgcaggtgagcctggggtctcctgagggggcgcccatgcgttccccagaggaccaggagtccagactggatcctttgagtcctgcctgtcgctttgcctggctcttgccagggagtcctgcacattggccgtgctttagttccctgtaaggtacagctcaggatccctgcccggtttctcagctggagaaaaggcccagggttagtgaagcatccagaggcctggagcttggacatggaagacccagagttgcagccaagacccatgagaggctgctcccccagggcccgcctgagctgcccagtgagtctccccctccggagctgccccctccggaagctgcgcctcctgtgttgccagcctcctccctgcagccgccatgccactgtgggaagcccctgcagcaggagctgcacagcctcggtgctgcccttgcggagaagctggatcggctcgccacagcgctggcaggcctggctcaggaagtggccaccatgaggacccaggtgaatcggctggggaggcgcccccaaggccctgggccaatgggccaagcttcctggatgtggaccctcccacggggacctcgctgggctcatggccctggtcacagacatctgccctactggaggcagaagggacccacgaggcctaaaccaaagatcctgcgtggccagggagagagctgcagggctggtgacctgcaaggactctccagagggaccgctcgccgggcacgtccgctgcctccagacgctcccccggcagaacctcctgggctccactgcagctcttcccagcagctgctgtcctctacacccagctgccatgctgcgccgcctgcacaccccctcctcgcacataccgggggccaccagagcccccttccccctttagtgcctgctgccttacccctgcagggagcctctcctcctgcagccagtgcagatgcagacgtgccgacctcaggagtggcaccagacgggatcccagagcggcccaaggagccgagcagcctgctgggaggagtgcagagggccctccaggaagaactgtggggtggggagcacagggacccgagatggggggcgcattgatggcattcctcttctccacatctgctcgttcttgccgagggtgcagtggtggcgtggaagccctgtcaccccaccccaggccaccctctcccagaggacgccatctcccttactgttgctgggagcctcgccctttgtcccaactgggtagagcccccaggtgctgtttgctcaggaggctgctgtgggggtgccttcctcagcctctggccctcttggctcagattcaatcaaatgttgcttccctctcctgtctttcccactggagccgcccaagcttgtaggtgggtggtgtgcataggccacgtgtgccccacatatgcagggggtgccccacacagctagagcggccaggagagcgcctcctaaccaccagccgttcctgatctcaggagccttgaagggctgggctcttgccttcctggagtaaatattggcacagatttcatttgagagaactcagccccctggtctaagctggacttacctctgtggattctgaaattaaagaagtgagttgctaa

SEQ ID NO: 147000 - DNA, 1964 bp, Homo sapiens
  Payload ID: 9076
  Gene Symbol: KRBA2
  Gene Name: KRAB-A domain containing 2
  Uniprot ID: Q6ZNG9
  ENST ID: ENST00000331336
  CDS Start-End: 7-1485
tgctgcatgccttcattcctggtgccctctcttgtctcttccccagtcctgctgaagctgctctttagcccaggccccaagactatatggtccctgtggcagcagccaatgttgtttcaggaagcaacagcatttgaaaatatgaccaaagattggaattatttagaaggctctcaaaaggattgctacagagacacaatgctggacagttatgagaacacggtcccacagggatccttcttacagctctccatgatgcctcagagagctggaaatgatccacctggggtttcaaatgcaagtgaaatggaaatggagataagtaacatgagagaaaagtttcttatgagtgtaacaaagttagtagaaagcaaaagttacaacagcaaggtattttccaaagaaaagtactttcaaacaataaaggaagttaaagaagctaaagaaaaagggaagaagtcatcacgtgattatcgccgtgcagcaaaatatgatgtgatctctgtacagggcacagagaaactgatagaggctactcatggagaacgtgatcgaatacggtattatgtacataaggaagagttgtttgatattcttcatgatacacatctcagtattggacatggtgggcggacacgcatgctcaaggagctgcaaggaaaatatgggaatgtcaccaaagaagttattgtcttatatctgactctgtgtaaacagtgccaccagaagaacccagtacccaagagaggccttgcaccaaagcccatgacttttaaggacatagactccacatgccaagttgaaatacttgacatgcagtccagtgccgatggtgagttcaagttcattttatactaccaggatcactcaaccaagtttattattttacggccattaagaaccaaacaggcccatgaggtggtcagtgtcttgttagatattttcacaattcttggtacacccagtgtgttagactctgacagtggcgttgagttcacaaaccaggttgttcatgagctcaatgagttgtggccagacctaaagattgtatctggtaagtaccaccctggccaaagccagggctccctggaaggagcaagccgtgatgtaaagaacatgataagtacctggatgcagagtaaccactcatgtcactgggccaaaggcctccgattcatgcagatggtgaggaatcaggctttcgacgtttccttgcagcaaagtccatttgaggcaatgtttggctataaagccaaatttgggctatattcctcaaacttgccccgggaaactgtggctactttacaaacggaagaagagctagaaattgctgaagaacagctagaaaatagcctttggatcaggcaggaagaaagggctgagattggagcagacagatctgatatggacgatgacatggatcccactcctgaagcttcagaacccagcacctcacaagggacttccggtctcctctgctggtgaacagatggctgctgggtggacagtcacaggtgtctctctgagcatagtcatctgagaactgttgccagaggccccagaggaaaagattgaaggctgcactctcaggtcaagttgtacatggcagtccttgctcaaaaagacaaaagttcaggtctgtgtatttattcttagggctgccataaaaaattaccacaacctggccgggcgcagcgctcatgcccgtaatcccagcactttggtaggccaaggtgggcgggtcacttgagatcaggagttcaagactagcctggccaacatgatgaaaccctgtctctactgaaaatatagaaattagccaggcttggagctgtgtgcctgtaatcccagctaaccaggaggctgaggcaggagaatcacttgaacccaggaggcagaggttgcagtgagccgagaccatgccactgcactccggcctgggtgacaaagcaagactctgtctc

SEQ ID NO: 147001 - DNA, 2562 bp, Homo sapiens
  Payload ID: 9076
  Gene Symbol: KRBA2
  Gene Name: KRAB-A domain containing 2
  ENST ID: ENST00000396267
  CDS Start-End: 833-2065
gtggggcggagttgctgctcgggggcctctgggtggagggggattcagacgccgcgtctggtgtgtccctttctccttcctgaccttcctcagtctgcagctcttttctccaccgcgcgcccgcctcagccgttcagccctgagctggcgggtggacgggcatggatccaggcggtgggagcagtctgcgaagtcagggtaggaaggctacacaaaggaggcgacatcccagcccggtcctcaggaataagcgggcgtgcccgtgtggtgtggacggtgaggggacactgtattaagtgccttatctgcattatcattgaatcttcatagcaatcgattgtgatgggtactggtcatctccccgggttgtagatgaggaaactgaggcctcagtaactttgctttagtcagtaaatgataagagtcagcaaatgaattcccaagcgtagactcggccgtaccgctgctctaccttgctaataacgacctacctgtaagcgacatttttgacaaaatgtcctttaaacatcttttgtgctcagctctgtattcgtgggccctccaaagggggtacaggcaggtagaagcctccgtccctaccttataggttgtatatatctgaactggtcgactaaagatgcaaagcgaagtgctccagtgagtgtggtacaggttgttgagatgaaggagagatggcaatcagctaaagttactgaatacgtcaggaaggaggctggtttcagctggctgtgattgggaggatcaatgcgaggacattccgagtcggaaacagccaaggcgaagactcacaggatccttcttacagctctccatgatgcctcagagagctggaaatgatccacctggggtttcaaatgcaagtgaaatggaaatggagataagtaacatgagagaaaagtttcttatgagtgtaacaaagttagtagaaagcaaaagttacaacagcaaggtattttccaaagaaaagtactttcaaacaataaaggaagttaaagaagctaaagaaaaagggaagaagtcatcacgtgattatcgccgtgcagcaaaatatgatgtgatctctgtacagggcacagagaaactgatagaggctactcatggagaacgtgatcgaatacggtattatgtacataaggaagagttgtttgatattcttcatgatacacatctcagtattggacatggtgggcggacacgcatgctcaaggagctgcaaggaaaatatgggaatgtcaccaaagaagttattgtcttatatctgactctgtgtaaacagtgccaccagaagaacccagtacccaagagaggccttgcaccaaagcccatgacttttaaggacatagactccacatgccaagttgaaatacttgacatgcagtccagtgccgatggtgagttcaagttcattttatactaccaggatcactcaaccaagtttattattttacggccattaagaaccaaacaggcccatgaggtggtcagtgtcttgttagatattttcacaattcttggtacacccagtgtgttagactctgacagtggcgttgagttcacaaaccaggttgttcatgagctcaatgagttgtggccagacctaaagattgtatctggtaagtaccaccctggccaaagccagggctccctggaaggagcaagccgtgatgtaaagaacatgataagtacctggatgcagagtaaccactcatgtcactgggccaaaggcctccgattcatgcagatggtgaggaatcaggctttcgacgtttccttgcagcaaagtccatttgaggcaatgtttggctataaagccaaatttgggctatattcctcaaacttgccccgggaaactgtggctactttacaaacggaagaagagctagaaattgctgaagaacagctagaaaatagcctttggatcaggcaggaagaaagggctgagattggagcagacagatctgatatggacgatgacatggatcccactcctgaagcttcagaacccagcacctcacaagggacttccggtctcctctgctggtgaacagatggctgctgggtggacagtcacaggtgtctctctgagcatagtcatctgagaactgttgccagaggccccagaggaaaagattgaaggctgcactctcaggtcaagttgtacatggcagtccttgctcaaaaagacaaaagttcaggtctgtgtatttattcttagggctgccataaaaaattaccacaacctggccgggcgcagcgctcatgcccgtaatcccagcactttggtaggccaaggtgggcgggtcacttgagatcaggagttcaagactagcctggccaacatgatgaaaccctgtctctactgaaaatatagaaattagccaggcttggagctgtgtgcctgtaatcccagctaaccaggaggctgaggcaggagaatcacttgaacccaggaggcagaggttgcagtgagccgagaccatgccactgcactccggcctgggtgacaaagcaagactctgtctcaaaaaaaaaaaaaaaaaa

SEQ ID NO: 147002 - DNA, 3023 bp, Homo sapiens
  Payload ID: 9077
  Gene Symbol: KRI1
  Gene Name: KRI1 homolog
  Uniprot ID: Q8N9T8
  ENST ID: ENST00000312962
  CDS Start-End: 21-2150
ttcctcaatgcgcgtgcgcaatgggccacagaaccgccatgccggaaccgcgcgggtcgtcgcagctgcgggtgaacgcggcgtttgccgcgcggtacaaccgctaccgggagcgcgaggaactgcagcggctgaaggatcgctacggggaccgagacagcagcagcgactccagctccgagtcggactcaagcgacgagcgcgtggaatttgatccccagcaggagcgggacttttacaaaacgctctccttgttgaagaagaaggacccccgcatttatcagaaagatgccaccttctataacagaacagcatcgtcatcagacagtgaggaggacccagaagccttggagaagcagaagaaagtgcggcccatgtacctgaaggactacgagaggaaggttatcttggagaaggcaggcaaatatgttgatgaggagaactcagacggggagacttccaatcacagactccaggagacatcgtcgcaaagttatgtggaggaacagaaacagctcaaggaaagcttccgggcatttgtggaggacagtgaggacgaggacggcgctggggagggcggctccagtttgctgcagaaacgtgccaaaaccaggcaggagaaggcccaggaggaggccgactacatcgagtggctgaagggacagaaagagattcggaacccagattccctgaaggaactgacgcatctcaaggaatactggaacgaccctgagttggatgaaggggagcggttcctgcgggattacatcctcaacaaacgctatgaggaggaggaagaggaggaggaagatgaagaggaaatggaggaagaggagggggtccacggtcccccagtccagctggctgtggacgactcctcagacgaaggggagctgtttctgaagaaacaggaggactttgaacagaagtacaatttccgtttcgaggagccggactcagcatcggtcaagacctacccacgcagcatcgcgtcctccgtgcgccgtaaggatgagcgcagaaaggagaagagggaagagactcgggagcgaaagaagagggagaaagcaaagaagcaggaagagctcaagcagctgaagaacctgaagaggaaggagattctggccaagctggagaagctgcggaaagtaacaggcaacgagatgctgggcctcgaggagggggaccttgaagacgacttcgaccctgcccagcacgaccagctcatgcagaagtgctttggggacgagtactacggggccgtggaggaggagaagccacaatttgaggaagaagaagggcttgaagacgactggaactgggacacgtgggacgggcctgagcaggagggagactggagccagcaggagctgcactgtgaggaccccaacttcaacatggacgccgactacgaccccagccagccgaggaagaaaaagcgcgaggcccccttgacgggcaagaagaagcgcaagtcgcccttcgccgcggccgtggggcaggagaagcccgtgtttgaacccggggacaagacgttcgaggagtacctggatgagtattaccggctggactacgaggacatcatcgacgacctgccctgtcgcttcaagtaccgcacagtggtgccctgtgactttggcctcagcactgaggagatcctcgctgctgacgataaggagctgaaccggtggtgctccctaaagaagacctgcatgtacaggtcagagcaggaggagctgcgggacaagcgggcgtacagccagaaggcccagaactcatggaaaaagcggcaggtcttcaagtcactctgccgagaagaggcagagacacctgcggaagccacagggaagccacagagagatgaagccggcccacagaggcagctgccagcccttgatggcagcttgatggggccggagagtcccccagcacaggaagaggaagcccctgtatcaccccacaagaagccagccccccagaagcggaggagggccaagaaggcacggctgctgggccccactgtgatgcttggtggatgcgagttcagccgccagagactgcaggcctttggcctcaaccccaaacggctgcacttccgccagctgggccggcagcggaggaaacaacaggggcccaagaacagctcctgagcaccagggagcaggcaggggcctcaggctcctctcctcaaatcaagccctggacaggtctcgcacccacaagtactatctgctgcagagatcctctcatctgtggccaggcacgcctgtaatcccagcactttgggaggccgaggtgaaaggatcacttgagcccaggaattggagaccagcgtgggcaacttagcgagactccatctctacaaaatgtggtgacacatgcctgtagtcccagctactcaggaggctggggaaggaagatcacttaaggccatgagtttgaggctacagagagctatgattgcaccactgcactccagcctgggcaacaaagcaagaccctgtctcttgaaaaaaaaaaaaaaattaaaaaacacgtgtagctgtgggtaaggaagtcgtcccattttatggatgtggaaactgaggctgacttaaacttcccgtgacttggagctctcacctcgagacacctcccagaccccacatcccctcagaacgctgcgcccagccacacccacgatcaagttacacagctttattggcccccagcagccacagttcccccaagggggctttgggacagggagggcccgggcgtccagtgcaaactacagtacgtgagtcaggccctgaggggggtgcccggggtcctccttccctaccctgccaggagggccccgctggtgggagacaggtgtatgggctctgtgggctctgtccctggctgaatggccccagactggttgcagctgggcttgaggggctgacaacaggaagtaccatcatcactgccagagctcaagatcccacacccgacatgacataaataaaaaaataaatagtgttgtatctttcccctca

SEQ ID NO: 147003 - DNA, 885 bp, Homo sapiens
  Payload ID: 9077
  Gene Symbol: KRI1
  Gene Name: KRI1 homolog
  ENST ID: ENST00000432197
  CDS Start-End: 295-885
aatgcgcgtgcgcaatgggccacagaaccgccatgccggaaccgcgcgggtcgtcgcagctgcgggtgaacgcggcgtttgccgcgcggtacaaccgctaccgggagcgcgaggaactgcagcggcgaatttgatccccagcaggagcgggacttttacaaaacgctctccttgttgaagaagaaggacccccgcatttatcagaaagatgccaccttctataacagaacagcatcgtcatcagacagtgaggaggacccagaagccttggagaagcagaagaaagtgcggcccatgtacctgaaggactacgagaggaaggttatcttggagaaggcaggcaaatatgttgatgaggagaactcagacggggagacttccaatcacagactccaggagacatcgtcgcaaagttatgtggaggaacagaaacagctcaaggaaagcttccgggcatttgtggaggacagtgaggacgaggacggcgctggggagggcggctccagtttgctgcagaaacgtgccaaaaccaggcaggagaaggcccaggaggaggccgactacatcgagtggctgaagggacagaaagagattcggaacccagattccctgaaggaactgacgcatctcaaggaatactggaacgaccctgagttggatgaaggggagcggttcctgcgggattacatcctcaacaaacgctatgaggaggaggaagaggaggaggaagatgaagaggaaatggaggaagaggagggggtccacggtcccccagtccagctggctgtggacgactcctcagacgaaggggagctgtttctgaagaaacaggaggactttgaacagaagtacaatttccgtttcgaggagccggactcagcatcg

SEQ ID NO: 147004 - DNA, 571 bp, Homo sapiens
  Payload ID: 9077
  Gene Symbol: KRI1
  Gene Name: KRI1 homolog
  ENST ID: ENST00000543682
  CDS Start-End: 1-571
acagaaccgccatgccggaaccgcgcgggtcgtcgcagctgcgggtgaacgcggcgtttgccgcgcggtacaaccgctaccgggagcgcgaggaactgcagcggccatcgtcatcagacagtgaggaggacccagaagccttggagaagcagaagaaagtgcggcccatgtacctgaaggactacgagaggaaggttatcttggagaaggcaggcaaatatgttgatgaggagaactcagacggggagacttccaatcacagactccaggagacatcgtcgcaaagttatgtggaggaacagaaacagctcaaggaaagcttccgggcatttgtggaggacagtgaggacgaggacggcgctggggagggcggctccagtttgctgcagaaacgtgccaaaaccaggcaggagaaggcccaggaggaggccgactacatcgagtggctgaagggacagaaagagattcggaacccagattccctgaaggaactgacgcatctcaaggaatactggaacgaccctgagttggatgaaggggagcggttcctgcgggattacatcctcaacaa

SEQ ID NO: 147005 - DNA, 514 bp, Homo sapiens
  Payload ID: 9077
  Gene Symbol: KRI1
  Gene Name: KRI1 homolog
  ENST ID: ENST00000544397
  CDS Start-End: 1-339
agaaccgccatgccggaaccgcgcgggtcgtcgcagctgcgggtgaacgcggcgtttgccgcgcggtacaaccgctaccgggagcgcgaggaactgcagcggctgaaggatcgctacggggaccgagacagcagcagcgactccagctccgagtcggactcaagcgacgagcgcgtggaatttgatccccagcaggagcgggacttttacaaaacgctctccttgttgaagaagaaggacccccgcatttatcagaaagatgccaccttctataacagaacagtgaggaggacccagaagccttggagaagcagaagaaagtgcggcccatgtacctgaaggactacgagaggaaggttatcttggagaaggcaggcaaatatgttgatgaggagaactcagacggggagacttccaatcacagactccaggagacatcgtcgcaaagttatgtggaggaacagaaacagctcaaggaaagcttccgggcatttgtggaggacagtgaggacga

SEQ ID NO: 147006 - DNA, 582 bp, Homo sapiens
  Payload ID: 9077
  Gene Symbol: KRI1
  Gene Name: KRI1 homolog
  ENST ID: ENST00000539027
  CDS Start-End: 1-582
ccgcgcgggtcgtcgcagctgcgggtgaacgcggcgtttgccgcgcggtacaaccgctaccgggagcgcgaggaactgcagcggctgaaggatcgctacggggaccgagacagcagcagcgactccagctccgagtcggactcaagcgacgagcgcgtggaatttgatccccagcaggagcgggacttttacaaaacgctctccttgttgaagaagaaggacccccgcatttatcagaaagatgccaccttctataacagaacagcatcgtcatcagacagtgaggaggacccagaagccttggagaagcagaagaaagtgcggcccatgtacctgaaggactacgagaggaaggttatcttggagaaggcaggcaaatatgttgatgaggagaactcagacggggagacttccaatcacagactccaggagaagcccgtgtttgaacccggggacaagacgttcgaggagtacctggatgagtattaccggctggactacgaggacatcatcgacgacctgccctgtcgcttcaagtaccgcacagtggtgccctgtgactttggcctcagcactgaggag

SEQ ID NO: 147007 - DNA, 2719 bp, Homo sapiens
  Payload ID: 9078
  Gene Symbol: KREMEN1
  Gene Name: kringle containing transmembrane protein 1
  Uniprot ID: Q96MU8
  ENST ID: ENST00000327813
  CDS Start-End: 14-1492
gcactgacggcccatggcgccgccagccgcccgcctcgccctgctctccgccgcggcgctcacgctggcggcccggcccgcgcctagccccggcctcggccccggacccgagtgtttcacagccaatggtgcggattataggggaacacagaactggacagcactacaaggcgggaagccatgtctgttttggaacgagactttccagcatccatacaacactctgaaataccccaacggggaggggggcctgggtgagcacaactattgcagaaatccagatggagacgtgagcccctggtgctatgtggcagagcacgaggatggtgtctactggaagtactgtgagatacctgcttgccagatgcctggaaaccttggctgctacaaggatcatggaaacccacctcctctaactggcaccagtaaaacgtccaacaaactcaccatacaaacttgcatcagtttttgtcggagtcagaggttcaagtttgctgggatggagtcaggctatgcttgcttctgtggaaacaatcctgattactggaagtacggggaggcagccagtaccgaatgcaacagcgtctgcttcggggatcacacccaaccctgtggtggcgatggcaggatcatcctctttgatactctcgtgggcgcctgcggtgggaactactcagccatgtcttctgtggtctattcccctgacttccccgacacctatgccacggggagggtctgctactggaccatccgggttccgggggcctcccacatccacttcagcttccccctatttgacatcagggactcggcggacatggtggagcttctggatggctacacccaccgtgtcctagcccgcttccacgggaggagccgcccacctctgtccttcaacgtctctctggacttcgtcatcttgtatttcttctctgatcgcatcaatcaggcccagggatttgctgttttataccaagccgtcaaggaagaactgccacaggagaggcccgctgtcaaccagacggtggccgaggtgatcacggagcaggccaacctcagtgtcagcgctgcccggtcctccaaagtcctctatgtcatcaccaccagccccagccacccacctcagactgtcccaggtagcaattcctgggcgccacccatgggggctggaagccacagagttgaaggatggacagtctatggtctggcaactctcctcatcctcacagtcacagccattgtagcaaagatacttctgcacgtcacattcaaatcccatcgtgttcctgcttcaggggaccttagggattgtcatcaaccagggacttcgggggaaatctggagcattttttacaagccttccacttcaatttccatctttaagaagaaactcaagggtcagagtcaacaagatgaccgcaatccccttgcaattcaggactcggaagtgacatcactcatctggtctcaggggcagcccagaagtatctgactgtagacacaactaggctccgtgggcatatctgggtggcaatttcagagggcagaggggacaccttcattgcctctcctcgcacagaaatggtgggctctctctggcccagcgtggtggttcatgcctgtaataccagcgttttgggaggctgagatgggaggattgcttgagcccaggaggtcgaggctgcagtgagctatgatcacaccaccacactccagcctgagcagcagagcgggacctcgtctctaagaatagaaagaaagaaagagaaacggtgtcctccgcacagccggtcagaactgtgtgactcacttgaggcaggaccgagagtgacatccagttgcacctttctcacctactttgggacctttgggggtgagttcccctttgtcctctcgtggaaacagcacacagcaagcaaccacaaaaccagagcggaaggagggacttcccaccggcatccggccccagtgccatgttttatcatctggaacggttgtgaagctttgtgtgacttgctcaggatcagcagtcaccatggtctaatcccaagagggactcgtcacccagagacctcaaaaggccccaggcctactgtggttttttctgagaggctcccagaaccaagtggcacgttggtttcctgtgcgtctgtgtctttgtgcctgtatctcgctgggggacttcacaggaagcaggatttgggcattcctgaagctcccagctggacaccactcctgagcgccacatcccatgatcacttcaaccacaggcctttgactttgccacatggcaaggcacccagcagaagatgaggatgacgggtgatgctagatggatgtgtacctggtggatggcccacgcacgaagactcaagaccctcaggactggccatataatctgcaaggtccagtatgaaataagaataagcagcccacacaactgggcatagtggttcatgcctgtaatcccagcactttgggaggctgaggagggtggatcacttgaggccaggaattcgagaccagcctggccaacatggcgaaaacccatctctactaaaaatacaaaaattagttgggcatggtggcacacacctgtaatcccagctactcggaggctgaggcacaagaattgcttgaacctgggaggcggaggttgcagtgagctgagataacgccactgcactccagtgtaggcaacagagtgagaccctgtctc

SEQ ID NO: 147008 - DNA, 6138 bp, Homo sapiens
  Payload ID: 9078
  Gene Symbol: KREMEN1
  Gene Name: kringle containing transmembrane protein 1
  Uniprot ID: Q96MU8
  ENST ID: ENST00000400335
  CDS Start-End: 54-1430
cgcgctgccccctttaccccgggccgcgccccggggccccgcactgacggcccatggcgccgccagccgcccgcctcgccctgctctccgccgcggcgctcacgctggcggcccggcccgcgcctagccccggcctcggccccggacccgagtgtttcacagccaatggtgcggattataggggaacacagaactggacagcactacaaggcgggaagccatgtctgttttggaacgagactttccagcatccatacaacactctgaaataccccaacggggaggggggcctgggtgagcacaactattgcagaaatccagatggagacgtgagcccctggtgctatgtggcagagcacgaggatggtgtctactggaagtactgtgagatacctgcttgccagatgcctggaaaccttggctgctacaaggatcatggaaacccacctcctctaactggcaccagtaaaacgtccaacaaactcaccatacaaacttgcatcagtttttgtcggagtcagaggttcaagtttgctgggatggagtcaggctatgcttgcttctgtggaaacaatcctgattactggaagtacggggaggcagccagtaccgaatgcaacagcgtctgcttcggggatcacacccaaccctgtggtggcgatggcaggatcatcctctttgatactctcgtgggcgcctgcggtgggaactactcagccatgtcttctgtggtctattcccctgacttccccgacacctatgccacggggagggtctgctactggaccatccgggttccgggggcctcccacatccacttcagcttccccctatttgacatcagggactcggcggacatggtggagcttctggatggctacacccaccgtgtcctagcccgcttccacgggaggagccgcccacctctgtccttcaacgtctctctggacttcgtcatcttgtatttcttctctgatcgcatcaatcaggcccagggatttgctgttttataccaagccgtcaaggaagaactgccacaggagaggcccgctgtcaaccagacggtggccgaggtgatcacggagcaggccaacctcagtgtcagcgctgcccggtcctccaaagtcctctatgtcatcaccaccagccccagccacccacctcagactgtcccaggatggacagtctatggtctggcaactctcctcatcctcacagtcacagccattgtagcaaagatacttctgcacgtcacattcaaatcccatcgtgttcctgcttcaggggaccttagggattgtcatcaaccagggacttcgggggaaatctggagcattttttacaagccttccacttcaatttccatctttaagaagaaactcaagggtcagagtcaacaagatgaccgcaatccccttgtgagtgactaaaaaccccactgtgcctaggacttgaggtccctctttgagctcaaggctgccgtggtcaacctctcctgtggttcttctctgacagactcttcccctcctctccctctgcctcggcctcttcggggaaaccctcctcctacagactaggaagaggcaccctgctgccagggcaggcagagcctggattcctcctgcttcatcgattgcacttaggagagagactcaaagccctggggcccggccctctctgcatctctctctgatctagctagcagtgggggtgtcaggacagtgaggctgagatgacagaggtggtcatggctggcacagggctcaggtacattctagatggctgtcaggtggtgggtagctttagttacattgaatttttcttgcttctctatttttgtccacacacaaatcagtttctcctgatctttatgtcttggaacagggccagacagggagaactctcaggtactcttgggagttggtcccatacaagtgcggactcctggacattagcgaggtgtaaagagggcagtgtctgtgctgccccggcagctttgctctccagatgctggactagggtgggcctccttcagcctgggagggtctgagaataagatctagtgacccccatttatatcaaacctgataccttacacatgggcttctttctagattcttctttccatagctcatggagctgcagggaaagctttaagagctttggtcatataaaacatccattcagctgggcgcgatggctcatgcctgtaatcccagcactgtgggaggctgaggcgggcagatcacctgaggtcaggagttcgagaccagcctggccaacatggtgaaaccccgtctctactaaaaatataaaaattagtcaggcgtggtggcaggcgcctgtaatcccagctactcagaaggctgagacagaagaacagcttgaacccaggaggctgagattgcagtgagccgagatcgcaccactgcactccagcctgggtgacaagagtgagactctgtctcaaaaaaacaaaacacaaataaacaaaaaaaatccattcatttactcatgcaataaattctcctgcaagcttttatgggcactcagtaagtactcaggattggctttatcagccttgccactgagcagctcatggtcctatggaacctgagccaggcctcagtctctccatgattggctcagctaactctcagttcagagtggagagtatcaatcttgtgtttttgcccttaggcagcactatatgagacatggggcctgtggtccttccttctggtgtcccccgtgttaaaagataaaaaacaccccaagggccgggcgcggtggctcatgcctgtaatcccagcactttgggaggctgaggcgggtggatcacgaggtcaggtgatcgaaaccatcctggctaagatggtgaaaccccgtctctactaaaaatacaaaaaattagctgggtgtggtggtgggcgcctgtagtcccagctgctcgggaggctgaggcaggagaatggcgtgaacccgggaggcggagcttgcagtgagcagagatcacgccactgcactccagcctgggtgacagtgcaagactctgtctcaaaaaaaaaaaaaacactccaagggccatccgtgctctctgcccctcctgtggggaccaagtggggttaggaatggctcagtggggaaggagagcactcttgtccccagtcccttgccaccctgtcccttagatagggaggtgggctgcagagattggtgccagaagagggtgggtttgggaattggagctcctccaaggagctcctcctaagattgagtgctgcagctgtagtggctgctggttgggagagtaagtgccatcactaatttaaaagtccttgccatctggaatcaggctttgtcaacagcagctgagaaaagcagcctgtgcctctgctggccaggcctaggccctcgtcagagcgtgcctctccacaaggcacttgggcctgggtgattgttgcgcctctggctttggcgtttcctctttgcagcactttgcctacctcccccaagccctgagccactgcctgctggggctcctactgaggttctggaaacacctctgcacctgccgcccctgggaggaaagagggccacacaggaagtgtctgcagggagaggtggcactcggcagcctgagttcaggagaggtgcttggagcttcaggcagaggggccttcagaggagggaaacggagcaatgtgtcacaggcaggcaggggcaggactgccaccccaggccccgtgggaggcctgctgagggcacagagctgctcggtgcagccttcatgctttgatctggaaagagcagctgtccgcaggcctctgtctccaagaggcctgtcacacaggaggaccgctggaaacataccaacacgtgcagtctcccctccaagctattcatgctgtttgtggaatctctctcaaacataagtgtcaggtgtgtgtcgtcccaacgggtcctgtgctgtgaatagatccatgtgcagcacaaagggaatgtggcacgtggccccaggaagagttcacccggccagggggcagttgttcagttgcctggggctgacactgaccactggcctctggggtgtcctgcagcccaaatgcccaccttgccctcctcacatctcagtcaggggaggccatgcccaagccaatgtgctgtcacagcctgcagcgggggcagcacttcctcggagggcctgggaggtgctggggatgccccagcgcttctcttcctgcctcgccctggcatggcccagcgcctctaggatcaacttacgatccgtggagcagccccgggaaacccaaatctggctcaggacagcgtacgggcaggagggctgtaaatcatcccaggctaagcctccgtgggcactggctcctgccgcagcctggctatggactcagttagaaccaggtagaaagtcagcgacaccccacagaaggccactgcggctaggtaaacacctgagaaagaaactgctccagaagagatgacgtgggcttccaggagcatggaggaggtggcacttgaacttttaggaaactccttagatgagataaagtgggggttggaggtggcgaaaagagggtaaccctgggaaagtcagtcagaacccatggcagaagactgcaggagaggcaggggaggggcttcggggaccactgtggacagagctctgaaagcaccctggccaaagcccctcctgaggtgacagagcgtgggaggaggctgcactgggcctgcgtgccatcctcacccctgttccccgctggcgccaggccctgccttcttggtacctgtgccaacaggagagccctcaccagccgatcttgtcactctccgtggtgacagtgtcttggccagctgtggcccctagtttctagcagcgtttctcagtgtccttggcccttctgagaaggcaggcgggaggcacacggtgccctgttcttccccgtttgtccagttgcttgcaaagcagagaatgagtaggagtgaacccgagtgacttcacccgccctgtcccccacgtcaggacaggcttgaggcctctctgggcgtgagcgaggaaaccaggctgctctaacttctgaagagtgggctctggctcaagactccaatcggccagaagcccacagagatcaaagcactagcaagttcagctgtcctggccctcgggtagaacccacgggcgtgcctgggtgcggctccacccacatgccccactgtcagcccaggcaggagccttcctggccgggctcaggatctgcctgcagcccagccaggccatcacccagccccgatgcatcctggcactgcacgcttactcttcacaagcacttatacgcggatggcctccgagaccctgcctccctggtctgctgaggtcaggccaggtctcccacggagccgggcagctccacaccccaccacctggcaccgttaggtttcagatctcccgtgtggtgtttgatgtcggcttttgttcctaccttgggagtttggattgtttcctctggtgtctttgtttaccttcctcactgttctacctcctggccaggtctcagcttagcttccctggtgtggggtgtttttcaagccttccagccacagctgtctcccctcaggctggacggctccggggtgacagggcttcaccctctgcctgcagacccctggtgggcacatctcacaggcttccgtcttgctgagttgggtacggaggcagaagtggggtgtggaggaaagtcagagggaaatctgcttcagaaaggaagggtctttagacacaaagactggaggcccttccccgcccgcacgggagctgccatcgtgggtctcatgcacgtcaagaccttcccacatccaaactcagcttccagcagggattttgactttggatgacaaggctttatttgtaaatatgctcttaatatgcaactttgagaataaaatagaaacatcatgtattttaaaatataagatgaagtgtgacgcactgtatacaatttaatatatatttttagggttttgttatttaagaaaatggaatgtaatggtacttttacaaacgagaaaaaatgttatttttactttctggaaaaaataaatattctcattgttgtagaaaga

SEQ ID NO: 147009 - DNA, 1422 bp, Homo sapiens
  Payload ID: 9078
  Gene Symbol: KREMEN1
  Gene Name: kringle containing transmembrane protein 1
  Uniprot ID: Q96MU8
  ENST ID: ENST00000407188
  CDS Start-End: 1-1422
atggcgccgccagccgcccgcctcgccctgctctccgccgcggcgctcacgctggcggcccggcccgcgcctagccccggcctcggccccgagtgtttcacagccaatggtgcggattataggggaacacagaactggacagcactacaaggcgggaagccatgtctgttttggaacgagactttccagcatccatacaacactctgaaataccccaacggggaggggggcctgggtgagcacaactattgcagaaatccagatggagacgtgagcccctggtgctatgtggcagagcacgaggatggtgtctactggaagtactgtgagatacctgcttgccagatgcctggaaaccttggctgctacaaggatcatggaaacccacctcctctaactggcaccagtaaaacgtccaacaaactcaccatacaaacttgcatcagtttttgtcggagtcagaggttcaagtttgctgggatggagtcaggctatgcttgcttctgtggaaacaatcctgattactggaagtacggggaggcagccagtaccgaatgcaacagcgtctgcttcggggatcacacccaaccctgtggtggcgatggcaggatcatcctctttgatactctcgtgggcgcctgcggtgggaactactcagccatgtcttctgtggtctattcccctgacttccccgacacctatgccacggggagggtctgctactggaccatccgggttccgggggcctcccacatccacttcagcttccccctatttgacatcagggactcggcggacatggtggagcttctggatggctacacccaccgtgtcctagcccgcttccacgggaggagccgcccacctctgtccttcaacgtctctctggacttcgtcatcttgtatttcttctctgatcgcatcaatcaggcccagggatttgctgttttataccaagccgtcaaggaagaactgccacaggagaggcccgctgtcaaccagacggtggccgaggtgatcacggagcaggccaacctcagtgtcagcgctgcccggtcctccaaagtcctctatgtcatcaccaccagccccagccacccacctcagactgtcccaggtagcaattcctgggcgccacccatgggggctggaagccacagagttgaaggatggacagtctatggtctggcaactctcctcatcctcacagtcacagccattgtagcaaagatacttctgcacgtcacattcaaatcccatcgtgttcctgcttcaggggaccttagggattgtcatcaaccagggacttcgggggaaatctggagcattttttacaagccttccacttcaatttccatctttaagaagaaactcaagggtcagagtcaacaagatgaccgcaatccccttgtgagtgactaa

SEQ ID NO: 147010 - DNA, 516 bp, Homo sapiens
  Payload ID: 9078
  Gene Symbol: KREMEN1
  Gene Name: kringle containing transmembrane protein 1
  ENST ID: ENST00000453585
  CDS Start-End: 1-248
tacaaacttgcatcagtttttgtcggagtcagaggttcaagtttgctgggatggagtcaggctatgcttgcttctgtggaaacaatcctgattactggaagtacggggaggcagccagtaccgaatgcaacagcgtctgcttcggggatcacacccaaccctgtggtggcgatggcaggatcatcctctttgataggactcggcggacatggtggagcttctggatggctacacccaccgtgtcctagcccgcttccacgggaggagccgcccacctctgtccttcaacgtctctctggacttcgtcatcttgtatttcttctctgatcgcatcaatcaggcccagggatttgctgttttataccaagccgtcaaggaagaactgccacaggagaggcccgctgtcaaccagacggtggccgaggtgatcacggagcaggccaacctcagtgtcagcgctgcccggtcctccaaagtcctctatgtcatcaccaccagccccagccacccacctca

SEQ ID NO: 147011 - DNA, 2326 bp, Homo sapiens
  Payload ID: 9079
  Gene Symbol: KREMEN2
  Gene Name: kringle containing transmembrane protein 2
  Uniprot ID: Q8NCW0
  ENST ID: ENST00000303746
  CDS Start-End: 578-1966
ccctccacaccttcccacttgaaccggcaccgacctgagggagagggggccgggaagcgctggacgcccggggtcgggggaacgggcgtgggaggcgtctggacctgctgcctccgctccagtgctgggcggggcttcccggcctcccatggggggagggagagacccagggggagggacccacggagggatgcgaggcgggcaggagtcagcccgttggagacctgggcgagggagacgccgagagctaggctcagtgggagggggcgggcgtagaggctgaggcaccgcccagagctcgctgagacagagactgagaacgcccccggccagattccccccggagagacccgggtagggacagggacagagagacgcctctaggggcagaggccctgggaggcaaagacccccaggagagatttacccaccccagacggaaagcgcggctcagagtcggacgaggggagactgtcagaggacaacgccccctaggtctcctgggagaccccgaagcgaccccgggggcagcccgggccgtgtccgggcgagggtgacctatccttggttgagagcgatggggacacaagccctgcagggcttcctctttctcctcttcctcccgctgctgcagccgcgtggggcctcggctgggagcctgcacagtccaggcctgtccgaatgcttccaggtgaatggggctgactaccgcggccaccagaaccgcactggcccgcgcggggcgggccgcccgtgcctcttctgggaccagacgcagcaacacagctacagcagcgccagcgacccccacggccgctgggggctgggcgcgcacaacttctgccgtaacccagacggtgacgtgcagccgtggtgctacgtggctgagacagaggagggcatctactggcgctactgcgacatcccctcctgtcacatgccaggctacctgggatgctttgtggactcaggggcacccccagccctcagcggccccagcggcacctccacgaagctcacggtccaggtgtgcctacgcttctgccgcatgaaggggtaccagctggcgggcgtggaggccggttacgcctgcttctgtggctctgaaagcgacctggcccggggacgcctggcccccgccaccgactgtgaccagatctgtttcggccaccctggacagctgtgtggcggcgatgggcggctgggcgtctatgaagtgtcggtgggctcctgccaggggaactggacagcgcctcagggcgtcatctactccccggacttcccggacgagtacgggccggaccggaactgcagctgggccctgggcccgccaggcgccgcgctggagctcaccttccgcctcttcgagctggccgacccgcgcgaccggctggagctgcgcgacgcggcttcgggcagcctgctccgcgccttcgatggcgcccgcccaccgccgtccgggccgctgcgcctgggcactgccgcgctgctgctcaccttccgaagcgacgcgcgcggccacgcgcaaggcttcgcgctcacctaccgcgggctgcaggacgccgctgaggacccagaggcccccgagggctcggcccagacccccgcggcgcccctcgacggggccaacgtgagctgcagccccaggcctggggctccgccggccgcgattggggcccgggtcttctcgacggtgacggctgtctcggtgctgctgctgctgctcctggggctgctgcgtccgctgcgccgacggagctgtctgctggctccgggaaaagggcccccggcgctgggggcttccaggggccccaggagaagctgggctgtgtggtaccaacagccccgaggggtggccttgccctgctcccccggggacccccaggctgagggttctgccgcgggctaccggcctctgagtgcctccagccagagctccctgcgctcgctcatctccgctctctgactctgggccccgagggtccgctgggcccgccgccggcgagatggacacctgagatgctgtgctgcgccctgcctcggccttgcgcctgtgtaggggcagctcggcctctggtcgccttggggagaccaaaagtcggacaggaaacatctggtgctattatctgggacttggcctgaccgtgggggtccagatggtccaggccctctccatggacctgtatgtgggggtggtctctggtttcggaggtctttgaacccctctgggggtggtcctggactgccgtcctcagtgagaggtcacaggtcagcaaaaacagtcaaaaaacccccacagattttgaataaaggatctactttggta

SEQ ID NO: 147012 - DNA, 1882 bp, Homo sapiens
  Payload ID: 9079
  Gene Symbol: KREMEN2
  Gene Name: kringle containing transmembrane protein 2
  Uniprot ID: Q8NCW0
  ENST ID: ENST00000319500
  CDS Start-End: 210-1472
agagagacgcctctaggggcagaggccctgggaggcaaagacccccaggagagatttacccaccccagacggaaagcgcggctcagagtcggacgaggggagactgtcagaggacaacgccccctaggtctcctgggagaccccgaagcgaccccgggggcagcccgggccgtgtccgggcgagggtgacctatccttggttgagagcgatggggacacaagccctgcagggcttcctctttctcctcttcctcccgctgctgcagccgcgtggggcctcggctgggagcctgcacagtccaggcctgtccgaatgcttccaggtgaatggggctgactaccgcggccaccagaaccgcactggcccgcgcggggcgggccgcccgtgcctcttctgggaccagacgcagcaacacagctacagcagcgccagcgacccccacggccgctgggggctgggcgcgcacaacttctgccgtaacccagacggtgacgtgcagccgtggtgctacgtggctgagacagaggagggcatctactggcgctactgcgacatcccctcctgtcacatgccaggctacctgggatgctttgtggactcaggggcacccccagccctcagcggccccagcggcacctccacgaagctcacggtccaggtgtgcctacgcttctgccgcatgaaggggtaccagctggcgggcgtggaggccggttacgcctgcttctgtggctctgaaagcgacctggcccggggacgcctggcccccgccaccgactgtgaccagatctgtttcggccaccctggacagctgtgtggcggcgatgggcggctgggcgtctatgaagtgtcggtgggctcctgccaggggaactggacagcgcctcagggcgtcatctactccccggacttcccggacgagtacgggccggaccggaactgcagctgggccctgggcccgccaggcgccgcgctggagctcaccttccgcctcttcgagctggccgacccgcgcgaccggctggagctgcgcgacgcggcttcgggcagcctgctccgcgccttcgatggcgcccgcccaccgccgtccgggccgctgcgcctgggcactgccgcgctgctgctcaccttccgaagcgacgcgcgcggccacgcgcaaggcttcgcgctcacctaccgcgggctgcaggacgccgctgaggacccagaggcccccgagggctcggcccagacccccgcggcgcccctcgacggggccaacgtgagctgcagccccaggcctggggctccgccggccgcgattgggggagctgtctgctggctccgggaaaagggcccccggcgctgggggcttccaggggccccaggagaagctgggctgtgtggtaccaacagccccgaggggtggccttgccctgctcccccggggacccccaggctgagggttctgccgcgggctaccggcctctgagtgcctccagccagagctccctgcgctcgctcatctccgctctctgactctgggccccgagggtccgctgggcccgccgccggcgagatggacacctgagatgctgtgctgcgccctgcctcggccttgcgcctgtgtaggggcagctcggcctctggtcgccttggggagaccaaaagtcggacaggaaacatctggtgctattatctgggacttggcctgaccgtgggggtccagatggtccaggccctctccatggacctgtatgtgggggtggtctctggtttcggaggtctttgaacccctctgggggtggtcctggactgccgtcctcagtgagaggtcacaggtcagcaaaaacagtcaaaaaacccccacagattttgaataaaggatctactttggtacgg

SEQ ID NO: 147013 - DNA, 1798 bp, Homo sapiens
  Payload ID: 9079
  Gene Symbol: KREMEN2
  Gene Name: kringle containing transmembrane protein 2
  Uniprot ID: Q8NCW0
  ENST ID: ENST00000575885
  CDS Start-End: 247-1392
agattccccccggagagacccgggtagggacagggacagagagacgcctctaggggcagaggccctgggaggcaaagacccccaggagagatttacccaccccagacggaaagcgcggctcagagtcggacgaggggagactgtcagaggacaacgccccctaggtctcctgggagaccccgaagcgaccccgggggcagcccgggccgtgtccgggcgagggtgacctatccttggttgagagcgatggggacacaagccctgcagggcttcctctttctcctcttcctcccgctgctgcagccgcgtggggcctcggctgggagcctgcacagtccaggcctgtccgaatgcttccaggtgaatggggctgactaccgcggccaccagaaccgcactggcccgcgcggggcgggccgcccgtgcctcttctgggaccagacgcagcaacacagctacagcagcgccagcgacccccacggccgctgggggctgggcgcgcacaacttctgccgtaacccagacggtgacgtgcagccgtggtgctacgtggctgagacagaggagggcatctactggcgctactgcgacatcccctcctgtcacatgccaggctacctgggatgctttgtggactcaggggcacccccagccctcagcggccccagcggcacctccacgaagctcacggtccaggtgtgcctacgcttctgccgcatgaaggggtaccagctgtgtggcggcgatgggcggctgggcgtctatgaagtgtcggtgggctcctgccaggggaactggacagcgcctcagggcgtcatctactccccggacttcccggacgagtacgggccggaccggaactgcagctgggccctgggcccgccaggcgccgcgctggagctcaccttccgcctcttcgagctggccgacccgcgcgaccggctggagctgcgcgacgcggcttcgggcagcctgctccgcgccttcgatggcgcccgcccaccgccgtccgggccgctgcgcctgggcactgccgcgctgctgctcaccttccgaagcgacgcgcgcggccacgcgcaaggcttcgcgctcacctaccgcgggctgcaggacgccgctgaggacccagaggcccccgagggctcggcccagacccccgcggcgcccctcgacggggccaacgtgagctgcagccccaggcctggggctccgccggccgcgattgggggagctgtctgctggctccgggaaaagggcccccggcgctgggggcttccaggggccccaggagaagctgggctgtgtggtaccaacagccccgaggggtggccttgccctgctcccccggggacccccaggctgagggttctgccgcgggctaccggcctctgagtgcctccagccagagctccctgcgctcgctcatctccgctctctgactctgggccccgagggtccgctgggcccgccgccggcgagatggacacctgagatgctgtgctgcgccctgcctcggccttgcgcctgtgtaggggcagctcggcctctggtcgccttggggagaccaaaagtcggacaggaaacatctggtgctattatctgggacttggcctgaccgtgggggtccagatggtccaggccctctccatggacctgtatgtgggggtggtctctggtttcggaggtctttgaacccctctgggggtggtcctggactgccgtcctcagtgagaggtcacaggtcagcaaaaacagtcaaaaaacccccacagattttgaataaaggatctactttggt

SEQ ID NO: 147014 - DNA, 2339 bp, Homo sapiens
  Payload ID: 9079
  Gene Symbol: KREMEN2
  Gene Name: kringle containing transmembrane protein 2
  Uniprot ID: Q8NCW0
  ENST ID: ENST00000572045
  CDS Start-End: 306-1505
gtagaggctgaggcaccgcccagagctcgctgagacagagactgagaacgcccccggccagattccccccggagagacccgggtagggacagggacagagagacgcctctaggggcagaggccctgggaggcaaagacccccaggagagatttacccaccccagacggaaagcgcggctcagagtcggacgaggggagactgtcagaggacaacgccccctaggtctcctgggagaccccgaagcgaccccgggggcagcccgggccgtgtccgggcgagggtgacctatccttggttgagagcgatggggacacaagccctgcagggcttcctctttctcctcttcctcccgctgctgcagccgcgtggggcctcggctgggagcctgcacagtccaggcctgtccgaatgcttccaggtgaatggggctgactaccgcggccaccagaaccgcactggcccgcgcggggcgggccgcccgtgcctcttctgggaccagacgcagcaacacagctacagcagcgccagcgacccccacggccgctgggggctgggcgcgcacaacttctgccgtaacccagacggtgacgtgcagccgtggtgctacgtggctgagacagaggagggcatctactggcgctactgcgacatcccctcctgtcacatgccaggctacctgggatgctttgtggactcaggggcacccccagccctcagcggccccagcggcacctccacgaagctcacggtccaggtgtgcctacgcttctgccgcatgaaggggtaccagctggcgggcgtggaggccggttacgcctgcttctgtggctctgaaagcgacctggcccggggacgcctggcccccgccaccgactgtgaccagatctgtttcggccaccctggacagctgtgtggcggcgatgggcggctgggcgtctatgaagtgtcggtgggctcctgccaggggaactggacagcgcctcagggcgtcatctactccccggacttcccggacgagtacgggccggaccggaactgcagctgggccctgggcccgccaggcgccgcgctggagctcaccttccgcctcttcgagctggccgacccgcgcgaccggctggagctgcgcgacgcggcttcgggcagcctgctccgcgccttcgatggcgcccgcccaccgccgtccgggccgctgcgcctgggcactgccgcgctgctgctcaccttccgaagcgacgcgcgcggccacgcgcaaggcttcgcgctcacctaccgcgggctgcaggacgccgctgaggacccagaggcccccgagggctcggcccagacccccgcggcgcccctcgacggggccaacgtgagctgcagccccaggcctggggctccgccggccgcgattgggggtgaggcgggcgcgcgggacgggagtgagtcagggagccgccccctcgcgcccatcctcaccgcagccgtgtgcccgcagcccgggtcttctcgacggtgacggctgtctcggtgctgctgctgctgctcctggggctgctgcgtccgctgcgccgacggtgcggggcgctggggcagggcctgagggcggaccggtggtggggagctggagccccagaagggaacagagctaggaaggaactcctgggttcttaagggagcgaggctttgggtccacgcacaggatcgcgcgcgggatcgcaggtagagcaggacgctgcagcgggattggaccggctcggctgatgtctgctccctctctaggagctgtctgctggctccgggaaaagggcccccggcgctgggggcttccaggggccccaggagaagctgggctgtgtggtaccaacagccccgaggggtggccttgccctgctcccccggggacccccaggctgagggttctgccgcgggctaccggcctctgagtgcctccagccagagctccctgcgctcgctcatctccgctctctgactctgggccccgagggtccgctgggcccgccgccggcgagatggacacctgagatgctgtgctgcgccctgcctcggccttgcgcctgtgtaggggcagctcggcctctggtcgccttggggagaccaaaagtcggacaggaaacatctggtgctattatctgggacttggcctgaccgtgggggtccagatggtccaggccctctccatggacctgtatgtgggggtggtctctggtttcggaggtctttgaacccctctgggggtggtcctggactgccgtcctcagtgagaggtcacaggtcagcaaaaacagtcaaaaaacccccacagattttgaataaaggatctactttggta

SEQ ID NO: 147015 - DNA, 1922 bp, Homo sapiens
  Payload ID: 9079
  Gene Symbol: KREMEN2
  Gene Name: kringle containing transmembrane protein 2
  Uniprot ID: Q8NCW0
  ENST ID: ENST00000575769
  CDS Start-End: 1-1275
atggggacacaagccctgcagggcttcctctttctcctcttcctcccgctgctgcagccgcgtggggcctcggctgggagcctgcacagtccaggcctgtccgaatgcttccaggtgaatggggctgactaccgcggccaccagaaccgcactggcccgcgcggggcgggccgcccgtgcctcttctgggaccagacgcagcaacacagctacagcagcgccagcgacccccacggccgctgggggctgggcgcgcacaacttctgccgtaacccagacggtgacgtgcagccgtggtgctacgtggctgagacagaggagggcatctactggcgctactgcgacatcccctcctgtcacatgccaggctacctgggatgctttgtggactcaggggcacccccagccctcagcggccccagcggcacctccacgaagctcacggtccaggtgtgcctacgcttctgccgcatgaaggggtaccagctggcgggcgtggaggccggttacgcctgcttctgtggctctgaaagcgacctggcccggggacgcctggcccccgccaccgactgtgaccagatctgtttcggccaccctggacagctgtgtggcggcgatgggcggctgggcgtctatgaagtgtcggtgggctcctgccaggggaactggacagcgcctcagggcgtcatctactccccggacttcccggacgagtacgggccggaccggaactgcagctgggccctgggcccgccaggcgccgcgctggagctcaccttccgcctcttcgagctggccgacccgcgcgaccggctggagctgcgcgacgcggcttcgggcagcctgctccgcgccttcgatggcgcccgcccaccgccgtccgggccgctgcgcctgggcactgccgcgctgctgctcaccttccgaagcgacgcgcgcggccacgcgcaaggcttcgcgctcacctaccgcgggctgcaggacgccgctgaggacccagaggcccccgagggctcggcccagacccccgcggcgcccctcgacggggccaacgtgagctgcagccccaggcctggggctccgccggccgcgattggggcccgggtcttctcgacggtgacggctgtctcggtgctgctgctgctgctcctggggctgctgcgtccgctgcgccgacggtgcggggcgctggggcagggcctgagggcggaccggtggtggggagctggagccccagaagggaacagagctaggaaggaactcctgggttcttaagggagcgaggctttgggtccacgcacaggatcgcgcgcgggatcgcaggtagagcaggacgctgcagcgggattggaccggctcggctgatgtctgctccctctctaggagctgtctgctggctccgggaaaagggcccccggcgctgggggcttccaggggccccaggagaagctgggctgtgtggtaccaacagccccgaggggtggccttgccctgctcccccggggacccccaggctgagggttctgccgcgggctaccggcctctgagtgcctccagccagagctccctgcgctcgctcatctccgctctctgactctgggccccgagggtccgctgggcccgccgccggcgagatggacacctgagatgctgtgctgcgccctgcctcggccttgcgcctgtgtaggggcagctcggcctctggtcgccttggggagaccaaaagtcggacaggaaacatctggtgctattatctgggacttggcctgaccgtgggggtccagatggtccaggccctctccatggacctgtatgtgggggtggtctctggtttcggaggtctttgaacccctctgggggtggtcctggactgccgtcctcagtgagaggtcacaggtcagcaaaaacagtcaaaaaacccc

SEQ ID NO: 147016 - DNA, 1877 bp, Homo sapiens
  Payload ID: 9079
  Gene Symbol: KREMEN2
  Gene Name: kringle containing transmembrane protein 2
  Uniprot ID: Q8NCW0
  ENST ID: ENST00000571007
  CDS Start-End: 247-1518
agattccccccggagagacccgggtagggacagggacagagagacgcctctaggggcagaggccctgggaggcaaagacccccaggagagatttacccaccccagacggaaagcgcggctcagagtcggacgaggggagactgtcagaggacaacgccccctaggtctcctgggagaccccgaagcgaccccgggggcagcccgggccgtgtccgggcgagggtgacctatccttggttgagagcgatggggacacaagccctgcagggcttcctctttctcctcttcctcccgctgctgcagccgcgtggggcctcggctgggagcctgcacagtccaggcctgtccgaatgcttccaggtgaatggggctgactaccgcggccaccagaaccgcactggcccgcgcggggcgggccgcccgtgcctcttctgggaccagacgcagcaacacagctacagcagcgccagcgacccccacggccgctgggggctgggcgcgcacaacttctgccgtaacccagacggtgacgtgcagccgtggtgctacgtggctgagacagaggagggcatctactggcgctactgcgacatcccctcctgtcacatgccaggctacctgggatgctttgtggactcaggggcacccccagccctcagcggccccagcggcacctccacgaagctcacggtccaggtgtgcctacgcttctgccgcatgaaggggtaccagctgtgtggcggcgatgggcggctgggcgtctatgaagtgtcggtgggctcctgccaggggaactggacagcgcctcagggcgtcatctactccccggacttcccggacgagtacgggccggaccggaactgcagctgggccctgggcccgccaggcgccgcgctggagctcaccttccgcctcttcgagctggccgacccgcgcgaccggctggagctgcgcgacgcggcttcgggcagcctgctccgcgccttcgatggcgcccgcccaccgccgtccgggccgctgcgcctgggcactgccgcgctgctgctcaccttccgaagcgacgcgcgcggccacgcgcaaggcttcgcgctcacctaccgcgggctgcaggacgccgctgaggacccagaggcccccgagggctcggcccagacccccgcggcgcccctcgacggggccaacgtgagctgcagccccaggcctggggctccgccggccgcgattggggcccgggtcttctcgacggtgacggctgtctcggtgctgctgctgctgctcctggggctgctgcgtccgctgcgccgacggagctgtctgctggctccgggaaaagggcccccggcgctgggggcttccaggggccccaggagaagctgggctgtgtggtaccaacagccccgaggggtggccttgccctgctcccccggggacccccaggctgagggttctgccgcgggctaccggcctctgagtgcctccagccagagctccctgcgctcgctcatctccgctctctgactctgggccccgagggtccgctgggcccgccgccggcgagatggacacctgagatgctgtgctgcgccctgcctcggccttgcgcctgtgtaggggcagctcggcctctggtcgccttggggagaccaaaagtcggacaggaaacatctggtgctattatctgggacttggcctgaccgtgggggtccagatggtccaggccctctccatggacctgtatgtgggggtggtctctggtttcggaggtctttgaacccctctgggggtggtcctggactgccgtcctcagtgagaggtcacaggtcagcaaaaacagtcaaaaaacccccacagattttgaataaaggatctactttggt

SEQ ID NO: 147017 - DNA, 4553 bp, Homo sapiens
  Payload ID: 9080
  Gene Symbol: KRIT1
  Gene Name: KRIT1, ankyrin repeat containing
  Uniprot ID: O00522
  ENST ID: ENST00000340022
  CDS Start-End: 1020-3230
gctccggctcagccgctggcacccccaccgccaccaccctagtctcctagtcgcctgccaccagcccctgagagactgcaggtccagtgaaaaggagcaggaacggcagcagcccggccgccgacccggaagctctttcaccgccaaccgcgaggctgcaaagggtgtgaacccggaagcgatttcatagccacggtaacggcggggtggaaagctaaggcctttgaagacctgggaccccgtagtttcgggagagggtgaggggtgaatggtgctgaggtgcgaggagagggaaggacagtaaagagcaggtgggcaggagggtctccgactccagagacctgagcttttggggcgcgggtgggagcgcgggggaaccctcaagacggctttcttttggcgactgagggtttttctgccacaggaagctgggccgggctgctgtgcctgggaggagggaaggaggaatgagaaagcggtgacggtccctgccccccctcgccaggtgactgtcccacccatttagttgaatgtagcggccagagaggcactcgcggcagcccgtacgggtgggacctctcggtgtccttcgggaaacaggaggagcaagttcgactccagcgagggaaaacggagcctcaccagaagtctttcatctcggtggtccaactcaggatctcagcctcattattttcttacccttctggagtgcatatgtgcctttacagtttctgtttgcaaacgctgtctagcatactaagaggatgttagcaaacctgttccatggacactaaatggcagttgtacatctcccctcatcagtcatagtgacaaccagaaatgccctccatattttccagtgatcccagtcttcaatgcgtctgtctcataatttgtaaacgtttattatcttgaagtcattgttaatctgtggtgaaaagtaattgctaaatagaaattctgagaagaaaaaggcctcatccttttcacatgatgtaggaaggtctgttgcatgagcaatgggaaatccagaaaacatagaagatgcatatgttgctgttattcgtccaaagaatactgccagtctcaattctcgggaatacagagctaagtcatatgaaattttgttgcatgaagttcccattgaaggacagaaaaaaaagagaaagaaagttttattggaaacgaaacttcaaggcaacagtgaaataacacaaggcatattggattacgtagtagaaaccaccaaaccaatttctcctgcaaaccagggtatcagaggaaaacgagttgtactaatgaaaaaatttcctctggatggagagaagatgggcagagaagcatcattatttattgttccatcagttgtcaaagataatactaaatacacatataccccaggatgcccaattttttactgcttacaagatattatgcgagtctgtagtgaatccagtactcattttgctacacttacagcaaggatgttaatagccttggataagtggttagatgaacgtcatgcacaatctcactttattccagctttattccgaccttctcctcttgagcggataaaaactaatgtcataaatcctgcatatgctactgaatcaggtcagacagaaaactcactacatatgggctatagtgcactagaaataaagagtaaaatgttagccctagagaaagcagatacctgtatttacaaccctttgtttggatcagatcttcagtatacaaatcgggtagataaagtggtaataaatccatactttggtctaggagctccagactactcaaaaatccaaatacctaaacaggaaaaatggcagagaagcatgagcagtgtcacagaagacaaggaacgacagtgggtagatgattttcctctccaccgaagcgcctgtgaaggagattcagaattactaagccgtcttctcagtgaaagattttcagtcaaccagttagatagtgaccactgggcacccattcattatgcatgctggtatggaaaagttgaggccactcgcatattgttagagaaaggaaagtgcaatccaaaccttttaaatggacaacttagttctcctcttcattttgctgctggaggaggacatgctgaaatagtacagattctcctaaaccacccagaaacggatagacatataacagaccaacaaggaagatctccattaaatatttgtgaagaaaacaaacaaaacaactgggaagaagctgcaaaattgttgaaggaagcaattaacaaaccatatgaaaaagttcgaatatacagaatggatgggtcatatcgttctgttgaattgaagcatggaaataataccacagtgcagcagataatggaaggaatgcgtctctctcaagaaactcagcaatatttcactatatggatttgttcagaaaacctcagccttcaactcaaaccatatcataaacccttgcaacatgttcgtgactggccagaaatacttgctgaattgactaatctggatcctcaaagggaaacacctcagctttttctaagaagagatgtgagacttcccttggaagttgaaaaacagattgaagacccactagctattcttattctctttgatgaagccagatataatttattgaagggcttttatacagctcctgatgctaagctgataacattggcaagtctgcttttgcaaatagtctatggaaattatgagagtaaaaaacacaagcaaggtttcctaaatgaagaaaatctaaaatccatcgtacctgttaccaaactgaaaagtaaggcacctcactggacaaatcgcatacttcatgaatacaagaatctcagtacaagtgaaggtgtcagtaaagaaatgcatcaccttcagcgcatgttcttacagaattgctgggaaattcctacttatggagcagcatttttcacaggacagatatttacaaaggcaagccccagcaatcataaagtcatccctgtgtatgtaggagtgaatataaaaggacttcatctcctcaacatggaaactaaggctttactcatcagtcttaagtatggttgttttatgtggcaattgggagatactgatacttgttttcagatccatagcatggaaaataaaatgagctttatagtacatacaaaacaggctggtctcgtggtaaaactgttaatgaagctaaatggacagttaatgcccactgaaagaaattcatgaaagagaagtaactgttactcaagccaccacattttgtaatgcagagttttttttccgtgaaagatttcttaaaatattacttttggccgagcatggtggctcacccctgtaattccagcactttgggaggctggggcaggcggatcacctgaagtcagagttcaagaccagcctggccaacatggtgaaaccctgtctctacaaaaatacaaaaattagctgggtgtggtggcgggcgcctataatcctagctactagggaggccaaggtgggagatcgcttaaacccaggaggtggaggttgtagtgagccaagattgcaccacggcacgctagcctgggtgacacagcaagactccatctcaaaaaaaaaaaaaaattactttcaacaaggcatatagtctcttgtaatatatatgtatactattacattgtacagaatctgtacttatgtttggtgtgtaatataccaattagttttatataatatcctcataagctattctaatttttgagagaaacacaaaaagttatagattgatagtctgtataatattagacaaaatagtaagctttataaaaagttatttttggtaaatggtaaggaatttggggtggaatgtgatgagattaaaatgtagctttggtataacttcatgtgtatttcaaaatatactgaacgtcaacatgatttgaataaagaaaatgtattttctacttgaaccacataacactgttatttaaaacagttttctgcagtctataaacatttctcaacatttttttaaaagtcttagttaaaatgtaaatctgatatacagtagtgtttctcaaagtatagttcatgaactccttgcatcataattacctagatgcctcttaaaaatgaagatttcagagacccattctaaacaagggcattcactctctggaagtagcatggccttgtgaacttaaatttggttttgttttttcttttttgctgttagaataatttcagacccaataaggaatttcgattattaaagttgagaaatttcacaaaactgcctggcacacaagcacacacatacatagacacattttaagtgataatctcttgatattagaagttgcatttgttaaatacatgctgtattttttatgagttgacttaatagtttatgtatattgactttgctttgtaggaagtaaatcaccagatatcttattgtttcatttaggaaagtagtgatatagatgaagagccaacttgatgaatgtgctattcataagctagaaactacagtttttccaaactaataaactgatgaattctaaataa

SEQ ID NO: 147018 - DNA, 2827 bp, Homo sapiens
  Payload ID: 9080
  Gene Symbol: KRIT1
  Gene Name: KRIT1, ankyrin repeat containing
  Uniprot ID: O00522
  ENST ID: ENST00000394503
  CDS Start-End: 398-2464
atagccacggtaacggcggggtggaaagctaaggcctttgaagacctgggaccccgtagtttcgggagagggtgaggggtgaatggtgctgaggtgcgaggagagggaaggacagtaaagagcaggtttttggctttcatcgctttttctacatgtttttagcctcaccagaagtctttcatctcggtggtccaactcaggatctcagcctcattattttcttacccttctggagtgcatatgtgcctttacagtttctgtttgcaaacgctgtctagcatactaagaggatgttagcaaacctgttccatggacactaaatggcagttgtacatctcccctcatcagtcatagtgacaaccagaaatgccctccatattttccagtgatcccagcaatgggaaatccagaaaacatagaagatgcatatgttgctgttattcgtccaaagaatactgccagtctcaattctcgggaatacagagctaagtcatatgaaattttgttgcatgaagttcccattgaaggacagaaaaaaaagagaaagaaagttttattggaaacgaaacttcaaggcaacagtgaaataacacaaggcatattggattacgtagtagaaaccaccaaaccaatttctcctgcaaaccagggtatcagaggaaaacgagttgtactaatgaaaaaatttcctctggatggagagaagatgggcagagaagcatcattatttattgttccatcagttgtcaaagataatactaaatacacatataccccaggatgcccaattttttactgcttacaagatattatgcgagtctgtagtgaatccagtactcattttgctacacttacagcaaggatgttaatagccttggataagtggttagatgaacgtcatgcacaatctcactttattccagctttattccgaccttctcctcttgagcggataaaaactaatgtcataaatcctgcatatgctactgaatcaggtcagacagaaaactcactacatatgggctatagtgcactagaaataaagagtaaaatgttagccctagagaaagcagatacctgtatttacaaccctttgtttggatcagatcttcagtatacaaatcgggtagataaagtggtaataaatccatactttggtctaggagctccagactactcaaaaatccaaatacctaaacaggaaaaatggcagagaagcatgagcagtgtcacagaagacaagtatggaaaagttgaggccactcgcatattgttagagaaaggaaagtgcaatccaaaccttttaaatggacaacttagttctcctcttcattttgctgctggaggaggacatgctgaaatagtacagattctcctaaaccacccagaaacggatagacatataacagaccaacaaggaagatctccattaaatatttgtgaagaaaacaaacaaaacaactgggaagaagctgcaaaattgttgaaggaagcaattaacaaaccatatgaaaaagttcgaatatacagaatggatgggtcatatcgttctgttgaattgaagcatggaaataataccacagtgcagcagataatggaaggaatgcgtctctctcaagaaactcagcaatatttcactatatggatttgttcagaaaacctcagccttcaactcaaaccatatcataaacccttgcaacatgttcgtgactggccagaaatacttgctgaattgactaatctggatcctcaaagggaaacacctcagctttttctaagaagagatgtgagacttcccttggaagttgaaaaacagattgaagacccactagctattcttattctctttgatgaagccagatataatttattgaagggcttttatacagctcctgatgctaagctgataacattggcaagtctgcttttgcaaatagtctatggaaattatgagagtaaaaaacacaagcaaggtttcctaaatgaagaaaatctaaaatccatcgtacctgttaccaaactgaaaagtaaggcacctcactggacaaatcgcatacttcatgaatacaagaatctcagtacaagtgaaggtgtcagtaaagaaatgcatcaccttcagcgcatgttcttacagaattgctgggaaattcctacttatggagcagcatttttcacaggacagatatttacaaaggcaagccccagcaatcataaagtcatccctgtgtatgtaggagtgaatataaaaggacttcatctcctcaacatggaaactaaggctttactcatcagtcttaagtatggttgttttatgtggcaattgggagatactgatacttgttttcagatccatagcatggaaaataaaatgagctttatagtacatacaaaacaggctggtctcgtggtaaaactgttaatgaagctaaatggacagttaatgcccactgaaagaaattcatgaaagagaagtaactgttactcaagccaccacattttgtaatgcagagttttttttccgtgaaagatttcttaaaatattacttttggccgagcatggtggctcacccctgtaattccagcactttgggaggctggggcaggcggatcacctgaagtcagagttcaagaccagcctggccaacatggtgaaaccctgtctctacaaaaatacaaaaattagctgggtgtggtggcgggcgcctataatcctagctactagggaggccaaggtgggagatcgcttaaacccaggaggtggaggttgtagtgagccaagattgcaccacggcacgctagcctgggtgacacagcaagactccatctc

SEQ ID NO: 147019 - DNA, 3143 bp, Homo sapiens
  Payload ID: 9080
  Gene Symbol: KRIT1
  Gene Name: KRIT1, ankyrin repeat containing
  Uniprot ID: O00522
  ENST ID: ENST00000394505
  CDS Start-End: 555-2765
agcgatttcatagccacggtaacggcggggtggaaagctaaggcctttgaagacctgggaccccgtagtttcgggagagggtgaggggtgaatggtgctgaggtgcgaggagagggaaggacagtaaagagcaggtttttggctttcatcgctttttctacatgtttttagcctcaccagaagtctttcatctcggtggtccaactcaggatctcagcctcattattttcttacccttctggagtgcatatgtgcctttacagtttctgtttgcaaacgctgtctagcatactaagaggatgttagcaaacctgttccatggacactaaatggcagttgtacatctcccctcatcagtcatagtgacaaccagaaatgccctccatattttccagtgatcccagtcttcaatgcgtctgtctcataatttgtaaacgtttattatcttgaagtcattgttaatctgtggtgaaaagtaattgctaaatagaaattctgagaagaaaaaggcctcatccttttcacatgatgtaggaaggtctgttgcatgagcaatgggaaatccagaaaacatagaagatgcatatgttgctgttattcgtccaaagaatactgccagtctcaattctcgggaatacagagctaagtcatatgaaattttgttgcatgaagttcccattgaaggacagaaaaaaaagagaaagaaagttttattggaaacgaaacttcaaggcaacagtgaaataacacaaggcatattggattacgtagtagaaaccaccaaaccaatttctcctgcaaaccagggtatcagaggaaaacgagttgtactaatgaaaaaatttcctctggatggagagaagatgggcagagaagcatcattatttattgttccatcagttgtcaaagataatactaaatacacatataccccaggatgcccaattttttactgcttacaagatattatgcgagtctgtagtgaatccagtactcattttgctacacttacagcaaggatgttaatagccttggataagtggttagatgaacgtcatgcacaatctcactttattccagctttattccgaccttctcctcttgagcggataaaaactaatgtcataaatcctgcatatgctactgaatcaggtcagacagaaaactcactacatatgggctatagtgcactagaaataaagagtaaaatgttagccctagagaaagcagatacctgtatttacaaccctttgtttggatcagatcttcagtatacaaatcgggtagataaagtggtaataaatccatactttggtctaggagctccagactactcaaaaatccaaatacctaaacaggaaaaatggcagagaagcatgagcagtgtcacagaagacaaggaacgacagtgggtagatgattttcctctccaccgaagcgcctgtgaaggagattcagaattactaagccgtcttctcagtgaaagattttcagtcaaccagttagatagtgaccactgggcacccattcattatgcatgctggtatggaaaagttgaggccactcgcatattgttagagaaaggaaagtgcaatccaaaccttttaaatggacaacttagttctcctcttcattttgctgctggaggaggacatgctgaaatagtacagattctcctaaaccacccagaaacggatagacatataacagaccaacaaggaagatctccattaaatatttgtgaagaaaacaaacaaaacaactgggaagaagctgcaaaattgttgaaggaagcaattaacaaaccatatgaaaaagttcgaatatacagaatggatgggtcatatcgttctgttgaattgaagcatggaaataataccacagtgcagcagataatggaaggaatgcgtctctctcaagaaactcagcaatatttcactatatggatttgttcagaaaacctcagccttcaactcaaaccatatcataaacccttgcaacatgttcgtgactggccagaaatacttgctgaattgactaatctggatcctcaaagggaaacacctcagctttttctaagaagagatgtgagacttcccttggaagttgaaaaacagattgaagacccactagctattcttattctctttgatgaagccagatataatttattgaagggcttttatacagctcctgatgctaagctgataacattggcaagtctgcttttgcaaatagtctatggaaattatgagagtaaaaaacacaagcaaggtttcctaaatgaagaaaatctaaaatccatcgtacctgttaccaaactgaaaagtaaggcacctcactggacaaatcgcatacttcatgaatacaagaatctcagtacaagtgaaggtgtcagtaaagaaatgcatcaccttcagcgcatgttcttacagaattgctgggaaattcctacttatggagcagcatttttcacaggacagatatttacaaaggcaagccccagcaatcataaagtcatccctgtgtatgtaggagtgaatataaaaggacttcatctcctcaacatggaaactaaggctttactcatcagtcttaagtatggttgttttatgtggcaattgggagatactgatacttgttttcagatccatagcatggaaaataaaatgagctttatagtacatacaaaacaggctggtctcgtggtaaaactgttaatgaagctaaatggacagttaatgcccactgaaagaaattcatgaaagagaagtaactgttactcaagccaccacattttgtaatgcagagttttttttccgtgaaagatttcttaaaatattacttttggccgagcatggtggctcacccctgtaattccagcactttgggaggctggggcaggcggatcacctgaagtcagagttcaagaccagcctggccaacatggtgaaaccctgtctctacaaaaatacaaaaattagctgggtgtggtggcgggcgcctataatcctagctactagggaggccaaggtgggagatcgcttaaacccaggaggtggaggttgtagtgagccaagattgcaccacggcacgctagcctgggtgacacagcaagactccatctcaaaaaaaaaaaaaaa

SEQ ID NO: 147020 - DNA, 4762 bp, Homo sapiens
  Payload ID: 9080
  Gene Symbol: KRIT1
  Gene Name: KRIT1, ankyrin repeat containing
  Uniprot ID: O00522
  ENST ID: ENST00000394507
  CDS Start-End: 785-2995
gctccggctcagccgctggcacccccaccgccaccaccctagtctcctagtcgcctgccaccagcccctgagagactgcaggtccagtgaaaaggagcaggaacggcagcagcccggccgccgacccggaagctctttcaccgccaaccgcgaggctgcaaagggtgtgaacccggaagcgatttcatagccacggtgactgtcccacccatttagttgaatgtagcggccagagaggcactcgcggcagcccgtacgggtgggacctctcggtgtccttcgggaaacaggaggagcaagttcgactccagcgagggaaaacggaggtgggagactgaaccatctccacatctagttgccccaggtttttggctttcatcgctttttctacatgtttttagcctcaccagaagtctttcatctcggtggtccaactcaggatctcagcctcattattttcttacccttctggagtgcatatgtgcctttacagtttctgtttgcaaacgctgtctagcatactaagaggatgttagcaaacctgttccatggacactaaatggcagttgtacatctcccctcatcagtcatagtgacaaccagaaatgccctccatattttccagtgatcccagtcttcaatgcgtctgtctcataatttgtaaacgtttattatcttgaagtcattgttaatctgtggtgaaaagtaattgctaaatagaaattctgagaagaaaaaggcctcatccttttcacatgatgtaggaaggtctgttgcatgagcaatgggaaatccagaaaacatagaagatgcatatgttgctgttattcgtccaaagaatactgccagtctcaattctcgggaatacagagctaagtcatatgaaattttgttgcatgaagttcccattgaaggacagaaaaaaaagagaaagaaagttttattggaaacgaaacttcaaggcaacagtgaaataacacaaggcatattggattacgtagtagaaaccaccaaaccaatttctcctgcaaaccagggtatcagaggaaaacgagttgtactaatgaaaaaatttcctctggatggagagaagatgggcagagaagcatcattatttattgttccatcagttgtcaaagataatactaaatacacatataccccaggatgcccaattttttactgcttacaagatattatgcgagtctgtagtgaatccagtactcattttgctacacttacagcaaggatgttaatagccttggataagtggttagatgaacgtcatgcacaatctcactttattccagctttattccgaccttctcctcttgagcggataaaaactaatgtcataaatcctgcatatgctactgaatcaggtcagacagaaaactcactacatatgggctatagtgcactagaaataaagagtaaaatgttagccctagagaaagcagatacctgtatttacaaccctttgtttggatcagatcttcagtatacaaatcgggtagataaagtggtaataaatccatactttggtctaggagctccagactactcaaaaatccaaatacctaaacaggaaaaatggcagagaagcatgagcagtgtcacagaagacaaggaacgacagtgggtagatgattttcctctccaccgaagcgcctgtgaaggagattcagaattactaagccgtcttctcagtgaaagattttcagtcaaccagttagatagtgaccactgggcacccattcattatgcatgctggtatggaaaagttgaggccactcgcatattgttagagaaaggaaagtgcaatccaaaccttttaaatggacaacttagttctcctcttcattttgctgctggaggaggacatgctgaaatagtacagattctcctaaaccacccagaaacggatagacatataacagaccaacaaggaagatctccattaaatatttgtgaagaaaacaaacaaaacaactgggaagaagctgcaaaattgttgaaggaagcaattaacaaaccatatgaaaaagttcgaatatacagaatggatgggtcatatcgttctgttgaattgaagcatggaaataataccacagtgcagcagataatggaaggaatgcgtctctctcaagaaactcagcaatatttcactatatggatttgttcagaaaacctcagccttcaactcaaaccatatcataaacccttgcaacatgttcgtgactggccagaaatacttgctgaattgactaatctggatcctcaaagggaaacacctcagctttttctaagaagagatgtgagacttcccttggaagttgaaaaacagattgaagacccactagctattcttattctctttgatgaagccagatataatttattgaagggcttttatacagctcctgatgctaagctgataacattggcaagtctgcttttgcaaatagtctatggaaattatgagagtaaaaaacacaagcaaggtttcctaaatgaagaaaatctaaaatccatcgtacctgttaccaaactgaaaagtaaggcacctcactggacaaatcgcatacttcatgaatacaagaatctcagtacaagtgaaggtgtcagtaaagaaatgcatcaccttcagcgcatgttcttacagaattgctgggaaattcctacttatggagcagcatttttcacaggacagatatttacaaaggcaagccccagcaatcataaagtcatccctgtgtatgtaggagtgaatataaaaggacttcatctcctcaacatggaaactaaggctttactcatcagtcttaagtatggttgttttatgtggcaattgggagatactgatacttgttttcagatccatagcatggaaaataaaatgagctttatagtacatacaaaacaggctggtctcgtggtaaaactgttaatgaagctaaatggacagttaatgcccactgaaagaaattcatgaaagagaagtaactgttactcaagccaccacattttgtaatgcagagttttttttccgtgaaagatttcttaaaatattacttttggccgagcatggtggctcacccctgtaattccagcactttgggaggctggggcaggcggatcacctgaagtcagagttcaagaccagcctggccaacatggtgaaaccctgtctctacaaaaatacaaaaattagctgggtgtggtggcgggcgcctataatcctagctactagggaggccaaggtgggagatcgcttaaacccaggaggtggaggttgtagtgagccaagattgcaccacggcacgctagcctgggtgacacagcaagactccatctcaaaaaaaaaaaaaaattactttcaacaaggcatatagtctcttgtaatatatatgtatactattacattgtacagaatctgtacttatgtttggtgtgtaatataccaattagttttatataatatcctcataagctattctaatttttgagagaaacacaaaaagttatagattgatagtctgtataatattagacaaaatagtaagctttataaaaagttatttttggtaaatggtaaggaatttggggtggaatgtgatgagattaaaatgtagctttggtataacttcatgtgtatttcaaaatatactgaacgtcaacatgatttgaataaagaaaatgtattttctacttgaaccacataacactgttatttaaaacagttttctgcagtctataaacatttctcaacatttttttaaaagtcttagttaaaatgtaaatctgatatacagtagtgtttctcaaagtatagttcatgaactccttgcatcataattacctagatgcctcttaaaaatgaagatttcagagacccattctaaacaagggcattcactctctggaagtagcatggccttgtgaacttaaatttggttttgttttttcttttttgctgttagaataatttcagacccaataaggaatttcgattattaaagttgagaaatttcacaaaactgcctggcacacaagcacacacatacatagacacattttaagtgataatctcttgatattagaagttgcatttgttaaatacatgctgtattttttatgagttgacttaatagtttatgtatattgactttgctttgtaggaagtaaatcaccagatatcttattgtttcatttaggaaagtagtgatatagatgaagagccaacttgatgaatgtgctattcataagctagaaactacagtttttccaaactaataaactgatgaattctaaataagttcagagatatagtcatatttaaagttgtcctacagtttgcagataatttttatattactattcttcacattaacttctgcttatttttaatggtactatatgtaggccttattaaaattaagattgtatggttaagtaaagttaacaagaaagcctgatttatctttaattctgtgctaggtacttttgattctacatgaacaatacccttttcagttcccttcattctaatgtcctcaactgttaccaaataccctgttgactcccaaacctaagattttagcctcaacttcttttctgaacttcaaatcttaatttccaagttatacttgttctaggtccatctaaatggtctacagagaacttcagttgaatcatagctggaaacagaatttatttcctctatttgcttcattctgtccttccactatattccctattt

SEQ ID NO: 147021 - DNA, 783 bp, Homo sapiens
  Payload ID: 9080
  Gene Symbol: KRIT1
  Gene Name: KRIT1, ankyrin repeat containing
  ENST ID: ENST00000444960
  CDS Start-End: 682-783
tcatgttccagccttgcgcgctcgcagccccggccgccctcttcccctcccccgcctccggctccggctccggctcagccgctggcacccccaccgccaccaccctagtctcctagtcgcctgccaccagcccctgagagactgcaggtccagtgaaaaggagcaggaacggcagcagcccggccgccgacccggaagctctttcaccgccaaccgcgaggctgcaaagggtgtgaacccggaagcgatttcatagccacggtttttggctttcatcgctttttctacatgtttttagcctcaccagaagtctttcatctcggtggtccaactcaggatctcagcctcattattttcttacccttctggagtgcatatgtgcctttacagtttctgtttgcaaacgctgtctagcatactaagaggatgttagcaaacctgttccatggacactaaatggcagttgtacatctcccctcatcagtcatagtgacaaccagaaatgccctccatattttccagtgatcccagtcttcaatgcgtctgtctcataatttgtaaacgtttattatcttgaagtcattgttaatctgtggtgaaaagtaattgctaaatagaaattctgagaagaaaaaggcctcatccttttcacatgatgtaggaaggtctgttgcatgagcaatgggaaatccagaaaacatagaagatgcatatgttgctgttattcgtccaaagaatactgccagtctcaattctcgggaatacagagctaagtcatatgaa

SEQ ID NO: 147022 - DNA, 702 bp, Homo sapiens
  Payload ID: 9080
  Gene Symbol: KRIT1
  Gene Name: KRIT1, ankyrin repeat containing
  ENST ID: ENST00000430102
  CDS Start-End: 410-702
acctgggaccccgtagtttcgggagagggtgaggggtgaatggtgctgaggtgcgaggagagggaaggacagtaaagagcaggtgggcaggagggtctccgactccagagacctgagcttttggggcgcgggtgggagcgcgggggaaccctcaagacggctttcttttggcgactgagggtttttctgccacaggaagctgggccgggctgctgtgcctgggaggagggaaggaggaatgagaaagcggtgacggtccctgccccccctcgccaggtgactgtcccacccatttagttgaatgtagcggccagagaggcactcgcggcagcccgtacgggtgggacctctcggtgtccttcgggaaacaggaggagcaagttcgactccagcgagggaaaacggagcaatgggaaatccagaaaacatagaagatgcatatgttgctgttattcgtccaaagaatactgccagtctcaattctcgggaatacagagctaagtcatatgaaattttgttgcatgaagttcccattgaaggacagaaaaaaaagagaaagaaagttttattggaaacgaaacttcaaggcaacagtgaaataacacaaggcatattggattacgtagtagaaaccaccaaaccaatttctcctgcaaaccagggtatcagaggaaaacgagttgtactaatgaaaaaatttcc

SEQ ID NO: 147023 - DNA, 1472 bp, Homo sapiens
  Payload ID: 9080
  Gene Symbol: KRIT1
  Gene Name: KRIT1, ankyrin repeat containing
  ENST ID: ENST00000458177
  CDS Start-End: 744-1472
gtctcctagtcgcctgccaccagcccctgagagactgcaggtccagtgaaaaggagcaggaacggcagcagcccggccgccgacccggaagctctttcaccgccaaccgcgaggctgcaaagggtgtgaacccggaagcgatttcatagccacggtgactgtcccacccatttagttgaatgtagcggccagagaggcactcgcggcagcccgtacgggtgggacctctcggtgtccttcgggaaacaggaggagcaagttcgactccagcgagggaaaacggaggtgggagactgaaccatctccacatctagttgccccaggtttttggctttcatcgctttttctacatgtttttagcctcaccagaagtctttcatctcggtggtccaactcaggatctcagcctcattattttcttacccttctggagtgcatatgtgcctttacagtttctgtttgcaaacgctgtctagcatactaagaggatgttagcaaacctgttccatggacactaaatggcagttgtacatctcccctcatcagtcatagtgacaaccagaaatgccctccatattttccagtgatcccagtcttcaatgcgtctgtctcataatttgtaaacgtttattatcttgaagtcattgttaatctgtggtgaaaagtaattgctaaatagaaattctgagaagaaaaaggcctcatccttttcacatgatgtaggaaggtctgttgcatgagcaatgggaaatccagaaaacatagaagatgcatatgttgctgttattcgtccaaagaatactgccagtctcaattctcgggaatacagagctaagtcatatgaaattttgttgcatgaagttcccattgaaggacagaaaaaaaagagaaagaaagttttattggaaacgaaacttcaaggcaacagtgaaataacacaaggcatattggattacgtagtagaaaccaccaaaccaatttctcctgcaaaccagggtatcagaggaaaacgagttgtactaatgaaaaaatttcctctggatggagagaagatgggcagagaagcatcattatttattgttccatcagttgtcaaagataatactaaatacacatataccccaggatgcccaattttttactgcttacaagatattatgcgagtctgtagtgaatccagtactcattttgctacacttacagcaaggatgttaatagccttggataagtggttagatgaacgtcatgcacaatctcactttattccagctttattccgaccttctcctcttgagcggataaaaactaatgtcataaatcctgcatatgctactgaatcaggtcagacagaaaactcactacatatgggctatagtgcactagaaataaagagtaaaatgttagccctagagaaagcagatacctgtatttacaaccctttgtttggatcagatcttcagtatacaaatcgg

SEQ ID NO: 147024 - DNA, 665 bp, Homo sapiens
  Payload ID: 9080
  Gene Symbol: KRIT1
  Gene Name: KRIT1, ankyrin repeat containing
  ENST ID: ENST00000452773
  CDS Start-End: 492-665
catagccacggtaacggcggggtggaaagctaaggcctttgaagacctgggaccccgtagtttcgggagagggtgaggggtgaatggtgctgaggtgcgaggagagggaaggacagtaaagagcaggtgggcaggagggtctccgactccagagacctgagcttttggggcgcgggtgggagcgcgggggaaccctcaagacggctttcttttggcgactgagggtttttctgccacaggaagctgggccgggctgctgtgcctgggaggagggaaggaggaatgagaaagcggtgacggtccctgccccccctcgccaggtgactgtcccacccatttagttgaatgtagcggccagagaggcactcgcggcagcccgtacgggtgggacctctcggtgtccttcgggaaacaggaggagcaagttcgactccagcgagggaaaacggaggtgggagactgaaccatctccacatctagttgccccagcaatgggaaatccagaaaacatagaagatgcatatgttgctgttattcgtccaaagaatactgccagtctcaattctcgggaatacagagctaagtcatatgaaattttgttgcatgaagttcccattgaaggacagaaaaaaaagagaaagaaagttttattggaaacgaaactt

SEQ ID NO: 147025 - DNA, 483 bp, Homo sapiens
  Payload ID: 9080
  Gene Symbol: KRIT1
  Gene Name: KRIT1, ankyrin repeat containing
  ENST ID: ENST00000422347
  CDS Start-End: 409-483
acccggaagcgatttcatagccacgcctcaccagaagtctttcatctcggtggtccaactcaggatctcagcctcattattttcttacccttctggagtgcatatgtgcctttacagtttctgtttgcaaacgctgtctagcatactaagaggatgttagcaaacctgttccatggacactaaatggcagttgtacatctcccctcatcagtcatagtgacaaccagaaatgccctccatattttccagtgatcccagtcttcaatgcgtctgtctcataatttgtaaacgtttattatcttgaagtcattgttaatctgtggtgaaaagtaattgctaaatagaaattctgagaagaaaaaggcctcatccttttcacatgatgtaggaaggtctgttgcatgagcaatgggaaatccagaaaacatagaagatgcatatgttgctgttattcgtccaaagaatactgccagtctcaattct

SEQ ID NO: 147026 - DNA, 557 bp, Homo sapiens
  Payload ID: 9080
  Gene Symbol: KRIT1
  Gene Name: KRIT1, ankyrin repeat containing
  ENST ID: ENST00000440209
  CDS Start-End: 222-557
atagccacggtaacggcggggtggaaagctaaggcctttgaagacctgggaccccgtagtttcgggagaggttgaatgtagcggccagagaggcactcgcggcagcccgtacgggtgggacctctcggtgtccttcgggaaacaggaggagcaagttcgactccagcgagggaaaacggaggtgggagactgaaccatctccacatctagttgccccagcaatgggaaatccagaaaacatagaagatgcatatgttgctgttattcgtccaaagaatactgccagtctcaattctcgggaatacagagctaagtcatatgaaattttgttgcatgaagttcccattgaaggacagaaaaaaaagagaaagaaagttttattggaaacgaaacttcaaggcaacagtgaaataacacaaggcatattggattacgtagtagaaaccaccaaaccaatttctcctgcaaaccagggtatcagaggaaaacgagttgtactaatgaaaaaatttcctctggatggagagaagatgggcagagaagcatcattatttatt

SEQ ID NO: 147027 - DNA, 507 bp, Homo sapiens
  Payload ID: 9080
  Gene Symbol: KRIT1
  Gene Name: KRIT1, ankyrin repeat containing
  ENST ID: ENST00000458493
  CDS Start-End: 311-507
gcaaagggtgtgaacccggaagcgatttcatagccacggtttttggctttcatcgctttttctacatgtttttagcctcaccagaagtctttcatctcggtggtccaactcaggatctcagcctcattattttcttacccttctggagtgcatatgtgcctttacagtttctgtttgcaaacgctgtctagcatactaagaggatgttagcaaacctgttccatggacactaaatggcagttgtacatctcccctcatcagtcatagtgacaaccagaaatgccctccatattttccagtgatcccagcaatgggaaatccagaaaacatagaagatgcatatgttgctgttattcgtccaaagaatactgccagtctcaattctcgggaatacagagctaagtcatatgaaattttgttgcatgaagttcccattgaaggacagaaaaaaaagagaaagaaagttttattggaaacgaaacttcaaggcaacagtgaaataacaca

SEQ ID NO: 147028 - DNA, 561 bp, Homo sapiens
  Payload ID: 9080
  Gene Symbol: KRIT1
  Gene Name: KRIT1, ankyrin repeat containing
  ENST ID: ENST00000445516
  CDS Start-End: 68-561
tttattccagctttattccgaccttctcctcttgagcggataaaaactaatgtcataaatcctgcatatgctactgaatcaggtagataaagtggtaataaatccatactttggtctaggagctccagactactcaaaaatccaaatacctaaacaggaaaaatggcagagaagcatgagcagtgtcacagaagacaaggaacgacagtgggtagatgattttcctctccaccgaagcgcctgtgaaggagattcagaattactaagccgtcttctcagtgaaagattttcagtcaaccagttagatagtgaccactgggcacccattcattatgcatgctggtatggaaaagttgaggccactcgcatattgttagagaaaggaaagtgcaatccaaaccttttaaatggacaacttagttctcctcttcattttgctgctggaggaggacatgctgaaatagtacagattctcctaaaccacccagaaacggatagacatataacagaccaacaaggaagatctccattaaatatttgtgaagaaaacaaacaaaacaa

SEQ ID NO: 147029 - DNA, 546 bp, Homo sapiens
  Payload ID: 9080
  Gene Symbol: KRIT1
  Gene Name: KRIT1, ankyrin repeat containing
  ENST ID: ENST00000425073
  CDS Start-End: 512-546
agccacggtaacggcggggtggaaagctaaggcctttgaagacctgggaccccgtagtttcgggagagggtgaggggtgaatggtgctgaggtttttggctttcatcgctttttctacatgtttttagcctcaccagaagtctttcatctcggtggtccaactcaggatctcagcctcattattttcttacccttctggagtgcatatgtgcctttacagtttctgtttgcaaacgctgtctagcatactaagaggatgttagcaaacctgttccatggacactaaatggcagttgtacatctcccctcatcagtcatagtgacaaccagaaatgccctccatattttccagtgatcccagtcttcaatgcgtctgtctcataatttgtaaacgtttattatcttgaagtcattgttaatctgtggtgaaaagtaattgctaaatagaaattctgagaagaaaaaggcctcatccttttcacatgatgtaggaaggtctgttgcatgagcaatgggaaatccagaaaacatagaagatgcatatgt

SEQ ID NO: 147030 - DNA, 978 bp, Homo sapiens
  Payload ID: 9080
  Gene Symbol: KRIT1
  Gene Name: KRIT1, ankyrin repeat containing
  ENST ID: ENST00000454017
  CDS Start-End: 492-978
atagccacggtaacggcggggtggaaagctaaggcctttgaagacctgggaccccgtagtttcgggagagggtttttggctttcatcgctttttctacatgtttttagcctcaccagaagtctttcatctcggtggtccaactcaggatctcagcctcattattttcttacccttctggagtgcatatgtgcctttacagtttctgtttgcaaacgctgtctagcatactaagaggatgttagcaaacctgttccatggacactaaatggcagttgtacatctcccctcatcagtcatagtgacaaccagaaatgccctccatattttccagtgatcccagtcttcaatgcgtctgtctcataatttgtaaacgtttattatcttgaagtcattgttaatctgtggtgaaaagtaattgctaaatagaaattctgagaagaaaaaggcctcatccttttcacatgatgtaggaaggtctgttgcatgagcaatgggaaatccagaaaacatagaagatgcatatgttgctgttattcgtccaaagaatactgccagtctcaattctcgggaatacagagctaagtcatatgaaattttgttgcatgaagttcccattgaaggacagaaaaaaaagagaaagaaagttttattggaaacgaaacttcaaggcaacagtgaaataacacaaggcatattggattacgtagtagaaaccaccaaaccaatttctcctgcaaaccagggtatcagaggaaaacgagttgtactaatgaaaaaatttcctctggatggagagaagatgggcagagaagcatcattatttattgttccatcagttgtcaaagataatactaaatacacatataccccaggatgcccaattttttactgcttacaagatattatgcgagtctgtagtgaatccagtactcattttgctacacttacagcaaggatgttaatagccttggataagt

SEQ ID NO: 147031 - DNA, 855 bp, Homo sapiens
  Payload ID: 9080
  Gene Symbol: KRIT1
  Gene Name: KRIT1, ankyrin repeat containing
  ENST ID: ENST00000433016
  CDS Start-End: 303-855
gatttcatagccacggtaacggcggggtggaaagctaaggcctttgaagacctgggaccccgtagtttcgggagagggtgaggggtgaatggtgctgaggtgcgaggagagggaaggacagtaaagagcaggtgactgtcccacccatttagttgaatgtagcggccagagaggcactcgcggcagcccgtacgggtgggacctctcggtgtccttcgggaaacaggaggagcaagttcgactccagcgagggaaaacggaggtgggagactgaaccatctccacatctagttgccccagcaatgggaaatccagaaaacatagaagatgcatatgttgctgttattcgtccaaagaatactgccagtctcaattctcgggaatacagagctaagtcatatgaaattttgttgcatgaagttcccattgaaggacagaaaaaaaagagaaagaaagttttattggaaacgaaacttcaaggcaacagtgaaataacacaaggcatattggattacgtagtagaaaccaccaaaccaatttctcctgcaaaccagggtatcagaggaaaacgagttgtactaatgaaaaaatttcctctggatggagagaagatgggcagagaagcatcattatttattgttccatcagttgtcaaagataatactaaatacacatataccccaggatgcccaattttttactgcttacaagatattatgcgagtctgtagtgaatccagtactcattttgctacacttacagcaaggatgttaatagccttggataagtggttagatgaacgtcatgcacaatctcactttattccagctttattccgaccttctcctcttgagc

SEQ ID NO: 147032 - DNA, 551 bp, Homo sapiens
  Payload ID: 9080
  Gene Symbol: KRIT1
  Gene Name: KRIT1, ankyrin repeat containing
  ENST ID: ENST00000413688
  CDS Start-End: 344-551
atagccacggtaacggcggggtggaaagctaaggcctttgaagacctgggaccccgtagtttcgggagagggtttttggctttcatcgctttttctacatgtttttagcctcaccagaagtctttcatctcggtggtccaactcaggatctcagcctcattattttcttacccttctggagtgcatatgtgcctttacagtttctgtttgcaaacgctgtctagcatactaagaggatgttagcaaacctgttccatggacactaaatggcagttgtacatctcccctcatcagtcatagtgacaaccagaaatgccctccatattttccagtgatcccagcaatgggaaatccagaaaacatagaagatgcatatgttgctgttattcgtccaaagaatactgccagtctcaattctcgggaatacagagctaagtcatatgaaattttgttgcatgaagttcccattgaaggacagaaaaaaaagagaaagaaagttttattggaaacgaaacttcaaggcaacagtgaaataacacaaggcatattgg

SEQ ID NO: 147033 - DNA, 3378 bp, Homo sapiens
  Payload ID: 9080
  Gene Symbol: KRIT1
  Gene Name: KRIT1, ankyrin repeat containing
  Uniprot ID: O00522
  ENST ID: ENST00000412043
  CDS Start-End: 790-3000
gagcaggtgggcaggagggtctccgactccagagacctgagcttttggggcgcgggtgggagcgcgggggaaccctcaagacggctttcttttggcgactgagggtttttctgccacaggaagctgggccgggctgctgtgcctgggaggagggaaggaggaatgagaaagcggtgacggtccctgccccccctcgccaggtgactgtcccacccatttagttgaatgtagcggccagagaggcactcgcggcagcccgtacgggtgggacctctcggtgtccttcgggaaacaggaggagcaagttcgactccagcgagggaaaacggaggtgggagactgaaccatctccacatctagttgccccaggtttttggctttcatcgctttttctacatgtttttagcctcaccagaagtctttcatctcggtggtccaactcaggatctcagcctcattattttcttacccttctggagtgcatatgtgcctttacagtttctgtttgcaaacgctgtctagcatactaagaggatgttagcaaacctgttccatggacactaaatggcagttgtacatctcccctcatcagtcatagtgacaaccagaaatgccctccatattttccagtgatcccagtcttcaatgcgtctgtctcataatttgtaaacgtttattatcttgaagtcattgttaatctgtggtgaaaagtaattgctaaatagaaattctgagaagaaaaaggcctcatccttttcacatgatgtaggaaggtctgttgcatgagcaatgggaaatccagaaaacatagaagatgcatatgttgctgttattcgtccaaagaatactgccagtctcaattctcgggaatacagagctaagtcatatgaaattttgttgcatgaagttcccattgaaggacagaaaaaaaagagaaagaaagttttattggaaacgaaacttcaaggcaacagtgaaataacacaaggcatattggattacgtagtagaaaccaccaaaccaatttctcctgcaaaccagggtatcagaggaaaacgagttgtactaatgaaaaaatttcctctggatggagagaagatgggcagagaagcatcattatttattgttccatcagttgtcaaagataatactaaatacacatataccccaggatgcccaattttttactgcttacaagatattatgcgagtctgtagtgaatccagtactcattttgctacacttacagcaaggatgttaatagccttggataagtggttagatgaacgtcatgcacaatctcactttattccagctttattccgaccttctcctcttgagcggataaaaactaatgtcataaatcctgcatatgctactgaatcaggtcagacagaaaactcactacatatgggctatagtgcactagaaataaagagtaaaatgttagccctagagaaagcagatacctgtatttacaaccctttgtttggatcagatcttcagtatacaaatcgggtagataaagtggtaataaatccatactttggtctaggagctccagactactcaaaaatccaaatacctaaacaggaaaaatggcagagaagcatgagcagtgtcacagaagacaaggaacgacagtgggtagatgattttcctctccaccgaagcgcctgtgaaggagattcagaattactaagccgtcttctcagtgaaagattttcagtcaaccagttagatagtgaccactgggcacccattcattatgcatgctggtatggaaaagttgaggccactcgcatattgttagagaaaggaaagtgcaatccaaaccttttaaatggacaacttagttctcctcttcattttgctgctggaggaggacatgctgaaatagtacagattctcctaaaccacccagaaacggatagacatataacagaccaacaaggaagatctccattaaatatttgtgaagaaaacaaacaaaacaactgggaagaagctgcaaaattgttgaaggaagcaattaacaaaccatatgaaaaagttcgaatatacagaatggatgggtcatatcgttctgttgaattgaagcatggaaataataccacagtgcagcagataatggaaggaatgcgtctctctcaagaaactcagcaatatttcactatatggatttgttcagaaaacctcagccttcaactcaaaccatatcataaacccttgcaacatgttcgtgactggccagaaatacttgctgaattgactaatctggatcctcaaagggaaacacctcagctttttctaagaagagatgtgagacttcccttggaagttgaaaaacagattgaagacccactagctattcttattctctttgatgaagccagatataatttattgaagggcttttatacagctcctgatgctaagctgataacattggcaagtctgcttttgcaaatagtctatggaaattatgagagtaaaaaacacaagcaaggtttcctaaatgaagaaaatctaaaatccatcgtacctgttaccaaactgaaaagtaaggcacctcactggacaaatcgcatacttcatgaatacaagaatctcagtacaagtgaaggtgtcagtaaagaaatgcatcaccttcagcgcatgttcttacagaattgctgggaaattcctacttatggagcagcatttttcacaggacagatatttacaaaggcaagccccagcaatcataaagtcatccctgtgtatgtaggagtgaatataaaaggacttcatctcctcaacatggaaactaaggctttactcatcagtcttaagtatggttgttttatgtggcaattgggagatactgatacttgttttcagatccatagcatggaaaataaaatgagctttatagtacatacaaaacaggctggtctcgtggtaaaactgttaatgaagctaaatggacagttaatgcccactgaaagaaattcatgaaagagaagtaactgttactcaagccaccacattttgtaatgcagagttttttttccgtgaaagatttcttaaaatattacttttggccgagcatggtggctcacccctgtaattccagcactttgggaggctggggcaggcggatcacctgaagtcagagttcaagaccagcctggccaacatggtgaaaccctgtctctacaaaaatacaaaaattagctgggtgtggtggcgggcgcctataatcctagctactagggaggccaaggtgggagatcgcttaaacccaggaggtggaggttgtagtgagccaagattgcaccacggcacgctagcctgggtgacacagcaagactccatctcaaaaaaaaaaaaaaa

SEQ ID NO: 147034 - DNA, 572 bp, Homo sapiens
  Payload ID: 9080
  Gene Symbol: KRIT1
  Gene Name: KRIT1, ankyrin repeat containing
  ENST ID: ENST00000425919
  CDS Start-End: 459-572
gcaaagggtgtgaacccggaagcgatttcatagccacggtttttggctttcatcgctttttctacatgtttttagcctcaccagaagtctttcatctcggtggtccaactcaggatctcagcctcattattttcttacccttctggagtgcatatgtgcctttacagtttctgtttgcaaacgctgtctagcatactaagaggatgttagcaaacctgttccatggacactaaatggcagttgtacatctcccctcatcagtcatagtgacaaccagaaatgccctccatattttccagtgatcccagtcttcaatgcgtctgtctcataatttgtaaacgtttattatcttgaagtcattgttaatctgtggtgaaaagtaattgctaaatagaaattctgagaagaaaaaggcctcatccttttcacatgatgtaggaaggtctgttgcatgagcaatgggaaatccagaaaacatagaagatgcatatgttgctgttattcgtccaaagaatactgccagtctcaattctcgggaatacagagctaagtcatatgaaattttgttgcat

SEQ ID NO: 147035 - DNA, 3056 bp, Homo sapiens
  Payload ID: 9080
  Gene Symbol: KRIT1
  Gene Name: KRIT1, ankyrin repeat containing
  ENST ID: ENST00000611677
  CDS Start-End: 485-2182
tcgggagagggtgaggggtgaatggtgctgaggtgcgaggagagggaaggacagtaaagagcaggtttttggctttcatcgctttttctacatgtttttagcctcaccagaagtctttcatctcggtggtccaactcaggatctcagcctcattattttcttacccttctggagtgcatatgtgcctttacagtttctgtttgcaaacgctgtctagcatactaagaggatgttagcaaacctgttccatggacactaaatggcagttgtacatctcccctcatcagtcatagtgacaaccagaaatgccctccatattttccagtgatcccagtcttcaatgcgtctgtctcataatttgtaaacgtttattatcttgaagtcattgttaatctgtggtgaaaagtaattgctaaatagaaattctgagaagaaaaaggcctcatccttttcacatgatgtaggaaggtctgttgcatgagcaatgggaaatccagaaaacatagaagatgcatatgttgctgttattcgtccaaagaatactgccagtctcaattctcgggaatacagagctaagtcatatgaaattttgttgcatgaagttcccattgaaggacagaaaaaaaagagaaagaaagttttattggaaacgaaacttcaaggcaacagtgaaataacacaaggcatattggattacgtagtagaaaccaccaaaccaatttctcctgcaaaccagggtatcagaggaaaacgagttgtactaatgaaaaaatttcctctggatggagagaagatgggcagagaagcatcattatttattgttccatcagttgtcaaagataatactaaatacacatataccccaggatgcccaattttttactgcttacaagatattatgcgagtctgtagtgaatccagtactcattttgctacacttacagcaaggatgttaatagccttggataagtggttagatgaacgtcatgcacaatctcactttattccagctttattccgaccttctcctcttgagcggataaaaactaatgtcataaatcctgcatatgctactgaatcaggtcagacagaaaactcactacatatgggctatagtgcactagaaataaagagtaaaatgttagccctagagaaagcagatacctgtatttacaaccctttgtttggatcagatcttcagtatacaaatcgggtagataaagtggtaataaatccatactttggtctaggagctccagactactcaaaaatccaaatacctaaacaggaaaaatggcagagaagcatgagcagtgtcacagaagacaaggaacgacagtgggtagatgattttcctctccaccgaagcgcctgtgaaggagattcagaattactaagccgtcttctcagtgaaagattttcagtcaaccagttagatagtgaccactgggcacccattcattatgcatgctggtatggaaaagttgaggccactcgcatattgttagagaaaggaaagtgcaatccaaaccttttaaatggacaacttagttctcctcttcattttgctgctggaggaggacatgctgaaatagtacagattctcctaaaccacccagaaacggatagacatataacagaccaacaaggaagatctccattaaatatttgtgaagaaaacaaacaaaacaactgggaagaagctgcaaaattgttgaaggaagcaattaacaaaccatatgaaaaagttcgaatatacagaatggatgggtcatatcgttctgttgaattgaagcatggaaataataccacagtgcagcagataatggaaggaatgcgtctctctcaagaaactcagcaatatttcactatatggatttgttcagaaaacctcagccttcaactcaaaccatatcataaacccttgcaacatgttcgtgactggccagaaatacttgctgaattgactaatctggatcctcaaagggaaacacctcagctttttctaagaagagatgtgagacttcccttggaagttgaaaaacagattgaagacccactagctattcttattctctttgatgaagccagatataatttattgaagggcttttatacagctcctgatgctaagctgataacattggcaagtctgcttttgcaaagtctatggaaattatgagagtaaaaaacacaagcaaggtttcctaaatgaagaaaatctaaaatccatcgtacctgttaccaaactgaaaagtaaggcacctcactggacaaatcgcatacttcatgaatacaagaatctcagtacaagtgaaggtgtcagtaaagaaatgcatcaccttcagcgcatgttcttacagaattgctgggaaattcctacttatggagcagcatttttcacaggacagatatttacaaaggcaagccccagcaatcataaagtcatccctgtgtatgtaggagtgaatataaaaggacttcatctcctcaacatggaaactaaggctttactcatcagtcttaagtatggttgttttatgtggcaattgggagatactgatacttgttttcagatccatagcatggaaaataaaatgagctttatagtacatacaaaacaggctggtctcgtggtaaaactgttaatgaagctaaatggacagttaatgcccactgaaagaaattcatgaaagagaagtaactgttactcaagccaccacattttgtaatgcagagttttttttccgtgaaagatttcttaaaatattacttttggccgagcatggtggctcacccctgtaattccagcactttgggaggctggggcaggcggatcacctgaagtcagagttcaagaccagcctggccaacatggtgaaaccctgtctctacaaaaatacaaaaattagctgggtgtggtggcgggcgcctataatcctagctactagggaggccaaggtgggagatcgcttaaacccaggaggtggaggttgtagtgagccaagattgcaccacggcacgctagcctgggtgacacagcaagactccatctc

SEQ ID NO: 147036 - DNA, 10118 bp, Homo sapiens
  Payload ID: 9081
  Gene Symbol: KRR1
  Gene Name: KRR1, small subunit (SSU) processome component, homolog (yeast)
  Uniprot ID: Q13601
  ENST ID: ENST00000229214
  CDS Start-End: 25-1170
ggagccaccggaagcagcttgcaaatggcgtctccctcgctggagcggccagaaaaaggcgctggaaaaagtgaatttcgtaaccagaagccgaagccggagaaccaagatgaatcagaactccttacggttcctgatggttggaaggaaccagctttttccaaagaggacaatcccagaggacttttggaggagagcagtttcgcaactttgttcccaaaatacagggaagcttacttgaaagagtgttggccattggtgcagaaagccttaaatgaacatcatgttaatgcaaccctggacctgatcgaaggcagcatgactgtttgtactacaaagaagacttttgatccatatatcatcattagggccagagatctgataaaactgttagcaaggagtgtttcatttgaacaggcagtacgaattcttcaggatgatgttgcatgtgacatcattaaaataggttctttagtaaggaataaagagagatttgtaaaacgaagacaacggcttattggtcccaaaggatctacattgaaggcattggaactcttaactaattgttacattatggttcagggaaacacagtttcagccattggaccttttagtggcttaaaagaggttagaaaagtagtccttgatactatgaagaatattcatccaatttataacattaaaagcttaatgattaagagagagttggcaaaagattctgaattacgatcacaaagttgggagagatttttgccacagttcaaacacaaaaatgtgaataaacgcaaggaaccaaagaaaaaaactgttaagaaagaatatacgccattcccaccaccacaaccagaaagtcagatcgataaagaattggctagtggtgaatactttttgaaggcaaatcagaagaagcggcagaaaatggaagcaataaaggctaaacaagcagaagccatcagtaagagacaagaggaaagaaacaaagcatttattccacctaaggaaaaaccaattgtgaaacctaaggaagcttctactgaaactaaaattgatgtggccagcatcaaggaaaaggttaagaaagcaaagaataagaaactgggagctcttacagctgaagaaattgcacttaagatggaggcagatgaaaagaaaaagaagaaaaaaaagtaacatacccaaaactccttgactagaactatctccttttgtaaaggattttgagatatcaggcattagttgccttatttgtgagaaattttctgagggctttttttttttttggtggtggtggttgttcatagaagagtgttctttataaattatattattattgtattttttgaaaaatttatacgagaaagtggtatataagtctttgtatacattacgaccattgtgattatccattaaatccagtgtctgatgctattggttagtaatgatgtcccagcatttgatgttccctctctaatgataacaagtaaatatttaggtttatcccttttgaaagtttggttttacttttaacagtccatgaacagaaaattaaggcctctaaaatcagatcccctagttactcctctgttctgaatctggggaagtagtaaaccaaaaagacagggaaaaccagatatttagagtcgaagcagcatgcaaaaaataataatgtttttaactaatgaaggctactggagttactaagaatcacctaaaaatgtgctactgtaccttgctcattttgcagatttagaagctgaaacatgggttaggttacttactaaaagtccacctgtggcaacctgcaaataatgcttatttatactaaagatgagtttatctgatagagttaggaaatttcttcttttgagtaagagtattgctataacatatatttttttctgaaatgttttaaaatagaagtacacctaattgttattggttaaaaaaaaagccatatgtgaatgaggttggtttttgggttttttctttcctgaattgtattagtccaaaagaactaaattagggtacttgtgctgtaccaaaatggtaattataacagacagtattagaattactgaattaacaatgagaaagagagaagtgtatctgttacgtggatatatgggccagcctggatatacaacagagtagtaacctgtgaaacaaacatagaatatcctcttagacattgttcctcataatgcactgacagaattcacatagctcttaatgaaacaatttaagattgatgtacgtacgtttgacttggtctcgctgtcggttaactgtaaagttagggggaagaaagaaaaaaaattaaaagggtagacacagttgagagttttattttaaaaagctaagtcttataattatgaccattaacttgctttggctttattgcagtgactttccaagtttaattattcaaaactttttgaactgactgaattaacttggtatttttaagttgactttttacataaactttataaaccttttataaaaaggaaactataccattactataaatggaaaatcattttacacatcatacctagcaggtaataaaatttaaaaaataaaaattaaatattagaatgtgagaaatttattaaaatatagttctaaaaataagtttcttcctgagaagaatgatactgtttatgatgaatccatagtgaaaagacagtgacctctctttcatccagtctagtatatcactaaatcatcattacgatgtttggctatcaagtcattaattactgtcctcctttcactgagctttattcaaattttgacaatcagagcactgggaagaaataaattccacaactgcctttagccttctggatactttcttttataaaatagaaaccttttccacaccagttctgcagcagtcgctattagatgctcgtggtagaacccatcaatcatctggtcctctgggtactggtgagcatccctggtcttcatacctgtgagtgggctttgtggtgaattactgtaaatatgctaccctcacttttcttggcagttatgtcgatgaaatcaagagtgtgatgttctagttatttttttttatatatatttttaaatgttcaatattcaactattgaaacaaatgtacatctgtgaactagctaaaatcatcttatgtaccactaatatgcccagcacattttgtaaaacagtcctgatttggcctccaagggtatttattgaactaccagcagtatctaggagaccacgaaggaataccacgaaggaatttatgctccagtgcttgccataatttgtctgagaaggaatctgttaaataaaagcttttatcctctaacctttaccttcatcagaccttataaaaggtcaaatggtgattcttaagttttttagtcacaaatcttacttattcagtattagtgcgaagagtagaatactttcaagtaagcctaaacttacatgaaaacaaattacataaatctagctctgagaataggaaattagtgacaagatcaatctgtaagatgttgagcacttatctgaagtaaatgggtaatgagtttcacatcttataaatacaagttagcatgtgttttctcaagagtccaagggttttcattattggactacagctttaatcttctaaatgttattccccaagattaaagagcatctcaagttagatcaccaaagatcaaaagctaaaaccagaagtatttttgtcattgtggtggtggtagtgttactaattgcctagatttttaaagggaaacatttttttcactgggttgtttcgttgaaaaaaatagaagcagaaacttgcccaaagtcacagtggtcaaactggaaattgcaccaaaacttggcatactggttctgaaatccatagttttagcccttatgtatactggttaatttggaaggaagaaatatatacgttctgaagtgaagagtgagtgaaaggaagaattcagtgaatacattgataccttgatattatctgcattgtggctacatgttacttttcttcacaagagtgatataagtgaaataaagaatgattggactgggagaaaaatggctcagaaaactttgcaaaagtacgactgtatgtaaagataagtattcaacattaaatgggaaggaggagagcaagcagtttaatatatagaattttataattttaggcctgcaagggaccttataaaacatgagcaatggaacacttttttccaaactaaatttcgtgcagtggaacttggccgactctgtccttcctctattctaagcaccctactctagcccggctgctctgagttcagtttgttacaaatatggacacgaaagtaccacaggctttgcacagcttaattgaagtttccccttcacaccatggtaaaaaaacatactgggatggaagggtttgtgtctagaacaagaacaagaaataaactcttggtcacttactaatatttcaaaatcacaaagcagaattttgcttggatgtttagtaaaacatccttggaaatttaactgcttgcagcttctacacttcttcattaaatgctgtctggctaataaaaagtgccatgttgcagctttattttattttcattttttggagatagaccctcactgtgtcacccaggctggagtgcagtggtacaatctctgctcactgcaacctccacctcctgggctcaagtgattgtcctgcctcagcctcctgagtagctggggttacgggcgtccaccaccacacccagctagtttttgtatttttagtagagggggtttttgccatgttggccaggctgggcatggtggcatggtaatctcagctacttgggaggctgaggcaggaggatcgcctgaacccgtgagatggaggttgcagtgagctgagatcacaccactgcactctagcatgggtgacagagcaagactctgtctcaaaaaaaaaaaacaaaaaaaaaaacgaaaacagaattctgtttgtttggatgacctgttatacttatttttgatcttgctgaaataagcaaatcttaggaatcttagtctacagtttctgacagttttttttgttgttgttgtttgaccaattagaactaaataaaaagaacgtgattttcacatttaaatttctcttaaatgtattcctagaacagtaagccattggtttaattgctacttgatgccagtttccttgaagatagccgttaagataaaacatggtttcattgttaattctgtagaaagttacatgttactattatgttattctattggtgtattgttccttttactcaccacagagattgtccaaacacttgtcattattggggcaggcactgcaggtggctcctctcttatatggccaagttgggtaattccctctgtaaagcagaagaaggatgtccattagaagtttttcggttttttaaaattgcaatttactatgaatccttaactaaatccagaagaatagtggagtgaagtacaaaggtccagagagttggtaatagaagtgaagacaggaaggcagaaatggaaggctgctaatatttgcatagttcattctatgtacctgtgtctatgcacctgttttaatctgcatcccatttaattgtgacagctctgagaggaagttattcttgttttacagatgagacaaaagatgtaagagatacctttaatcacaatttatacacttcagagtcagaggaaacctggatttaactccagggctgtgctccctctctttacctaccctctggcctatatgattactgccatttaaaaaactgtccatcttagaaaagctatggtgacccacattcaatattctcagttggtcagccctccataattttcactggataggagccatttggctggtgccttccaaaaaaataataaataatggtatgggggaatttctaaagtacaaattgttttcacatacaagatgtgatatgaataatagctgctaattagtgagcactaccatgtgcttgtctttgttctaaacaaccttgaatgaaataatcttcacaaaaaccctatgaggaagttactgttgtctatttatacccattatatagctagaggctgagtcacagagtataagtaattgaccaaggtcacagactagaaagtgaaataatatccaagcattttatatccccataaatatcctcatagtagtaatggggagagggggcacatttatctcaatgaacctgccattgcactaattttttttggaactctgcttttggaaaaagttctaaacttttttgtgtaatcgtaccctttggcagtctggtgaggcctatgggctctttctcaacatagtttgttgttaaatgcataaaatacataggattataaaggaaaccaattaaattgaaatagttatcaaaatgtttaaaacaagatttgtgataaagtaatatgtgcttctctattaagatctaccgggggctattagtttcaatgcagtgatgaacacaaactatattttgagttctctgcagcaagtggaatgtggtatgaaaatatctgatatttacaaagatgatactgctaagtcagagtcacgtttattgctaatatgatggtggagtgttgtcttcattcataatgaaaggaaatgttatttttaatagaggttagtgaaaataaaaataaaactattttctaatcaaagtttatggtcctcctctccccagcactctacaattacctccaaagttgagaactctcaccttagacacacaactttataacgataccttatttccaaccccaaatctatgttcttatctcattttgctccaaattttaagttgcttcagaaatttaattagccctctgcttactctacaccatggaaaaaaggtaatatagtagaaattctgatagcaatttcaaaagatgtccaaaatagacattaatcattggaatgtctttcattgttaataagcacagtattaagtggtttaagttctagaatgattttaataaagtcatttatgatacttagttgtgcattccaaactgtaaaggaaaaggtaaaaaatgctacttaaaaataagctaaaaaccaagacagtcggtgaggtctgtggaaatggtagtattcatcttgggagaaacatgctactggaaaggcctggatttgtctagatgggagtcattaagactgtgggacctaaagtattcagcacaataaagcaacaggacatttcaatgttttccctggtagcctgagagagaagagggttggggttatgggacccaggggaagaccgaagacaaatctttaaagaaaaagataaatatgggtaagggtccctaaggcagtgacggcctaagcacactggtactatcttgactatcttgtggtcaaagttatttcctcttctgtgctataatcctctcctccactaatccactctgagtaaagatctgttacacaccatacccttgttcatggtgcccaggggaaatgaagaggagagtattacaggcaactggaagattaagcatcccagaccccattctgaggtatcagaaatattgaggaggatactggacttcctaagattatgtggaatgggggcctacaactttttgtgtataggaaaataatacctcagagggcagagggcaaagggaaatgaggacattcctaactggtctctctgttttaccttttatgctcctctaatccattttccatccagactgatgtccaaatttaaaggtctcatcgctcccctgcttaatatacttgaatgacttcttatgtaaactttgtcatgatctaaaagttcccgctagatctgcaactgccttcctccccccgtttcatctgtttagcagaccgagggcaccagtctctgtggtttaaacttgccaaacttttcttcacggaagttttgctgttcttttctccactagacagctgttccagaagttcttatgtctgattccttctcattcttcatgcctaagcttaaatataacacaagaagcccttccctgattattctaaacaggggccttgcctattgatagtttctattacagtattatttatagttccttaattgccccataatgatgcagttattttacttgtatttttattatctgtttgccccataaatattactctcataaagacagagactgccctgttctcctttggagctcagtaaaacaaatatttgttgaataaatgaatatttgaagttagtctttatggaagcattataactttggttgtaagttttataatttaatattgtttataactctgaagataagtgagtctaaaccaggaaaatttacatttatactttaatgaataaaaatcatgaatacttacaaaacattcactattgccaagcattatatatacctagtattttacaaagccttctcttgtcactttcatagctactctaagtgatgggtcctgtaaccctgatctattggaggttaaactgagattcagagttaacttgtccagggtcacacagtaaattaattgtatcttaaccattaaaaatgtcatatgaggccgggtgtagtggctcatgcctataatcccagcactctgggaggctgaggcaggtggatcactttagcccaggagttggagatgagcctgggcaatatggcaaaactctgtctctacaaaaaaattaactgggcatggtggcatgtgcctgtagtctcaggtactaggaaggctgagttgggaggattgcttgagcctgggaggttaagcctgcagtgaaccgtaagcgagccactgtactccagcctgggtgacagagtgagagaccctgtctcaaaaaaaaaaaaaaaagtcatgaaaagttaccactaactgaattatggctttgtctagttttttctgggttttctttattttccaactcttaagatattaagtcaaagctgtcatcttcagaatgacgctttgtctcctccttcacacctacagcactcagtcagagtatcgagcatgtcttctgcacattacaccagggaaatggctttctttcagccaatctccaggaatccaaaaattcaaaggcaacaaattaaagatcattatatatattgcaaatggttaaaaacctttaaaatataaaaacttttataaataagaaaatctagtagaaaaatggtcagcccacatgattcacagaaaaaggaatataaatagacaattatgtgaagaaatttataattactagtaatcacagagatgcaaaagaaagcaaatgaaatgccatttccatcaaattagaaaatactaagaaattataatacctagtactgatggtgaaatacaaattgatataatggtggaatgtaatttggcaatatgtacttaaaacaaaaatggtcacagtctttacgtgctagtatctcaaggaattatagggaaatagaagtgactgaagatacatatatgaggttgttcatcatatattaaatgaaaatatagtgaacaatctaaattcttcaacaggatggtggtaccatcaagagcatggactctggagctagacagccagatcaaagtccatcagtgatagtcactaactgtagaactttgggcaggttgctgacccgtgtgtgccttgctgttctcatttgccaaacaggggtagtaataggagccatctcataaacttctggtgaagattaagttaatatatgtgaagcactttaacagtgctgagagcattgtaagcattatataaacaatctatcatttttatgattaaaatcacttaaaattttgaaaaggaaaatttttcacagcataattttaagtgaaaaatagaaaatgtatattttcagtatgatcagatttctaaatatgtgtatgacacaagcacacatatgtaagtttaaagaaagtaggaggaaggtgtttgccctgtttcccaaagtgggaactatatctgttttaaaaacaactgtcaaaagtaaatgaaataggttatataagttgaggaatctgttttgctttgaaaattgtgtaaaattgccaagtttctaataaaccaataaatataaca

SEQ ID NO: 147037 - DNA, 975 bp, Homo sapiens
  Payload ID: 9081
  Gene Symbol: KRR1
  Gene Name: KRR1, small subunit (SSU) processome component, homolog (yeast)
  Uniprot ID: Q13601
  ENST ID: ENST00000438169
  CDS Start-End: 1-975
atggcgtctccctcgctggagcggccagaaaaaggcgctggaaaaagtgaatttcgtaaccagaagccgaagccggagaaccaagatgaatcagaactccttacggttcctgatggttggaaggaaccagctttttccaaagaggacaatcccagaggacttttggaggagagcagtttcgcaactttgttcccaaaatacagggaagcttacttgaaagagtgttggccattggtgcagaaagccttaaatgaacatcatgttaatgcaaccctggacctgatcgaaggcagcatgactgtttgtactacaaagaagacttttgatccatatatcatcattagggccagagatctgataaaactgttagcaaggagtgtttcatttgaacaggcagtacgaattcttcaggatgatgttgcatgtgacatcattaaaataggttctttagtaaggaataaagagagatttgtaaaacgaagacaacggcttattggtcccaaaggatctacattgaaggcattggaactcttaactaattgttacattatggttcagggaaacacagtttcagccattggaccttttagtggcttaaaagaggttagaaaagtagtccttgatactatgaagaatattcatccaatttataacattaaaatcgataaagaattggctagtggtgaatactttttgaaggcaaatcagaagaagcggcagaaaatggaagcaataaaggctaaacaagcagaagccatcagtaagagacaagaggaaagaaacaaagcatttattccacctaaggaaaaaccaattgtgaaacctaaggaagcttctactgaaactaaaattgatgtggccagcatcaaggaaaaggttaagaaagcaaagaataagaaactgggagctcttacagctgaagaaattgcacttaagatggaggcagatgaaaagaaaaagaagaaaaaaaagtaa

SEQ ID NO: 147038 - DNA, 1130 bp, Homo sapiens
  Payload ID: 9081
  Gene Symbol: KRR1
  Gene Name: KRR1, small subunit (SSU) processome component, homolog (yeast)
  ENST ID: ENST00000612627
  CDS Start-End: 12-878
gcagcttgcaaatggcgtctccctcgctggagcggccagaaaaaggcgctggaaaaagtgaatttcgtaaccagaagccgaagccggagaaccaagatgaatcagaactccttacggttcctgatggttggaaggaaccagctttttccaaagaggacaatcccagaggacttttggaggagagcagtttcgcaactttgttcccaaaatacagggaagcttacttgaaagagtgttggccattggtgcagaaagccttaaatgaacatcatgttaatgcaaccctggacctgatcgaaggcagcatgactgtttgtactacaaagaagacttttgatccatatatcatcattagggccagagatctgataaaactgttagcaaggagtgtttcatttgaacaggcagtacgaattcttcaggatgatgttgcatgtgacatcattaaaataggttctttagtaaggaataaagagagatttgtaaaacgaagacaacggcttattggtcccaaaggatctacattgaaggcattggaactcttaactaattgttacattatggttcagggaaacacagtttcagccattggaccttttagtggcttaaaagaggttagaaaagtagtccttgatactatgaagaatattcatccaatttataacattaaaagcttaatgattaagagagagttggcaaaagattctgaattacgatcacaaagttgggagagatttttgccacagttcaaacacaaaaatgtgaataaacgcaaggaaccaaagaaaaaaactgttaagaaaaatatacgccattcccaccaccacaaccagaaagtcagatcgataaagaattggctagtggtgaatactttttgaaggcaaatcagaagaagcggcagaaaatggaagcaataaaggctaaacaagcagaagccatcagtaagagacaagaggaaagaaacaaagcatttattccacctaaggaaaaaccaattgtgaaacctaaggaagcttctactgaaactaaaattgatgtggccagcatcaaggaaaaggttaagaaagcaaagaataagaaactgggagctcttacagctgaagaaattgcacttaagatggaggcagatg

SEQ ID NO: 147039 - DNA, 1592 bp, Homo sapiens
  Payload ID: 9082
  Gene Symbol: KLF1
  Gene Name: Kruppel-like factor 1 (erythroid)
  Uniprot ID: Q13351
  ENST ID: ENST00000264834
  CDS Start-End: 42-1130
ggaagaggaggcttgaggcccagggtgggcaccagccagccatggccacagccgagaccgccttgccctccatcagcacactgaccgccctgggccccttcccggacacacaggatgacttcctcaagtggtggcgctccgaagaggcgcaggacatgggcccgggtcctcctgaccccacggagccgcccctccacgtgaagtctgaggaccagcccggggaggaagaggacgatgagaggggcgcggacgccacctgggacctggatctcctcctcaccaacttctcgggcccggagcccggtggcgcgccccagacctgcgctctggcgcccagcgaggcctccggggcgcaatatccgccgccgcccgagactctgggcgcatatgctggcggcccggggctggtggctgggcttttgggttcggaggatcactcgggttgggtgcgccctgccctgcgagcccgggctcccgacgccttcgtgggcccagccctggctccagccccggcccccgagcccaaggcgctggcgctgcaaccggtgtacccggggcccggcgccggctcctcgggtggctacttcccgcggaccgggctttcagtgcctgcggcgtcgggcgccccctacgggctactgtccgggtaccccgcgatgtacccggcgcctcagtaccaagggcacttccagctcttccgcgggctccagggacccgcgcccggtcccgccacgtccccctccttcctgagttgtttgggacccgggacggtgggcactggactcggggggactgcagaggatccaggtgtgatagccgagaccgcgccatccaagcgaggccgacgttcgtgggcgcgcaagaggcaggcagcgcacacgtgcgcgcacccgggttgcggcaagagctacaccaagagctcccacctgaaggcgcatctgcgcacgcacacaggggagaagccatacgcctgcacgtgggaaggctgcggctggagattcgcgcgctcggacgagctgacccgccactaccggaaacacacggggcagcgccccttccgctgccagctctgcccacgtgctttttcgcgctctgaccacctggccttgcacatgaagcgccacctttgagccctgccctggcacttggactctcctagtgactggggatgggacaagaagcctgtttggtggtctcttcacacggacgcgcgtgacacaatgctgggtggttttcccacgaatggaccctctcctggactcgcgttcccaaagatccacccaaatatcaaacacggacccatagacagccctgggggagcctcttacggaaaatccgacaagccttcagccacagggagccacacagagatgtccaaactgtcgtgcaaacccagtgagacagaccgccaaataaacggactcagtggacactcagaccagctcccagatggccctggacagcaggagagggtgtgggatgaggcttcccagagaccctgggtctagaaagcggctcctgaaggtcccttattgtggctgatattaactgtcaatggttatgggtcctataaaaatgcccctcccagataa

SEQ ID NO: 147040 - DNA, 3097 bp, Homo sapiens
  Payload ID: 9083
  Gene Symbol: KLF10
  Gene Name: Kruppel-like factor 10
  Uniprot ID: Q13118
  ENST ID: ENST00000285407
  CDS Start-End: 302-1744
acacgctccactgacaccagcttcacgctgccgggcagtcgccgatcacgcgtggccccgcgagcccattggccggcgcctcacacacctttgccgttgattggccggcctcaggctccgcccccacccccgcccgcggcgcggggcaggctgagcggctacctgaatggggagggggcagacggcgctgagcgcggcggcggcgggagcggcgtcgagtgtctccgtgcgcccgtctgtggccaagcagccagcagcctagcagccagtcagcttgccgccggcggccaagcagccaaccatgctcaacttcggtgcctctctccagcagactgcggaggaaagaatggaaatgatttctgaaaggccaaaagagagtatgtattcctggaacaaaactgcagagaaaagtgattttgaagctgtagaagcacttatgtcaatgagctgcagttggaagtctgattttaagaaatacgttgaaaacagacctgttacaccagtatctgatttgtcagaggaagagaatctgcttccgggaacacctgattttcatacaatcccagcattttgtttgactccaccttacagtccttctgactttgaaccctctcaagtgtcaaatctgatggcaccagcgccatctactgtacacttcaagtcactctcagatactgccaaacctcacattgccgcacctttcaaagaggaagaaaagagcccagtatctgcccccaaactccccaaagctcaggcaacaagtgtgattcgtcatacagctgatgcccagctatgtaaccaccagacctgcccaatgaaagcagccagcatcctcaactatcagaacaattcttttagaagaagaacccacctaaatgttgaggctgcaagaaagaacataccatgtgccgctgtgtcaccaaacagatccaaatgtgagagaaacacagtggcagatgttgatgagaaagcaagtgctgcactttatgacttttctgtgccttcctcagagacggtcatctgcaggtctcagccagcccctgtgtccccacaacagaagtcagtgttggtctctccacctgcagtatctgcagggggagtgccacctatgccggtcatctgccagatggttccccttcctgccaacaaccctgttgtgacaacagtcgttcccagcactcctcccagccagccaccagccgtttgcccccctgttgtgttcatgggcacacaagtccccaaaggcgctgtcatgtttgtggtaccccagcccgttgtgcagagttcaaagcctccggtggtgagcccgaatggcaccagactctctcccattgcccctgctcctgggttttccccttcagcagcaaaagtcactcctcagattgattcatcaaggataaggagtcacatctgtagccacccaggatgtggcaagacatactttaaaagttcccatctgaaggcccacacgaggacgcacacaggagaaaagcctttcagctgtagctggaaaggttgtgaaaggaggtttgcccgttctgatgaactgtccagacacaggcgaacccacacgggtgagaagaaatttgcgtgccccatgtgtgaccggcggttcatgaggagtgaccatttgaccaagcatgcccggcgccatctatcagccaagaagctaccaaactggcagatggaagtgagcaagctaaatgacattgctctacctccaacccctgctcccacacagtgacagaccggaaagtgaagagtcagaactaactttggtctcagcgggagccagtggtgatgtaaaaatgcttccactgcaagtctgtggccccacaacgtgggcttaaagcagaagccccacagcctggcacgaaggccccgcctgggttaggtgactaaaagggcttcggccacaggcaggtcacagaaaggcaggtttcatttcttatcacataagagagatgagaaagcttttattcctttgaatattttttgaaggtttcagatgaggtcaacacaggtagcacagattttgaatctgtgtgcatatttgttactttacttttgctgtttatacttgagaccaacttttcaatgtgattcttctaaagcactggtttcaagaatatggaggctggaaggaaataaacattacggtacagacatggagatgtaaaatgagtttgtattattacaaatattgtcatctttttctagagttatcttctttattattcctagtctttccagtcaacatcgtggatgtagtgattaaatatatctagaactatcatttttacactattgtgaatatttggaattgaacgactgtatattgctaagagggcccaaagaattggaatcctccttaatttaattgctttgaagcatagctacaatttgtttttgcatttttgttttgaaagtttaacaaatgactgtatctaggcatttcattatgctttgaactttagtttgcctgcagtttcttgtgtagatttgaaaattgtataccaatgtgttttctgtagactctaagatacactgcactttgtttagaaaaaaaactgaagatgaaatatatattgtaaagaagggatattaagaatcttagataacttcttgaaaaagatggcttatgtcatcagtaaagtacctttatgttatgaggatataatgtgtgctttattgaattagaaaattagtgaccattattcacaggtggacaaatgttgatgttgtcctgttaatttataggcgttttttggggatgtggaggtagttgggtagaaaaattattagaacattcacttttgttaacagtatttctcttttattctgttatatagtggatgatatacacagtggcaaaacaaaagtacattgcttaaaatatatagtgaaaaatgtcactatatcttcccatttaacattgtttttgtatattgggtgtagatttctgacatcaaaacttggacccttggaaaacaaaagttttaattaaaaaaaatccttgtgacttacaatttgcacaatatttcttttgttgtactttatatcttgtttacaataaagaattccctttggtatatgg

SEQ ID NO: 147041 - DNA, 3659 bp, Homo sapiens
  Payload ID: 9083
  Gene Symbol: KLF10
  Gene Name: Kruppel-like factor 10
  Uniprot ID: Q13118
  ENST ID: ENST00000395884
  CDS Start-End: 904-2313
ggttcctaagggaacggcggctcgcggggagctggaaggggcgggcgcctcccggagcctggcgcccgcagccccgcccctccccgcgggcccggcgcgcacggccgggcggttggcggcggcgcccgcggcccctcccccgggtcgggcgcgggcgggggcccgcaagctcaggaagtaggggaaaggtgacggcgcggcaattcccagttcacgtttcctgcgcctcccggagcagccgctgatcacgctttgttcacatgcctcgccccctcctcgcccacgcccccgccccgggccgcacagccaatccgggctcgggccgccgagccggccggccaatggcgggggcaggggcgcggggacgtgcgagcggcgaggaatgttcccagtgactcacccgtgagcctcattgaggttagggcggccccatccgtcggtctccgccagctaggatctcccccgccgtccgcccccgcccctcgtctgcctcccccgcccgcgcctccgcccgcgcttccctttcctgcctcgcgccccactccctttcctcccctccctgtttcccttcctgtccttcccagctcacgctctctttccctgccgcctgcctttcttttttcctttttttgcattggcgtcttggggctgttacacacacgcgcgctgtccattgcagcttacataaaggcgggcgcgattatgcaattatattgttagcgatatttcaagagcaatggctcgttttcttaggatttcaacacgaaggcatcatgcatttttgaaaaactagtattgagaataataccttgcaacgtaaagaatgttttttggtatttttacacaatctctactttgaccaaacgagtctggacagttttcttttaatggaaaataggagaaatggaggaaagaatggaaatgatttctgaaaggccaaaagagagtatgtattcctggaacaaaactgcagagaaaagtgattttgaagctgtagaagcacttatgtcaatgagctgcagttggaagtctgattttaagaaatacgttgaaaacagacctgttacaccagtatctgatttgtcagaggaagagaatctgcttccgggaacacctgattttcatacaatcccagcattttgtttgactccaccttacagtccttctgactttgaaccctctcaagtgtcaaatctgatggcaccagcgccatctactgtacacttcaagtcactctcagatactgccaaacctcacattgccgcacctttcaaagaggaagaaaagagcccagtatctgcccccaaactccccaaagctcaggcaacaagtgtgattcgtcatacagctgatgcccagctatgtaaccaccagacctgcccaatgaaagcagccagcatcctcaactatcagaacaattcttttagaagaagaacccacctaaatgttgaggctgcaagaaagaacataccatgtgccgctgtgtcaccaaacagatccaaatgtgagagaaacacagtggcagatgttgatgagaaagcaagtgctgcactttatgacttttctgtgccttcctcagagacggtcatctgcaggtctcagccagcccctgtgtccccacaacagaagtcagtgttggtctctccacctgcagtatctgcagggggagtgccacctatgccggtcatctgccagatggttccccttcctgccaacaaccctgttgtgacaacagtcgttcccagcactcctcccagccagccaccagccgtttgcccccctgttgtgttcatgggcacacaagtccccaaaggcgctgtcatgtttgtggtaccccagcccgttgtgcagagttcaaagcctccggtggtgagcccgaatggcaccagactctctcccattgcccctgctcctgggttttccccttcagcagcaaaagtcactcctcagattgattcatcaaggataaggagtcacatctgtagccacccaggatgtggcaagacatactttaaaagttcccatctgaaggcccacacgaggacgcacacaggagaaaagcctttcagctgtagctggaaaggttgtgaaaggaggtttgcccgttctgatgaactgtccagacacaggcgaacccacacgggtgagaagaaatttgcgtgccccatgtgtgaccggcggttcatgaggagtgaccatttgaccaagcatgcccggcgccatctatcagccaagaagctaccaaactggcagatggaagtgagcaagctaaatgacattgctctacctccaacccctgctcccacacagtgacagaccggaaagtgaagagtcagaactaactttggtctcagcgggagccagtggtgatgtaaaaatgcttccactgcaagtctgtggccccacaacgtgggcttaaagcagaagccccacagcctggcacgaaggccccgcctgggttaggtgactaaaagggcttcggccacaggcaggtcacagaaaggcaggtttcatttcttatcacataagagagatgagaaagcttttattcctttgaatattttttgaaggtttcagatgaggtcaacacaggtagcacagattttgaatctgtgtgcatatttgttactttacttttgctgtttatacttgagaccaacttttcaatgtgattcttctaaagcactggtttcaagaatatggaggctggaaggaaataaacattacggtacagacatggagatgtaaaatgagtttgtattattacaaatattgtcatctttttctagagttatcttctttattattcctagtctttccagtcaacatcgtggatgtagtgattaaatatatctagaactatcatttttacactattgtgaatatttggaattgaacgactgtatattgctaagagggcccaaagaattggaatcctccttaatttaattgctttgaagcatagctacaatttgtttttgcatttttgttttgaaagtttaacaaatgactgtatctaggcatttcattatgctttgaactttagtttgcctgcagtttcttgtgtagatttgaaaattgtataccaatgtgttttctgtagactctaagatacactgcactttgtttagaaaaaaaactgaagatgaaatatatattgtaaagaagggatattaagaatcttagataacttcttgaaaaagatggcttatgtcatcagtaaagtacctttatgttatgaggatataatgtgtgctttattgaattagaaaattagtgaccattattcacaggtggacaaatgttgatgttgtcctgttaatttataggcgttttttggggatgtggaggtagttgggtagaaaaattattagaacattcacttttgttaacagtatttctcttttattctgttatatagtggatgatatacacagtggcaaaacaaaagtacattgcttaaaatatatagtgaaaaatgtcactatatcttcccatttaacattgtttttgtatattgggtgtagatttctgacatcaaaacttggacccttggaaaacaaaagttttaattaaaaaaaatccttgtgacttacaatttgcacaatatttcttttgttgtactttatatcttgtttacaataaagaattccctttgg

SEQ ID NO: 147042 - DNA, 4030 bp, Homo sapiens
  Payload ID: 9084
  Gene Symbol: KLF11
  Gene Name: Kruppel-like factor 11
  Uniprot ID: O14901
  ENST ID: ENST00000305883
  CDS Start-End: 163-1701
gagggccgcgccggggcagagccgcgcgggcgggcgaggcgcgtgccggccgcaggagctccgggttgccgccgccgccgccgcccgcagcccacgtgcggccgctgctgcgcccgagctcacgccccgcggccgctttgttgctcccggccggcctgcacgatgcacacgccggacttcgcaggcccagacgacgcgcgcgcagttgacatcatggacatatgtgagtccatcctggagaggaagcggcatgacagcgaaaggtctacttgcagcatcttggagcagacagacatggaagctgtcgaggctcttgtttgtatgagctcctggggtcaaagatcccagaaaggtgacctgttgcggataagacccctcacgcctgtctctgactctggggatgtcaccaccactgtgcatatggatgcagccacacctgaactaccaaaagacttccattctttatcgactctgtgcataactcctcctcagagccctgatctcgtggagccatcgacaaggacacctgtttctccccaagtaacagattccaaagcatgtacagccacggatgttctccagtcctctgccgtagtggccagagctctgagcgggggcgcggagaggggcttgctgggtttggagccagtgcccagctctccctgcagggccaaggggactagcgtgatccgacacactggggagagccctgctgcctgctttcccaccatccagactccagattgccggctttctgacagcagagaaggagaagagcagcttctgggacactttgaaactttgcaggacacacacctcacggacagtttactcagcactaacttggtgtcctgtcagccctgcttgcacaagtctggtggcctgctgctcactgacaaaggccagcaggcagggtggcctggtgcagttcagacttgctcaccaaagaattatgaaaatgacctgcccaggaaaaccacccctctgatttctgtctctgtccctgctccccctgtcctttgccagatgatccctgtgactggacaaagtagcatgttaccagcttttttgaagccccctccccagttgtctgtggggactgtgagacccatcctagctcaggctgctccagcgcctcaacctgtgttcgtgggacctgctgtgcctcagggagctgtgatgttggtcctgccccagggagccctccctccgcctgccccctgtgcagccaatgtcatggctgccgggaataccaagttgttgccccttgcccctgctccagtgttcatcacctctagccaaaactgtgtccctcaggtagacttttcccgaaggaggaactatgtatgcagcttcccaggttgccggaagacctacttcaaaagttcccaccttaaggcccatcttcgcactcacacaggggagaagcctttcaactgcagctgggatggctgtgataaaaagtttgctcgttcggatgagctgtcacgccaccgcagaactcacacaggggagaagaagtttgtgtgcccggtgtgtgaccgacgtttcatgcgcagtgaccacctgacgaagcatgcccggcgccacatgacgaccaagaagatcccaggctggcaggcagaggttggcaagctgaacagaatcgcctctgcagagagcccggggagcccactggtgagcatgccagcctctgcctgaaaggtccattaggacatcactcatgggatttttaaaaagcctctttccaggaatggaactgatggattcctctcccactgcctcacccaaaaaaaacggtcttggcggcctaggggaagatcggggagctggttttgatgaaagtatgttaacttttcttttccacttgggaccctgttcagtatcttttgtagtttcagaagtttttttgttttggttttttttttaaagaaatggtagaaaatttgataatctgaatcaccagcattcaaacaaatatttcggcaataaagtttacaaaatctggatttttacaaccttttctattgatgttttgtagaaataagacagggtactaatttttatactggtttttagaaaaatatttatattgttggtgctcaaatcaccaatttctagctagatcattttgcagccttcttttcagtgtttaataacaaagtttttcctaatggcccttcttttagtaaactggacatgttattccactacaaaaaccacaagttatctggccttttagatctttttggaatcggacctggttgagtaaggacctcttaaaagggaaaaataaattttgccgtcagcttcttcataacgttttcaaggaaattctaggcaatcattcctgtcaccaaagaactaaaattttggttgactggaactagtgagctgtgtccatggtgtgtcatgaaggatgtaccccagagagtaacatgagccactgggcagatcccagggaccagtacttgctgcaggatctagtctgtaatagtcttggccatggctctgctgaaagcaagccattcagtttcttgtttgtacctaaaacaccaaaaaagaaacactcaaatccagctgctttgtcaattgtcagttctgactccttttgctgtggccttatccgtactatattgtgggtagagtaacttctcagaaaaaaaggaaatgtctgtattggttggatgaaactccaccagagcacagcttagctggggcgagatgcatgtgaaggcaggcagtgccaagattccgcttcctttgtttgccaaatactagaaacacaaggaaatgcaagttacgctaaatggcagtaatactacccaactgcctttctgttcattttgtttgaaggaaattgttttgaccaaacagaaaattacttggaatggtgtgttttacagtctacctagaaaatagatggacaatatttttcaactgtatgagcacgtagataaccgagagaatgtggccacctgtgttcaagaagccactgatactggtttttgttaaacattggaagttcaggcaatggaataaatgtaggaacatacagaatgttgcactaatttggtagcctgggaattttttttattgtgcagtatgtatttaaattttgtctatgttaattaccagcatttacctttatttaaatgatggtaaggtggaatattgaataaaattaggttttgtgttttgttctttgtagtctgataaaatctccacctggtcattcattgtgtgtgacttgatacctgttaacttgccccttagtatcagctgttacttgacacaaatgtgtgtgttattcagaggttttcagtctggacactccataggtgagtgtcgtgtcttcgtgagacagcacagttgtctcatgttgtgcatagttcatgtttcctcaccacccagtcctttctcctgctcatcaaaatcagcatacacatttttgactgtacacactataaatggcatcaaatttggatatttttcttaattatgacatgcaaagtaatgtgagtcctgccagtattctggtggataaggtcttttgagtatttggttgcttgtcacaacattctccaagcagtgatatttctaaagaggagatacatgttgaaaacggttttaatttacacttccatttcctgattacatttggaaatactttgtgtaaaccatcccccttccacctccatttgtctgttgaaagattttaagttggaaacagttcctgtctgaaaactcttctgagaaccacaaaccttgtgtatggattcggcatggagccctcagctggcggctctgggtgctgacggccgctggagaggtgggctcccctcgtgcactttattgcctgggcagttttgcttgatcttttgtgactttgagccttttaagtagtttgaatgataagacttaaaatgtttcataattatgttttatgtaacagactttgacattatttaaacgagcatgtgtaatgtaacttttctctttgaatcatataaaacttgattttacattg

SEQ ID NO: 147043 - DNA, 614 bp, Homo sapiens
  Payload ID: 9084
  Gene Symbol: KLF11
  Gene Name: Kruppel-like factor 11
  ENST ID: ENST00000401510
  CDS Start-End: 233-614
acagagcggaagaggcccagagacgccagaggaggggcgtcagcgggacactcaggccaataagctctgactcccgctgtctgcaaaaatgaccggatgcaggaatgtcacctagaaccggccagctttccgacctctccggtcaaggacgcattcctaagagacgaagggagaatgacagaagttaaaaacaaccaaacaaaagccaggttgaggcctctaggttgacatcatggacatatgtgagtccatcctggagaggaagcggcatgacagcgaaaggtctacttgcagcatcttggagcagacagacatggaagctgtcgaggctcttgtttgtatgagctcctggggtcaaagatcccagaaaggtgacctgttgcggataagacccctcacgcctgtctctgactctggggatgtcaccaccactgtgcatatggatgcagccacacctgaactaccaaaagacttccattctttatcgactctgtgcataactcctcctcagagccctgatctcgtggagccatcgacaaggacacctgtttctccccaagtaacagattccaaagcatgtacagccacggatgttctccagtcctctgccgtag

SEQ ID NO: 147044 - DNA, 559 bp, Homo sapiens
  Payload ID: 9084
  Gene Symbol: KLF11
  Gene Name: Kruppel-like factor 11
  ENST ID: ENST00000448523
  CDS Start-End: 69-559
actcgcgcgcctgtaaatgcgggaggtggggcgtgcagggcttcgctgcggccgcgccggttgacatcatggacatatgtgagtccatcctggagaggaagcggcatgacagcgaaaggtctacttgcagcatcttggagcagacagacatggaagctgtcgaggctcttgtttgtatgagctcctggggtcaaagatcccagaaaggtgacctgttgcggataagacccctcacgcctgtctctgactctggggatgtcaccaccactgtgcatatggatgcagccacacctgaactaccaaaagacttccattctttatcgactctgtgcataactcctcctcagagccctgatctcgtggagccatcgacaaggacacctgtttctccccaagtaacagattccaaagcatgtacagccacggatgttctccagtcctctgccgtagtggccagagctctgagcgggggcgcggagaggggcttgctgggtttggagccagtgcccagctctccctgcagggccaaggggactagcgtgatccgacacactgggga

SEQ ID NO: 147045 - DNA, 653 bp, Homo sapiens
  Payload ID: 9084
  Gene Symbol: KLF11
  Gene Name: Kruppel-like factor 11
  ENST ID: ENST00000440320
  CDS Start-End: 287-653
acgcggccgtcgggcgggttaagagcggctagcggtagtgccgctcgggcctgggggcgggcaaggtctaggggccggggcaacgacgggaggcgggagcgccgcactgccttggaggcggggcaacgcttggaggcgggaacgcggcacgcgagcgttgggggccctaagcgtcgcgacctgggggcttcggggaggtagccgtggacgtgggcagagcgcgggcctcgtggtgtgcgggcactgtgggccgggcgagccccttcccgcccgtgtggttgacatcatggacatatgtgagtccatcctggagaggaagcggcatgacagcgaaaggtctacttgcagcatcttggagcagacagacatggaagctgtcgaggctcttgtttgtatgagctcctggggtcaaagatcccagaaaggtgacctgttgcggataagacccctcacgcctgtctctgactctggggatgtcaccaccactgtgcatatggatgcagccacacctgaactaccaaaagacttccattctttatcgactctgtgcataactcctcctcagagccctgatctcgtggagccatcgacaaggacacctgtttctccccaagtaacagattccaaagcatgtacagccacggatgttctcc

SEQ ID NO: 147046 - DNA, 4033 bp, Homo sapiens
  Payload ID: 9084
  Gene Symbol: KLF11
  Gene Name: Kruppel-like factor 11
  Uniprot ID: O14901
  ENST ID: ENST00000535335
  CDS Start-End: 217-1704
ggggccggggcaacgacgggaggcgggagcgccgcactgccttggaggcggggcaacgcttggaggcgggaacgcggcacgcgagcgttgggggccctaagcgtcgcgacctgggggcttcggggaggtagccgtggacgtgggcagagcgcgggcctcgtggtgtgcgggcactgtgggccgggcgagccccttcccgcccgtgtggttgacatcatggacatatgtgagtccatcctggagaggaagcggcatgacagcgaaaggtctacttgcagcatcttggagcagacagacatggaagctgtcgaggctcttgtttgtatgagctcctggggtcaaagatcccagaaaggtgacctgttgcggataagacccctcacgcctgtctctgactctggggatgtcaccaccactgtgcatatggatgcagccacacctgaactaccaaaagacttccattctttatcgactctgtgcataactcctcctcagagccctgatctcgtggagccatcgacaaggacacctgtttctccccaagtaacagattccaaagcatgtacagccacggatgttctccagtcctctgccgtagtggccagagctctgagcgggggcgcggagaggggcttgctgggtttggagccagtgcccagctctccctgcagggccaaggggactagcgtgatccgacacactggggagagccctgctgcctgctttcccaccatccagactccagattgccggctttctgacagcagagaaggagaagagcagcttctgggacactttgaaactttgcaggacacacacctcacggacagtttactcagcactaacttggtgtcctgtcagccctgcttgcacaagtctggtggcctgctgctcactgacaaaggccagcaggcagggtggcctggtgcagttcagacttgctcaccaaagaattatgaaaatgacctgcccaggaaaaccacccctctgatttctgtctctgtccctgctccccctgtcctttgccagatgatccctgtgactggacaaagtagcatgttaccagcttttttgaagccccctccccagttgtctgtggggactgtgagacccatcctagctcaggctgctccagcgcctcaacctgtgttcgtgggacctgctgtgcctcagggagctgtgatgttggtcctgccccagggagccctccctccgcctgccccctgtgcagccaatgtcatggctgccgggaataccaagttgttgccccttgcccctgctccagtgttcatcacctctagccaaaactgtgtccctcaggtagacttttcccgaaggaggaactatgtatgcagcttcccaggttgccggaagacctacttcaaaagttcccaccttaaggcccatcttcgcactcacacaggggagaagcctttcaactgcagctgggatggctgtgataaaaagtttgctcgttcggatgagctgtcacgccaccgcagaactcacacaggggagaagaagtttgtgtgcccggtgtgtgaccgacgtttcatgcgcagtgaccacctgacgaagcatgcccggcgccacatgacgaccaagaagatcccaggctggcaggcagaggttggcaagctgaacagaatcgcctctgcagagagcccggggagcccactggtgagcatgccagcctctgcctgaaaggtccattaggacatcactcatgggatttttaaaaagcctctttccaggaatggaactgatggattcctctcccactgcctcacccaaaaaaaacggtcttggcggcctaggggaagatcggggagctggttttgatgaaagtatgttaacttttcttttccacttgggaccctgttcagtatcttttgtagtttcagaagtttttttgttttggttttttttttaaagaaatggtagaaaatttgataatctgaatcaccagcattcaaacaaatatttcggcaataaagtttacaaaatctggatttttacaaccttttctattgatgttttgtagaaataagacagggtactaatttttatactggtttttagaaaaatatttatattgttggtgctcaaatcaccaatttctagctagatcattttgcagccttcttttcagtgtttaataacaaagtttttcctaatggcccttcttttagtaaactggacatgttattccactacaaaaaccacaagttatctggccttttagatctttttggaatcggacctggttgagtaaggacctcttaaaagggaaaaataaattttgccgtcagcttcttcataacgttttcaaggaaattctaggcaatcattcctgtcaccaaagaactaaaattttggttgactggaactagtgagctgtgtccatggtgtgtcatgaaggatgtaccccagagagtaacatgagccactgggcagatcccagggaccagtacttgctgcaggatctagtctgtaatagtcttggccatggctctgctgaaagcaagccattcagtttcttgtttgtacctaaaacaccaaaaaagaaacactcaaatccagctgctttgtcaattgtcagttctgactccttttgctgtggccttatccgtactatattgtgggtagagtaacttctcagaaaaaaaggaaatgtctgtattggttggatgaaactccaccagagcacagcttagctggggcgagatgcatgtgaaggcaggcagtgccaagattccgcttcctttgtttgccaaatactagaaacacaaggaaatgcaagttacgctaaatggcagtaatactacccaactgcctttctgttcattttgtttgaaggaaattgttttgaccaaacagaaaattacttggaatggtgtgttttacagtctacctagaaaatagatggacaatatttttcaactgtatgagcacgtagataaccgagagaatgtggccacctgtgttcaagaagccactgatactggtttttgttaaacattggaagttcaggcaatggaataaatgtaggaacatacagaatgttgcactaatttggtagcctgggaattttttttattgtgcagtatgtatttaaattttgtctatgttaattaccagcatttacctttatttaaatgatggtaaggtggaatattgaataaaattaggttttgtgttttgttctttgtagtctgataaaatctccacctggtcattcattgtgtgtgacttgatacctgttaacttgccccttagtatcagctgttacttgacacaaatgtgtgtgttattcagaggttttcagtctggacactccataggtgagtgtcgtgtcttcgtgagacagcacagttgtctcatgttgtgcatagttcatgtttcctcaccacccagtcctttctcctgctcatcaaaatcagcatacacatttttgactgtacacactataaatggcatcaaatttggatatttttcttaattatgacatgcaaagtaatgtgagtcctgccagtattctggtggataaggtcttttgagtatttggttgcttgtcacaacattctccaagcagtgatatttctaaagaggagatacatgttgaaaacggttttaatttacacttccatttcctgattacatttggaaatactttgtgtaaaccatcccccttccacctccatttgtctgttgaaagattttaagttggaaacagttcctgtctgaaaactcttctgagaaccacaaaccttgtgtatggattcggcatggagccctcagctggcggctctgggtgctgacggccgctggagaggtgggctcccctcgtgcactttattgcctgggcagttttgcttgatcttttgtgactttgagccttttaagtagtttgaatgataagacttaaaatgtttcataattatgttttatgtaacagactttgacattatttaaacgagcatgtgtaatgtaacttttctctttgaatcatataaaacttgattttacattg

SEQ ID NO: 147047 - DNA, 3885 bp, Homo sapiens
  Payload ID: 9084
  Gene Symbol: KLF11
  Gene Name: Kruppel-like factor 11
  Uniprot ID: O14901
  ENST ID: ENST00000540845
  CDS Start-End: 69-1556
actcgcgcgcctgtaaatgcgggaggtggggcgtgcagggcttcgctgcggccgcgccggttgacatcatggacatatgtgagtccatcctggagaggaagcggcatgacagcgaaaggtctacttgcagcatcttggagcagacagacatggaagctgtcgaggctcttgtttgtatgagctcctggggtcaaagatcccagaaaggtgacctgttgcggataagacccctcacgcctgtctctgactctggggatgtcaccaccactgtgcatatggatgcagccacacctgaactaccaaaagacttccattctttatcgactctgtgcataactcctcctcagagccctgatctcgtggagccatcgacaaggacacctgtttctccccaagtaacagattccaaagcatgtacagccacggatgttctccagtcctctgccgtagtggccagagctctgagcgggggcgcggagaggggcttgctgggtttggagccagtgcccagctctccctgcagggccaaggggactagcgtgatccgacacactggggagagccctgctgcctgctttcccaccatccagactccagattgccggctttctgacagcagagaaggagaagagcagcttctgggacactttgaaactttgcaggacacacacctcacggacagtttactcagcactaacttggtgtcctgtcagccctgcttgcacaagtctggtggcctgctgctcactgacaaaggccagcaggcagggtggcctggtgcagttcagacttgctcaccaaagaattatgaaaatgacctgcccaggaaaaccacccctctgatttctgtctctgtccctgctccccctgtcctttgccagatgatccctgtgactggacaaagtagcatgttaccagcttttttgaagccccctccccagttgtctgtggggactgtgagacccatcctagctcaggctgctccagcgcctcaacctgtgttcgtgggacctgctgtgcctcagggagctgtgatgttggtcctgccccagggagccctccctccgcctgccccctgtgcagccaatgtcatggctgccgggaataccaagttgttgccccttgcccctgctccagtgttcatcacctctagccaaaactgtgtccctcaggtagacttttcccgaaggaggaactatgtatgcagcttcccaggttgccggaagacctacttcaaaagttcccaccttaaggcccatcttcgcactcacacaggggagaagcctttcaactgcagctgggatggctgtgataaaaagtttgctcgttcggatgagctgtcacgccaccgcagaactcacacaggggagaagaagtttgtgtgcccggtgtgtgaccgacgtttcatgcgcagtgaccacctgacgaagcatgcccggcgccacatgacgaccaagaagatcccaggctggcaggcagaggttggcaagctgaacagaatcgcctctgcagagagcccggggagcccactggtgagcatgccagcctctgcctgaaaggtccattaggacatcactcatgggatttttaaaaagcctctttccaggaatggaactgatggattcctctcccactgcctcacccaaaaaaaacggtcttggcggcctaggggaagatcggggagctggttttgatgaaagtatgttaacttttcttttccacttgggaccctgttcagtatcttttgtagtttcagaagtttttttgttttggttttttttttaaagaaatggtagaaaatttgataatctgaatcaccagcattcaaacaaatatttcggcaataaagtttacaaaatctggatttttacaaccttttctattgatgttttgtagaaataagacagggtactaatttttatactggtttttagaaaaatatttatattgttggtgctcaaatcaccaatttctagctagatcattttgcagccttcttttcagtgtttaataacaaagtttttcctaatggcccttcttttagtaaactggacatgttattccactacaaaaaccacaagttatctggccttttagatctttttggaatcggacctggttgagtaaggacctcttaaaagggaaaaataaattttgccgtcagcttcttcataacgttttcaaggaaattctaggcaatcattcctgtcaccaaagaactaaaattttggttgactggaactagtgagctgtgtccatggtgtgtcatgaaggatgtaccccagagagtaacatgagccactgggcagatcccagggaccagtacttgctgcaggatctagtctgtaatagtcttggccatggctctgctgaaagcaagccattcagtttcttgtttgtacctaaaacaccaaaaaagaaacactcaaatccagctgctttgtcaattgtcagttctgactccttttgctgtggccttatccgtactatattgtgggtagagtaacttctcagaaaaaaaggaaatgtctgtattggttggatgaaactccaccagagcacagcttagctggggcgagatgcatgtgaaggcaggcagtgccaagattccgcttcctttgtttgccaaatactagaaacacaaggaaatgcaagttacgctaaatggcagtaatactacccaactgcctttctgttcattttgtttgaaggaaattgttttgaccaaacagaaaattacttggaatggtgtgttttacagtctacctagaaaatagatggacaatatttttcaactgtatgagcacgtagataaccgagagaatgtggccacctgtgttcaagaagccactgatactggtttttgttaaacattggaagttcaggcaatggaataaatgtaggaacatacagaatgttgcactaatttggtagcctgggaattttttttattgtgcagtatgtatttaaattttgtctatgttaattaccagcatttacctttatttaaatgatggtaaggtggaatattgaataaaattaggttttgtgttttgttctttgtagtctgataaaatctccacctggtcattcattgtgtgtgacttgatacctgttaacttgccccttagtatcagctgttacttgacacaaatgtgtgtgttattcagaggttttcagtctggacactccataggtgagtgtcgtgtcttcgtgagacagcacagttgtctcatgttgtgcatagttcatgtttcctcaccacccagtcctttctcctgctcatcaaaatcagcatacacatttttgactgtacacactataaatggcatcaaatttggatatttttcttaattatgacatgcaaagtaatgtgagtcctgccagtattctggtggataaggtcttttgagtatttggttgcttgtcacaacattctccaagcagtgatatttctaaagaggagatacatgttgaaaacggttttaatttacacttccatttcctgattacatttggaaatactttgtgtaaaccatcccccttccacctccatttgtctgttgaaagattttaagttggaaacagttcctgtctgaaaactcttctgagaaccacaaaccttgtgtatggattcggcatggagccctcagctggcggctctgggtgctgacggccgctggagaggtgggctcccctcgtgcactttattgcctgggcagttttgcttgatcttttgtgactttgagccttttaagtagtttgaatgataagacttaaaatgtttcataattatgttttatgtaacagactttgacattatttaaacgagcatgtgtaatgtaacttttctctttgaatcatataaaacttgattttacattg

SEQ ID NO: 147048 - DNA, 1407 bp, Homo sapiens
  Payload ID: 9085
  Gene Symbol: KLF12
  Gene Name: Kruppel-like factor 12
  ENST ID: ENST00000377666
  CDS Start-End: 274-1407
agccgctgagaggctctgcgtgtgcgtgtgcgcgggtgacgccgtgtgtgtgcgagtgtgtgtgtgtgtgtgcgcgcgcgcgtgtgagagagagaaagggagagagagagggggactctgtgtgagggaaagaaaacaatttctcctgctctgcagcttctgttcaggatcaatgtgactctaagaacaaatggatgaatgaatatccatatgaagagaaaaacaataaagaatatcaacacctttgagaacagaatgttaatgcttgatgggatgccggcagtcagagtcaaaacagagcttttggaatctgaacaagggtctccaaacgtccacaactatcccgatatggaagccgttcccctgttgctaaataatgtgaaaggggagcccccggaggactcgttatctgtagatcacttccaaacacaaactgagccagtggacttgtcaataaacaaagccaggacgtcccctactgccgtttcatcctccccagtttccatgacagcatctgcctcctcaccttcttcaacttcaacctcttcatcgtcttctagtcgtctagcctcatccccaactgttatcacatcagtatcttcagcgtcatcttcgtcaacagtattaactccagggccccttgtggcctctgcatctggtgttggaggccagcagtttttgcacattatccatcccgtaccgccttcaagtcccatgaatttacagtctaacaaactgagtcatgttcaccgcatccccgtggtggtacagtcggtgcctgttgtctacacagctgtaaggtcacctggaaatgtgaacaacactattgtcgtgccgcttttggaggatgggagaggccatggcaaagcacaaatggacccccgaggcctatctcccagacaaagtaaaagtgacagtgatgatgatgacctgccaaatgtgaccttagatagcgttaatgaaactggatctacggccctttccatagccagagcagtacaagaggtacatccgtccccagtatcaagggtccggggcaatcgaatgaataatcaaaagtttccttgttcaatttcaccatttagtattgagagcacaagacgccagagacggtctgaatccccagactccagaaaacggcgtatccacagatgtgattttgagggatgcaacaaagtgtacacaaaaagttctcacctgaaggctcaccggaggacacatacaggagagaaaccttacaagtgtacctgggaaggctgcacctggaagttcgctcgttcagatgaactgacgaggcattaccgcaaacatacgggagtgaagccattcaagtgcgcggactgtgatcgcagcttttcccggtcagatcatttggccctgcaccgccggaggcatatgttggtgtga

SEQ ID NO: 147049 - DNA, 10637 bp, Homo sapiens
  Payload ID: 9085
  Gene Symbol: KLF12
  Gene Name: Kruppel-like factor 12
  Uniprot ID: Q9Y4X4
  ENST ID: ENST00000377669
  CDS Start-End: 28-1236
aatgtgactctaagaacaaatggatgaatgaatatccatatgaagagaaaaacaataaagaatatcaacacctttgagaacagaatgttaatgcttgatgggatgccggcagtcagagtcaaaacagagcttttggaatctgaacaagggtctccaaacgtccacaactatcccgatatggaagccgttcccctgttgctaaataatgtgaaaggggagcccccggaggactcgttatctgtagatcacttccaaacacaaactgagccagtggacttgtcaataaacaaagccaggacgtcccctactgccgtttcatcctccccagtttccatgacagcatctgcctcctcaccttcttcaacttcaacctcttcatcgtcttctagtcgtctagcctcatccccaactgttatcacatcagtatcttcagcgtcatcttcgtcaacagtattaactccagggccccttgtggcctctgcatctggtgttggaggccagcagtttttgcacattatccatcccgtaccgccttcaagtcccatgaatttacagtctaacaaactgagtcatgttcaccgcatccccgtggtggtacagtcggtgcctgttgtctacacagctgtaaggtcacctggaaatgtgaacaacactattgtcgtgccgcttttggaggatgggagaggccatggcaaagcacaaatggacccccgaggcctatctcccagacaaagtaaaagtgacagtgatgatgatgacctgccaaatgtgaccttagatagcgttaatgaaactggatctacggccctttccatagccagagcagtacaagaggtacatccgtccccagtatcaagggtccggggcaatcgaatgaataatcaaaagtttccttgttcaatttcaccatttagtattgagagcacaagacgccagagacggtctgaatccccagactccagaaaacggcgtatccacagatgtgattttgagggatgcaacaaagtgtacacaaaaagttctcacctgaaggctcaccggaggacacatacaggagagaaaccttacaagtgtacctgggaaggctgcacctggaagttcgctcgttcagatgaactgacgaggcattaccgcaaacatacgggagtgaagccattcaagtgcgcggactgtgatcgcagcttttcccggtcagatcatttggccctgcaccgccggaggcatatgttggtgtgaggaatgctacctgtccagctgagcgtaagagctggatctcttagcggcacccaattcagcagggctgaatccccttcacagtgttaacacaaaagggcatcaccatcccacgatgtctgaaaccagagcaggaaaaagaaggcacacttcttttggtctgaaggtaacccccatcatgactagacgagaaccgtctttacccgggcctgggagctcagtgacataaatgctgaagagacaggcattgttttccgtgctgtgtcctctgccatttaaagatgtttgtagcttgtacattttctgagctgtcagacattttgttattgataccttaaaggtcacctaccacaaattgatggctagagcaagaccttttaaatttggatgaatctcccatcatcccatcccttaacccctttttacagaaattttagttacaatctgagtaagctagaacacacatccaatctgttaccagcaagcagcatgaaagtagaaacgaagaagcagatggagaggtcccattacctgcaaagaaagggcactcaggcagccctttgcaatcgcgatggcagccactagatatcactctcaacttgtcattctgccatgccctgaagaaaaccaacattgaatctttcatttgtttgtcgttgattgtttttgttttgtttcgattctgttttgttcatctgttcgagcagaggggcagttgaagtctcgtcctggtctctgccctggcatggactggcacagaggtgttctgtagttgaataggaagagcctgtctaaaaaactactgccccacttcaaattgcagtgttctgtcacctaggcatcatctcttcctgcccctagtatttgattacaaggaaccaggggaaaaaaactttcttagacacactggcaccaaggtaagaggtggggctgcccaggcaaagtcagtgaacatgaaaactcagacaaagcagagatggaaataatgcgcctcttgaggagaaaagcaataatgaataaaaggactttcctacaataacttcactgaggactcacgttaccaattttcatacttactaaagggattgtaaaaaacaccccagcattttaggtgtcttggttccatttacagcactgaggtaatctttctgctgtttgttgtcctgcttggttgagtaccacaattaaagattatgctccccttttcttgtttgaaaacagttatttggtgactagaaaggcaagggaggcatagccgggaattaactcttcggttaatgggtcagttctccttggaactgaatcagtggaaagagaatgcttcccatagaaagcccgacatggtgctagtttcctctcttggagagccaaggataagtgactctccaataggttcttctataccgatttcattttctaaactgtatcaggacccaggtgtcctgcattggcatctgcagggatattgaacccactcatcctgtgcagaggatgagaggaaggtgttagttccatcagccccataaaattatgaacctttttgcaactaggaacatatacagtaaacaagcaatacatcaccaacgagcattctttcagaaaaattaccatatttttgtccccaccacaagctgggtttttttccagctttctgtggctgaggggctggtgagattttttgttgttattgttgttgttgctagaattttttatagcttagatataaaaggtctccaacaaagacctttgcaatatattttaattacaaacacttgattttgggaattgcacatattaacctcacaatattactagctcatttttaaatgtctggacattctgaaataatttccggttacagaattaccctttttaggatcatcttctaattcagataatcttattctgatgaagcgagaactatgaacgttgaaacaaggacaatttgtgttggatggtattcaaaaggaattttttaaaacattaagcaacagtgtaatgattttcaggtcaaattatggcttcacaaatatgtgctctatattgtctgccaggtctcaaaaattcatcaagcaatttccctccaacaagggctgcagttctagtgataaatagcatctttagctgcacagtctactactcatcaaccagtgggttttttttagcacctggaaagtttttttgtactatatgcaactcctacttcacattgcctgtgaccattcagaatagaaaaaggtctgttgatgcatgccagtgctggttactagtcagtgacagagaacacagagagggacaaacacagccatgaaccccctggcactagtaccagcacctagttggcaagtagtgggtgcatctctcaagtgaagtgtagatttgtatttagtcctgcttgctctcataaaaagagccagttcttttctctgctgaaagatgtcttgagagtattacaggtagacttggtttttagaattcataaaactgacaggcaggggaatcttcctgagtgacagcttggtttaaatttagcacagaactagatgagttgcacttttctaataacataggatggatttggggaagggaacattttccctcatcctctgaaagtggaaaccagactgagatggtaagttaactgataaaacctgtcagcattccatcattttccccttttgacgtatcagtacttctaagaagggatctaagcacaattaagtgaattgagtccctggtctagcctcaggaactgaaacttctttggggcttgtcttgagacgtggcaaattctccttggtgagttttctaaaagtatttccccatggaaaggagaaagtggtttgggacagaaagaaatggaatgtcttcagtcatggaagagcctccatttcatctcatgtccatttctagcctctttcaaaaagcacagtgcatcatgagcaacagaaaagcagtagaatcctaaaggacataacagttgttccgtaactagaagcattctttgattttaaatttgaagctgttcagtttgcagctggggatatgtgcatggttgggaacttatacacatagagccattaactacttaagcagctgcagtagacctgattttctgtttgcagtatagagattgatttcaagggagttacattatttgaaaagttatgactttcagcctttgaggttttaagaatcccttttcatggtctgatcttaagttgtttgaaaaaagattcacgcttctgcatccacctctgccctcattctgtcaattgtgtgtggactctgagaagcctgcttgataacttgtcttaagttctattaaggcagttagactgagatttctaatgacttcaccataaagattatacttctgcctggcgtcgtttctataaaacactataggacatttgttttcaaaagcagttgagtaacagcaacataaaccacattttttaaaaaaatgagcacttttcattcacttgaaagcttaagtgggaaaaaggaagatgattgtcaggggaaaaacttacaaaatgctacagtgtttacaaatgccagttccaggtgattagaaaggccgttttcattatggttcagatttggaatagcttatgcaaagattgtgttcatttttatacaattctttttaactttaaattgccatctgtgttttaaacataattctgcactttggaatcagttcattagaatgataacatttatatggataaagatgcagtattccttattctgtacttgatttattatacttaccaaagctgcaactgaataaatctggtgaggtgaggccttcaaaatgtattaatacgcctttgttatgttgttatgactgcttagaaatgtagccatgatgttgttctaaagatgtcttaacatttatagtgaggattgacagaaattaagcagtgttaagaataccagcatccatgttacagtctgcgtataagggactgaatgtgaggtaactcttatgaatcataataggcccagaaagccttaatattcatagttcataatccagtctcagattttgctcttcaatgttgcctgtaaacttagcaggtaaatgtattctagtataaaacatcattgaccaaatctcttcctttagtttttctgaggtagtgcatcccattaaaaaagtctcttcaattagatttggctttagtttagaaaggggtttggtaagtcatgtcttccatatgacatttctactcatccccacactgccttccacttaacctgtacagacagccccaacacatgcacatgtgtgtacacaactgtatatgcagcagccagtgggctaacaaatatcagcaaagaacttttttaaaaagaatttgtaataatccgtgctgtctagaaatgtgagttacttaccttattaggaaaccggcttataatactatatatgactctgcctgcattttatagttaagaaatgtacataaaaattgctatattttcacagtttcattataatgtctgtttagtaacccatgtccactgatactttaaatatgctaattactgagcaattgcaatagaaatccagattttcataagaaaatgaaatagaaggatactgcatctttaaaaaatagagtgaagatattttactgtattcgtaacatatgtgatagtggaaaaagtattttcaaactcacaaattttacagaggttgtaaatagtttgatgaagtatgttgggaaagagagcttctagttttcatcacaataaaaagaaaaaacttgttcagatatgccttgtatatcttacacacaatgagtgaaattgccatgggaactctgtccaactttgtcagagcatgctcttcgtgttctgttcaaaatagagtggccacttgtcatggtttagccaggatggtttaaaatataatgaagtcattttaagttgcagacaactgattccaaactagtaatgtcttttcctgaaaagggcaaaacagctgcacaggattttgcttgtactaaagaggagcatcttacaattgttctcttttctcagttatctccctcctcaacagagtgtgaacaaccatacaggtgtttattcttgttttattccagggagactgcttttaggtataactacatgttgacaagattaagtgctgtggatatggccacgtgttaaaggaatctatactcgcaataggaataagctaatgcccattttcagaaataaattaaatgctgaaagtgcctgtcagtaaaccttatgaccaatgagatattcctatacttttacacagcaataattcttaataagactgggttttttcctgcacatgtgaacacacacacacatacacacagagagagtaaatacatacacatagtaaatcaaatctgttcacatgcccacaaaaaacgcttttatagctttcaaatatacctaatcttgtttacattaacatttcttaatttgatctttctaacttgcagaacgttaagaacacaaatctgaacattaagtttatcttcagtgaacactattgcatatggtaattataatttccagataaaaagttgactgtcatttgccccaaacttatgaaacagtatgtatgattcaaaaagttttgctcagttaaaaacaccaatttatttggcgcaaaagactgaaggatatttgtttgcttgttcattttatccactcatatcaaacgcacaaattcatctttacatttcttcattcccctttcccctaatatttcctattatcatcttaagaatcattttggaatgaatattgacagaatcatttctccccaaaaagtctgttgaagtaccactgacacttagtaagcctagcctttaaccatctttgcagttagtcctaaaaattaccagatgcacattcagaagctcacaggttttttcctgtaattactgtactgctaaaagtggagtcatggatagaaatatacaatgagactatatgaatagacatgaaccctggaaattctccaaccctgccatctcagagcacaaattcacccaaacaagctactgaggctatcagtaaaattatactcatggagagtcacacatcgggtaagggcaattttaaaagtaggactgtgattaaacattcaggctttagacttccatgatggactcagaccacaggcctcaaaaaaacatccactgttttctcctcccaatgttagaaagaagaaaagggagacggaaatgtaccaggataagggggtaaaataaccaattaagtgtcaaaggaaagctgctgggttccttaatctcactgaagtcaagtcttctgactgggcttcttaccatgtgttgtctgaaaaaactaaagtaccttgaaaggttacacattcagcaaaccatgaagataatagctattctttattaaacactgtgtgccaagcaatagactaggcaatttttagatacgttacctgcaacctgtacaacatttctacactttatggatgggaaacggagacatgggaagtgtggctgagttgttcatggatgtagaaatagtaaacggcagagtaggaaagtgaaaccgcctatctctgacctggaggtctgcctgtatctttcccactccaccacactgcacgtgggtgtcccgaaaccaccttcccagattcctgactctcagtaattttattatggacaacatgcatgagtagtcatcatatttttcaagtgaaatatcgggacatgatataacacatgacttaacaatggtactgaatatttgaaatcaggcctttcccggaaaatcatgcatgaaggatcattataaacaaacaatagcaaccagttgtctccccgaacttgtcacttttctcataaatgtctggcctggagctccaaaatcatccaaatacttagtagcattttagcctgagtacactttctcagttcctcaactctttgtatacctttccaccaatatagacattctagaatctgcttcagatgcatttgaaattttcacccccatggaactagtgattaatatcagagcccactcttgcagttggtaatggggtggcaatcaaacgttcagatgatgataaaggagagataatggataattctttttcagagttctcacttaacagctctgttgtggaatgttttaaatagtcttataaataatttgtttatagtattgttgttagtttaattgaattttatgtaagaagctgtccaacatcagagaaatgaaattcctcccactttctgtgtagaacaaggtctctgacagtattgattcatggaagtactaatggacttagaaaacattaagagaatgtcatttctcatagtgtttctgtttctgaaaatgaatctcctgaattattatctttctccctgttacttggctggggaaagagatagaagctgtataaacaaattctcttccatgctcaaagcaagtgttccatgtgcacaacctgctgcagactggggcccttctcagttaattgggtttcacaagcaataatttctccacaacaaaaaccacaacttgaagtgagttgaaaagagatcaatagtggaaacagtcgcctcagtactttttctttctggatttcatctctagaaatttgaagtgtttgagacagagtccaccctttgtgcaaggcgagaaccaatgaatggactccttgtgtgaattattgcatcttcttccaaagcaggttcatcaagactttcacagagattcatttttgttgagaagtaagggttaataggaggatagaatttggatccaaatctagtgataaaagtgtccaagcaatcaaaaagtaagatattttagggacataccaacatcttccctttctgctaatttcatgctccaaagatatggcaaaaaaaaaaatcataaaaagtgcttttgccctacttgtgttctagttttcccatggcagaattttgtaattacatccagaatatagtgtatattttgttcctcaaactttattacattggatggatattgttgaactggggcactggtgcctatattcaaggctctttcctatcaacgtgtctgtccacgatttgttgtgtttaaagcttcattttgaaaaatcactgtccccctgtggggtagtgactgtattgttttgttcatgtctatgtgggacacattgcatcacatggcaaaccaactctctgtggatgtgagataagtacttataaaaccagcttgaaaacatcgtcttatgtattatgtcatcctgcatcataatgcaattatgtgtatcataacatgctcatttaaaaaaagagaaaccagcaaattcatgtttgtccatagaagaatgtactcagaactttgtgttgtgaaacgatgagaacagaccacctttaagatacccacctgccacttaaaatgacttagttataattagtagtagtctagacgttgttcttggtgtgtgggggtcaattctaacgtcatgttcttttgaataaatctctcagtcatatttgaaaaaaaaatacatgggaataaagaaaaatatcatctttggccaaatcaagcaggcatcttttttcttttccttgacgtttagctcattatacgtggtgattggatcacgagatctgtccgtgtgaaaatacagaaacatcctttagtttacaaaacagttattctaggcttgaagcctctgaacagcaaattgaatagatgggctgcatctgatttgctttatggatgtaattttacaaaacactcttgggtctctgaccccagggagttaagagtgcccagaggaggtcctacacattaaaggataaagccccccagtgatgctggcaagcaaatgtgttgagttcttaaatcttcatttggttttctgttcaggattttaattgcaaatgaatttatttctccagtttatctaaagacctaatttcccaatagtttcctctgcatttatatactctgtagtgtttaggcaaccctgttataagtttattaatattatgtaagtgttgttcttgtatttatgtatagtgtatgtattgtaaatatactcagagcttttttccttttactgtaaaatggtgatttttttgccctatgataatgtaaagggagaccctcctaatgagattctctcagaggatgattattccagtctattctcagagatttaaatgaacaagtgttattgtttttaatggtgtctcagacatattctgttggtgcattgcttttctgtattcaactttcctatgaattgagctgtgaactgaaatagagtttaaacctttaactgtatgcatttgtataattatctgaatgaaggcatgaaggttaaataaagcattttgtatggaacaaaa

SEQ ID NO: 147050 - DNA, 6825 bp, Homo sapiens
  Payload ID: 9086
  Gene Symbol: KLF13
  Gene Name: Kruppel-like factor 13
  Uniprot ID: Q9Y2Y9
  ENST ID: ENST00000307145
  CDS Start-End: 359-1225
cggcagctgtcccgcctgccacaatgcgcggcgaagctgcggccgcgacttggcgaggtggtccctaacgttgccgctcggcatccttagaaccggccgcccctgacgccgcgcggggaccccagtcgcccgcgcgccccatgcgctcactcttcggtgcccggccgggccggcgcctcgcagacgcggagccgcgcgggtgacggcacaggcggctgcgcgcccagcccagcccagcccagcccgaggagagggcgcgccgcgcccccgccccccgcccgctctcccgaggccgtgggtgcggatgcgcggctgacgactcgcagcaagagcaccgccgccggccccagcccgcagcatggcagccgccgcctatgtggaccacttcgccgccgagtgcctcgtgtccatgtcgagccgcgcggtcgtgcacgggccgcgggaggggccggagtcccggcccgagggcgcggccgtggccgccacccccacgctgccccgcgtcgaggagcgccgcgacggtaaggacagcgcctcgctcttcgtggtggcgcggatcctagcggacctcaaccagcaagcgccggcgcccgccccggcggagcgcagggagggcgccgcggcccggaaggcgaggaccccctgccgcctgccgccgcccgcccccgagcccacctcccccggcgccgaaggcgcggcggccgcgccccccagcccggcgtggagcgagccggagcccgaggcggggctggagcccgagcgggagccggggcccgcggggagcggcgagcccggcctcagacaaagggtccggcggggccgaagtcgcgccgacctcgagtccccgcagaggaagcacaagtgccactacgcgggctgcgagaaagtttacgggaaatcttcgcacctcaaggcgcacctgagaactcacacaggtgagaggcccttcgcctgcagctggcaggactgcaacaagaagttcgcgcgctccgacgagctggcgcggcactaccgcacacacacgggcgagaagaagttcagctgccccatctgcgagaagcgcttcatgcgcagcgaccacctgaccaagcacgcgcgccgccacgccaacttccacccgggaatgctgcagcggcgcggcgggggctcgcggaccggctccctcagcgactacagccgctccgacgccagcagccccaccatcagcccggccagctcgccctgagcccgccacagccatgagcagccgctcccaccccctcgtgagtccctggcctttccttttgtaataagaaagaagagagagaacttgatgcaaagtccacgaaaaaacaatttttttcacctcaggtgtcaaagtaaatttgttaaaaaaacaaaaaaaacacaaaaatttcaaaaaacaccacccaccaaattgcacaatagatacacccacaaagttgagattcagcgttgttgaaccccctttctcagggatggacacgtttcacgaggtcagtgaggacaccccttcctgccgccttactctgtacatagatttgcactctggagttttctgttaggttcgggaacacgctggggacagagcaggccagccagtctggtggagctcagcgtctggctggctggccagcctgtgggtctgttgggagcagatgtgctcactgacgtttgtgcctccagggcagattcctaagcagctggcctgacctcttcctgcccagcccccaacccagtctctggcctctgcccaacgagcctggctgggcttgcaacgcagctgattctgagacaggcccctgcagagggatgccttaaagctgtccctggctggaggagcactccaccttggggatagtggagggggccttcagccctctgcaccctgcctgcctcacaccccgccttcaggagccctctcctacggcgctagggagcactggaagcagagatgccagccctggctgagcgtagcactgcaccgtccgacctccgaggcaggggccggggtcacacctgccaggactccgcttctccgtgtcccagcagaaggcatgcaggaccctgtcactactatacctgggcctctgatggggaattctggtcttctaaaaagatgttagaaattcctggtggcacatccagttccgagtttgcccgcacgggcacttttgttggaaacagtgggcaggtcatggggcctcctcatcagagggtctgtgtgagcggctgtgcatgtggcagcgcaccatgcttcacagagaccattctgtagcaagagaccggaacattgtgacttggaccttttcaggagtggcgcggatgttacaggaaatgctgtcggagagcgcgcattctatttcctccgcagggaatgccagatagaaagttgcgggcaacacttttctcagacccaccatgtccccaactcagacttagcaaacctccagcctctccgtttcccctggactcctcctcccttttcctcctgcttctccttgtcctgcctggaggctccaggccacacccagctggtggggctgctccagtgccccatcaccggccttctcctggcaggagaggaggagcagagagctgggtcctgggctgggattcgagccctgggcgggggtcagtcaagccgtggtccagcaaactcctctgcagatggctggagtgttgacccaggcttgtggcccaggtatcaccttcccttcctcctgagagttgaggcctgtaaatacaagggcccaggacagagtgtgtgcgtgcgtgtgggtgtgtgcgcgcgtgagcacacacgcgtgtgttggggggggtggggggattggggtggactcagggtatcttgccagagatacctgttttgatgagtacctattttgatgcaaaggaacggccctgggacctcagagggccacagatgggcttcctgggcctagcgtgccttggttgtggccatcctgcttctactcagccctgccatgctatggggtgcagcacaaacccaggacccaggcctagccactgcccacagctgatggtcactgttttggctggctccagagtggacaggtacgctctgtccacagcagctgctcaggcacagtatgccgtcaggtgcccgcttcttaccactgtgtgtcagctgggattggccgacagcgtggtggtgacttctaggtagaccgatggaccctaaattgggcagtggcattgtttctgctgtggtgggaactggcagggagagggtcacctccactctggttggatgcggagctggtccctctggctgccatgctgtgttggggctctctgacctccctgcttgcattgggtctgggagagagagtggaatatttggtagggaccttgacagaagagagccctgggtgcttgtggtgcaaagatcttcatgcccagttccaaagtgaggtccctcccaaagttgttttcgtgtgaggcagagaaagccacactctgaatacattttatgtctcaggaattcacattccaggttcaggaattttattccaaagtcctttggtgcactcaccgtccaccgttccccaaggcagggagagggagtggcccgtccctgggaggctggcaaagtgctctccagggaggggtcagacgtccttgtgatctgcccagggtgtcacggaaggagattttctagctccacatctgtctgcacataggaaggaaaagataggactctaaacctagtcatcttggaataaaaagaagagctggtttgttttagagcagggcggggggtgggggagggaagcgggtgttggctgtttccaaagagagcacttaatttaatttttcctttaaatgacccagggctgttccgtctgatagatggaagggtaacattgccttaaaacagaaatatgcaggcgttggctatttttggcataagagcgtgtcttcattcccaaagtggttctcgtttaatggcagggtgcggtccttaggccccggcctggactgggaaatgggggtagggcaccaggagagaaatcctcctgggtactcctggccagaccctcctgaatcatctgcggcttaaactcatctcgcttgaagggcagggagaaacccatgaatctcaggcacggttcacaggggtcctcaagggcaggtttccatttcatcatgaagtgagggactcctgtggaagagggtggtgggccttggaacgctgcctccactgaggcgggcacacaaggcggaccctcctgaaacagcctccattttcttcaaacatgcagaatgttttcccagactgcgtctatttcagggtcttccatttttgtggtttatggccatgcttgccagttttggtggggttgaggaacccataggactcatagaaataatagtgaaaactcaaacccttattttgggacttcagttctcgtggtccataggggcagagatgtcaaagtgaaggttgcctgagtgaagggagagttcccctataaaaggcctaaaattgatctggggctcagccatcaaggggctggtgttgctcctgtcccagacaaggaagcccctctttacatcagccatattaggggaacggttgtcagctccccaaatgcctactggatcctacagccatacaggaaaacagacggacacagccctttccttaaagagccctggggtcctgtcctgcaggatgctgcataggaatgggcagagatgtcctggatgggaacatggtcctggaggtgccctacctgcatcctgctgcacccccacccacgacactcgagtgcaagatcgcctcactcctaaccctgactttattcccaggccccacaccgaggcaggtgcaggattcgccatggtgcagcctccgggtacaaacatctgaggcactggcgatcccagtccttgcagcaccctgaacacagctcagaccagtgaggggtgattcagaggtggggatgggcagagagggctggccactctgcctcaggacttgacctcaagtgttctgtctccccacccggtgtgtccagaagaccagcctctttcttgccagaagcaggtgctaagatggactgcacagggtcccggcactccctcgggacccattcaggatctcagctgggcaggggtgccacccaacaggaagatgtgatctgagcaatagtgtggccttgtttctccgcttctggttgtggctgtgtgtacagggctacctattttgacttctgacaggtgtcactgattttctttcccccatttaaaaaaggtcatttagtcaaagacacagtgctagaggtttaaagggtgtaatgtgttggtcacatcacaaccagtaagaaacgcttggtaggttatccacatcttttgctgactgtttccatatacaattctggtcaccatattttccaaagctaaaatctgaggcgtgggctgatggtttttgaaatcaggattaccccaggaagaaccaggtcctattactaattttcctgattctgaggctctgaaggcttgtctgagacacattccggagacctttgtaccagaacttggatgcatagtccaccttactactgatacacgcctgagcaccctttagggcgaggcgccgcctcctgcctgctgtcctgtccctcagcatcagaagagttgaattcagcaggagacgggagcccggtgtccatgagggaagaggggtcgcgcttggtttctactgacccccatgaagatttcagacttgcagtgcggccacctggccctgccctgcctctctctttctcatacagctttaaaactttactacttttatttaaaaatgaactggatgggagagaagtagcgtcccctaccctacaagtcacacattccggggaggggggtggggggtggaggcaggaagtcatgggggtgggggtgggagcacgggaacagctttcttaaggcctcagggtcctgttttccctggcctcttctagagggcccgtggacaggtcgcagtgcgtgcttatttggaaaccaggtgtgtgagccgaatgcctgccaggccatgcactcagcagaggagcccttgtacctggctgccctgagaggagcaagaggccacctcccatgtggctctagacaccacgtgggctcattagccccagcgtctgtgccggctccaggtgcctgcctctgggtgtgtgagtgggagactttgctccctggcctcatcctagagaggcccctggtgcctagtgctgaggcctctggggctggaaagcctcagcagaaaggaggcactactgagcaactatgcattgtcattgtcgggtttggggctttcggtggttccttggtgactgggaattgcttgtgtgcatgtgttgggtgcatgcttccgggtctcagctgccccaggcccgcacaggcaaccccttcccatccaaagccattggtggagcttctctggaatcatttgccaaaagcccaaggcagaatccaagggtccaagaccatttccatggagctcatgtttttcttttctgtaggaacttttttttaaccagcacccaccataattccgaaggccacgtttcatctttcctggatcactacagtgaagtattacagttgtacagttcccagtctggccttggcttgctcggataaaactttgtatgtattttgtatggcatagattctatattgtaatgatgtcctatgcaaaaagaaaaattaacgaaattgtaaattttattgttttaacgtgtatgcatgtttagtgacgtttacattttgaaataaaatttatgattcattatttta

SEQ ID NO: 147051 - DNA, 489 bp, Homo sapiens
  Payload ID: 9086
  Gene Symbol: KLF13
  Gene Name: Kruppel-like factor 13
  ENST ID: ENST00000560473
  CDS Start-End: 43-345
tctgcccacccatggattatcttgtaaagagtcacctgccccatggaggagccaggtgagaggcccttcgcctgcagctggcaggactgcaacaagaagttcgcgcgctccgacgagctggcgcggcactaccgcacacacacgggcgagaagaagttcagctgccccatctgcgagaagcgcttcatgcgcagcgaccacctgaccaagcacgcgcgccgccacgccaacttccacccgggaatgctgcagcggcgcggcgggggctcgcggaccggctccctcagcgactacagccgctccgacgccagcagccccaccatcagcccggccagctcgccctgagcccgccacagccatgagcagccgctcccaccccctcgtgagtccctggcctttccttttgtaataagaaagaagagagagaacttgatgcaaagtccacgaaaaaacaatttttttcacctcaggtgtcaaagtaaatttgtt

SEQ ID NO: 147052 - DNA, 574 bp, Homo sapiens
  Payload ID: 9086
  Gene Symbol: KLF13
  Gene Name: Kruppel-like factor 13
  ENST ID: ENST00000558844
  CDS Start-End: 533-574
cggccatgcagcctggtacccgaagagtcccccctctgcttggcacctgtaggacccccaaaccccagcatggcttagcccctctcccagctccccacagttcccccaaccctcctacagcctcccttcagggctccagggcacctagtgcccctccaggcttgaccccagcccccttcctctcaccaagtcttctcacaaggcctaaccccgccttgtcccacggcccccaccccatgcacaggcacaggcacacatagccagaacccctggggccctcccacctggggagctggagtgactctgagatccggcaggaaggctaggagctcctctgcaggagtctggaatctcctactggttctcttgtcattttggagctagagggagctcctgtcctggtgagaggcccttcgcctgcagctggcaggactgcaacaagaagttcgcgcgctccgacgagctggcgcggcactaccgcacacacacgggcgagaagaagttcagctgccccatctgcgagaagcgcttcatgcgcagcgaccacctgaccaagcacgcgcgccgccacgcc

SEQ ID NO: 147053 - DNA, 1051 bp, Homo sapiens
  Payload ID: 9086
  Gene Symbol: KLF13
  Gene Name: Kruppel-like factor 13
  ENST ID: ENST00000616962
  CDS Start-End: 47-907
ctgacgactcgcagcaagagcaccgccgccggccccagcccgcagcatggcagccgccgcctatgtggaccacttcgccgccgagtgcctcgtgtccatgtcgagccgcgcggtcgtgcacgggccgcgggaggggccggagtcccggcccgagggcgcggccgtggccgccacccccacgctgccccgcgtcgaggagcgccgcgacggtaaggacagcgcctcgctcttcgtggtggcgcggatcctagcggacctcaaccagcaagcgccggcgcccgccccggcggagcgcagggagggcgccgcggcccggaaggcgaggaccccctgccgcctgccgccgcccccgagcccacctcccccggcgccgaaggcgcggcgggcgccccccagcccggcgtggagcgagccggagcccgaggcggggctggagcccgagcgggagccggggcccgcggggagcggcgagcccggcctcagacaaagggtccggcggggccgaagtcgcgccgacctcgagtccccgcagaggaagcacaagtgccactacgcgggctgcgagaaagtttacgggaaatcttcgcacctcaaggcgcacctgagaactcacacaggtgagaggcccttcgcctgcagctggcaggactgcaacaagaagttcgcgcgctccgacgagctggcgcggcactaccgcacacacacgggcgagaagaagttcagctgccccatctgcgagaagcgcttcatgcgcagcgaccacctgaccaagcacgcgcgccgccacgccaacttccacccgggaatgctgcagcggcgcggcgggggctcgcggaccggctccctcagcgactacagccgctccgacgccagcagccccaccatcagcccggccagctcgccctgagcccgccacagccatgagcagccgctcccaccccctcgtgagtccctggcctttccttttgtaataagaaagaagagagagaacttgatgcaaagtccacgaaaaaacaatttttttcacctcaggtgtcaaagtaaatttgtt

SEQ ID NO: 147054 - DNA, 1051 bp, Homo sapiens; identical to SEQ ID NO: 147053
  Payload ID: 9086
  Gene Symbol: KLF13
  Gene Name: Kruppel-like factor 13
  ENST ID: ENST00000618680
  CDS Start-End: 47-907

SEQ ID NO: 147055 - DNA, 6803 bp, Homo sapiens
  Payload ID: 9086
  Gene Symbol: KLF13
  Gene Name: Kruppel-like factor 13
  Uniprot ID: Q9Y2Y9
  ENST ID: ENST00000621843
  CDS Start-End: 334-1200
gcgcggcgaagctgcggccgcgacttggcgaggtggtccctaacgttgccgctcggcatccttagaaccggccgcccctgacgccgcgcggggaccccagtcgcccgcgcgccccatgcgctcactcttcggtgcccggccgggccggcgcctcgcagacgcggagccgcgcgggtgacggcacaggcggctgcgcgcccagcccagcccagcccagcccgaggagagggcgcgccgcgcccccgccccccgcccgctctcccgaggccgtgggtgcggatgcgcggctgacgactcgcagcaagagcaccgccgccggccccagcccgcagcatggcagccgccgcctatgtggaccacttcgccgccgagtgcctcgtgtccatgtcgagccgcgcggtcgtgcacgggccgcgggaggggccggagtcccggcccgagggcgcggccgtggccgccacccccacgctgccccgcgtcgaggagcgccgcgacggtaaggacagcgcctcgctcttcgtggtggcgcggatcctagcggacctcaaccagcaagcgccggcgcccgccccggcggagcgcagggagggcgccgcggcccggaaggcgaggaccccctgccgcctgccgccgcccgcccccgagcccacctcccccggcgccgaaggcgcggcggccgcgccccccagcccggcgtggagcgagccggagcccgaggcggggctggagcccgagcgggagccggggcccgcggggagcggcgagcccggcctcagacaaagggtccggcggggccgaagtcgcgccgacctcgagtccccgcagaggaagcacaagtgccactacgcgggctgcgagaaagtttacgggaaatcttcgcacctcaaggcgcacctgagaactcacacaggtgagaggcccttcgcctgcagctggcaggactgcaacaagaagttcgcgcgctccgacgagctggcgcggcactaccgcacacacacgggcgagaagaagttcagctgccccatctgcgagaagcgcttcatgcgcagcgaccacctgaccaagcacgcgcgccgccacgccaacttccacccgggaatgctgcagcggcgcggcgggggctcgcggaccggctccctcagcgactacagccgctccgacgccagcagccccaccatcagcccggccagctcgccctgagcccgccacagccatgagcagccgctcccaccccctcgtgagtccctggcctttccttttgtaataagaaagaagagagagaacttgatgcaaagtccacgaaaaaacaatttttttcacctcaggtgtcaaagtaaatttgttaaaaaaacaaaaaaaacacaaaaatttcaaaaaacaccacccaccaaattgcacaatagatacacccacaaagttgagattcagcgttgttgaaccccctttctcagggatggacacgtttcacgaggtcagtgaggacaccccttcctgccgccttactctgtacatagatttgcactctggagttttctgttaggttcgggaacacgctggggacagagcaggccagccagtctggtggagctcagcgtctggctggctggccagcctgtgggtctgttgggagcagatgtgctcactgacgtttgtgcctccagggcagattcctaagcagctggcctgacctcttcctgcccagcccccaacccagtctctggcctctgcccaacgagcctggctgggcttgcaacgcagctgattctgagacaggcccctgcagagggatgccttaaagctgtccctggctggaggagcactccaccttggggatagtggagggggccttcagccctctgcaccctgcctgcctcacaccccgccttcaggagccctctcctacggcgctagggagcactggaagcagagatgccagccctggctgagcgtagcactgcaccgtccgacctccgaggcaggggccggggtcacacctgccaggactccgcttctccgtgtcccagcagaaggcatgcaggaccctgtcactactatacctgggcctctgatggggaattctggtcttctaaaaagatgttagaaattcctggtggcacatccagttccgagtttgcccgcatgggcacttttgttggaaacagtgggcaggtcatggggcctcctcatcagagggtctgtgtgagcggctgtgcatgtggcagcgcaccatgcttcacagagaccattctgtagcaagagaccggaacattgtgacttggaccttttcaggagtggcgcggatgttacaggaaatgctgtcggagagcgcgcattctatttcctccgcagggaatgccagatagaaagttgcgggcaacacttttctcagacccaccatgtccccaactcagacttagcaaacctccagcctctccgtttcccctggactcctcctcccttttcctcctgcttctccttgtcctgcctggaggctccaggccacacccagctggtggggctgctccagtgccccatcaccggccttctcctggcaggagaggaggagcagagagctgggtcctgggctgggattcgagccctgggcgggggtcagtcaagccgtggtccagcaaactcctctgcagatggctggagtgttgacccaggcttgtggcccaggtatcaccttcccttcctcctgagagttgaggcctgtaaatacaagggcccaggacagagtgtgtgcgtgcgtgtgggtgtgtgcgcgcgtgagcacacacgcgtgtgttggggggggtggggggattggggtggactcagggtatcttgccagagatacctgttttgatgagtacctattttgatgcaaaggaacggccctgggacctcagagggccacagatgggcttcctgggcctagcgtgccttggttgtggccatcctgcttctactcagccctgccatgctatggggtgcagcacaaacccaggacccaggcctagccactgcccacagctgatggtcactgttttggctggctccagagtggacaggtacgctctgtccacagcagctgctcaggcacagtatgccgtcaggtgcccgcttcttaccactgtgtgtcagctgggattggccgacagcgtggtggtgacttctaggtagaccgatggaccctaaattgggcagtggcattgtttctgctgtggtgggaactggcagggagagggtcacctccactctggttggatgcggagctggtccctctggctgccatgctgtgttggggctctctgacctccctgcttgcattgggtctgggagagagagtggaatatttggtagggaccttgacagaagagagccctgggtgcttgtggtgcaaagatcttcatgcccagttccaaagtgaggtccctcccaaagttgttttcgtgtgaggcagagaaagccacactctgaatacattttatgtctcaggaattcacattccaggttcaggaattttattccaaagtcctttggtgcactcaccgtccaccgttccccaaggcagggagagggagtggcccgtccctgggaggctggcaaagtgctctccagggaggggtcagacgtccttgtgatctgcccagggtgtcacggaaggagattttctagctccacatctgtctgcacataggaaggaaaagataggactctaaacctagtcatcttggaataaaaagaagagctggtttgttttagagcagggcggggggtgggggagggaagcgggtgttggctgtttccaaagagagcacttaatttaatttttcctttaaatgacccagggctgttccgtctgatagatggaagggtaacattgccttaaaacagaaatatgcaggcgttggctatttttggcataagagcgtgtcttcattcccaaagtggttctcgtttaatggcagggtgcggtccttaggccccggcctggactgggaaatgggggtagggcaccaggagagaaatcctcctgggtactcctggccagaccctcctgaatcatctgcggcttaaactcatctcgcttgaagggcagggagaaacccatgaatctcaggcacggttcacaggggtcctcaagggcaggtttccatttcatcatgaagtgagggactcctgtggaagagggtggtgggccttggaacgctgcctccactgaggcgggcacacaaggcggaccctcctgaaacagcctccattttcttcaaacatgcagaatgttttcccagactgcgtctatttcagggtcttccatttttgtggtttatggccatgcttgccagttttggtggggttgaggaacccataggactcatagaaataatagtgaaaactcaaacccttattttgggacttcagttctcgtggtccataggggcagagatgtcaaagtgaaggttgcctgagtgaagggagagttcccctataaaaggcctaaaattgatttggggctcagccatcaaggggctggtgttgctcctgtcccagacaaggaagcccctctttacatcagccatattaggggaacggttgtcagctccccaaatgcctactggatcctacagccatacaggaaaacagacggacacagccctttccttaaagagccctggggtcctgtcctgcaggatgctgcataggaatgggcagagatgtcctggatgggaacatggtcctggaggtgccctacctgcatcctgctgcacccccacccacgacactcgagtgcaagatcgcctcactcctaaccctgactttattcccaggccccacaccgaggcaggtgcaggattcgccatggtgcagcctccgggtacaaacatctgaggcactggcgatcccagtccttgcagcaccctgaacacagctcagaccagtgaggggtgattcagaggtggggatgggcagagagggctggccactctgcctcaggacttgacctcaagtgttctgtctccccacccggtgtgtccagaagaccagcctctttcttgccagaagcaggtgctaagatggactgcacagggtcccggcactccctcgggacccattcaggatctcagctgggcaggggtgccacccaacaggaagatgtgatctgagcaatagtgtggccttgtttctccgcttctggttgtggctgtgtgtacagggctacctgactattttgacttctgacaggtgtcactgattttctttcccccatttaaaaaaggtcatttagtcaaagacacagtgctagaggtttaaagggtgtaatgtgttggtcacatcacaaccagtaagaaacgcttggtaggttatccacatcttttgctgactgtttccatatacaattctggtcaccatattttccaaaactaaaatctgaggcgtgggctgatggtttttgaaatcaggattaccccaggaagaaccaggtcctattactaattttcctgattctgaggctctgaaggcttgtctgagacacattccggagacctttgtaccagaacttggatgcatagtccaccttactactgatacacgcctgagcaccctttagggcgaggcgccgcctcctgcctgctgtcctgtccctcagcatcagaagagttgaattcagcaggagacgggagcccggtgtccatgagggaagaggggtcgcgcttggtttctactgacccccatgaagatttcagacttgcagtgcggccacctggccctgccctgcctctctctttctcatacagctttaaaactttactacttttatttaaaaatgaactggatgggagagaagtagcgtcccctaccctacaagtcacacattccggggaggggggtggggggtggaggcaggaagtcatgggggtgggggtgggagcacgggaacagctttcttaaggcctcagggtcctgttttccctggcctcttctagagggcccgtggacaggtcgcagtgcgtgcttatttggaaaccaggtgtgtgagccgaatgcctgccaggccatgcactcagcagaggagcccttgtacctggctgccctgagaggagcaagaggccacctcccatgtggctctagacaccacgtgggctcattagccccagcgtctgtgccggctccaggtgcctgcctctgggtgtgtgagtgggagactttgctccctggcctcatcctagagaggcccctggtgcctagtgctgaggcctctggggctggaaagcctcagcagaaaggaggcactactgagcaactatgcattgtcattgtcgggtttggggctttcggtggttccttggtgactgggaattgcttgtgtgcatgtgttgggtgcatgcttccgggtctcagctgccccaggcccgcacaggcaaccccttcccatccaaagccattggtggagcttctctggaatcatttgccaaaagcccaaggcagaatccaagggtccaagaccatttccatggagctcatgtttttcttttctgtaggaacttttttttaaccagcacccaccataattccgaaggccacgtttcatctttcctggatcactacagtgaagtattacagttgtacagttcccagtctggccttggcttgctcggataaaactttgtatgtattttgtatggcatagattctatattgtaatgatgtcctatgcaaaaagaaaaattaacgaaattgtaaattttattgttttaacgtgtatgcatgtttagtgacgtttacattttgaaataaaatttatgattcattatttt

SEQ ID NO: 147056 - DNA, 2827 bp, Homo sapiens
  Payload ID: 9087
  Gene Symbol: KLF14
  Gene Name: Kruppel-like factor 14
  ENST ID: ENST00000583337
  CDS Start-End: 29-1000
cgctcgccggcggccgggcggtcccagcatgtcggccgccgtggcgtgcctggactacttcgccgccgagtgcctggtgtccatgtccgcgggcgccgtggttcaccgccgcccgccggaccccgagggcgcgggtggagccgctggctcggaggtgggtgcggcgccgccggagtccgctctgccgggtccggggccaccggggcccgcgtcggtcccccagctcccgcaggtccccgcccccagccccggcgcgggcggcgccgcgccccacctgctggctgcaagcgtctgggcggacttgcgcggcagctctggcgagggctcctgggagaactcgggggaagctccacgcgcctcgtccggcttctccgacccgatcccgtgctccgtccagaccccgtgctccgagctggctcccgcctccggcgccgcggcggtctgcgctcccgagagctcctccgatgcgcccgccgtcccaagcgcgcctgctgccccgggcgcaccagcagcctctggtgggttctctggaggggccctaggggcaggccccgcccccgccgcggatcaggcgccccggaggaggtctgtcacacctgctgccaagcgccaccaatgccccttcccgggctgcaccaaagcctattacaagtcgtcgcacctcaagtcccaccagcgcacccacacgggtgagcgccctttctcctgcgactggctcgactgcgacaagaagtttacgcgttccgacgagctggcccgccactacaggacgcacacgggcgagaagcgcttctcctgccccctctgccccaagcagttctcccggagcgaccacctgaccaagcatgctcgccgccacccaacctatcatccagatatgatcgagtaccggggacgtcgtcgaactccccgcatcgacccgccactcaccagcgaggtggaaagctccgcctccggctccggtcccggcccggcgcccagcttcaccacctgcctgtaggacagtcattgctgtcagtcttaccctcaaggatgatcccccaggccgttgtccctgctttctctctgcccatccttctttcccagagtcattacaccaaggcacagactggttcctctgctctgagggtgggtccaggcagacatgtggactctggggaggtactgggggccggaaaatagcgggaattcttgcaacgtgtatatcatcctaaaagtgggggttgcctcaagacagcccccaggaactgataagaagggatgaactcccgtactctccagagtactgaagattctcccctccctggaaccagggatgtgaaactggaattctcagatgcctgaggagctcccagtctcaaaggactctggtgtctcacccatccaccagggcggaccttggagagggtgtcaggggtggcagtcttggaaatgtccaggactgggatggtgagaggcctttggaaacagaaatgatttctatttctgtaaacagcaatgtttactaatttatttttagcatcttttaaatagggatcccaggttgatgggaggcttatgccctccaatcccccaattgccccagctacctctgctaggagaggccacataagctccatgtagatgtgtggctgggagatacttcttgatgtctggggtgtgagtctgtttgcaggtcctgttgcatgatttggaaccctgcgcttgcgtcgtagcccttctccccatttggattcctacttgaggatggtaacttcctggctcactctcacgctgagattggttaaacaatttgaaaactaccgtaaaggcaccagcaagaaaagggtggtccagactagttcccccttcactcagagagaaaactcaagcgaccttaagtttgggcggggcccgaaacaagaccgctcataaccattgataactttcagggaaatagaggcgtgtggacacagctgccccaccttatgtaatctcaggagtggtagattctgttaatttcctaatggctaactagggggttatttccctcagagtctgcagattttcgtttctgaaacaggtgagttggtgggtgggagagggaagggtaacagactggtttcttccaaggagctggctgccttggatttgaggaaggagtagcaaggtgatagctattatgaaataggaggaactttctcctctgaccatatagtccctccaagttatatcctcagggcccctttcccgataagaaggaatcagacatcaacagtatttgttttttctatatgtgtctctgctgctgtggatgaaatcactgaccactctgcttgtgtatgtatgaatgtgtatatatgtgaccctttctttagagatgaggctgaaaggcatttcctgccctgggagatcccctctggccccctcctgaatattttgcaatagtccatcactgacacttggggaagatgctgtaatctcataggaccctaacgggcatctggttaaacaaattgctttcccctattttgcagatgaggatactgaagactagataagctcaaagtcatatgctaggttgctgggaagagccatgactagaacttaggtgtctggcctgctaagtgactctttccctcacacttgattacccccatctcttcctcctctctgggatcttagtccctccctcgctccctattctgtattgcttctgtgtaccttcacatgttgattgaaccctttgcctattgtgtttgacccaaaagcccttttcttaactggttacgttccctcccttcacaccatgtggacataaagtgagaatgactttttggcatcctag

SEQ ID NO: 147057 - DNA, 2574 bp, Homo sapiens
  Payload ID: 9088
  Gene Symbol: KLF15
  Gene Name: Kruppel-like factor 15
  Uniprot ID: Q9UIH9
  ENST ID: ENST00000296233
  CDS Start-End: 232-1482
ggggagtgagtgcccagcgagctgcgggcgggctagtgctccgccgcagcgacccgcgggccggcgggcgatcgagccagcgcaggacccgcggctcggcccccggccgccgccggaccgagagtctagccgccgcccccagcccagcccgcccggccgcaggaccgccggggcctggccgccggtccggcgtgcgccaagttcagccgccaccggcacggccaggccagcatggtggaccacttacttccagtggacgagaacttctcgtcgccaaaatgcccagttgggtatctgggtgataggctggttggccggcgggcatatcacatgctgccctcacccgtctctgaagatgacagcgatgcctccagcccctgctcctgttccagtcccgactctcaagccctctgctcctgctatggtggaggcctgggcaccgagagccaggacagcatcttggacttcctattgtcccaggccacgctgggcagtggcgggggcagcggcagtagcattggggccagcagtggccccgtggcctgggggccctggcgaagggcagcggcccctgtgaagggggagcatttctgcttgcccgagtttcctttgggtgatcctgatgacgtcccacggcccttccagcctaccctggaggagattgaagagtttctggaggagaacatggagcctggagtcaaggaggtccctgagggcaacagcaaggacttggatgcctgcagccagctctcagctgggccacacaagagccacctccatcctgggtccagcgggagagagcgctgttcccctccaccaggtggtgccagtgcaggaggtgcccagggcccaggtgggggccccacgcctgatggccccatcccagtgttgctgcagatccagcccgtgcctgtgaagcaggaatcgggcacagggcctgcctcccctgggcaagccccagagaatgtcaaggttgcccagctcctggtcaacatccaggggcagaccttcgcactcgtgccccaggtggtaccctcctccaacttgaacctgccctccaagtttgtgcgcattgcccctgtgcccattgccgccaagcctgttggatcgggacccctggggcctggccctgccggtctcctcatgggccagaagttccccaagaacccagccgcagaactcatcaaaatgcacaaatgtactttccctggctgcagcaagatgtacaccaaaagcagccacctcaaggcccacctgcgccggcacacgggtgagaagcccttcgcctgcacctggccaggctgcggctggaggttctcgcgctctgacgagctgtcgcggcacaggcgctcgcactcaggtgtgaagccgtaccagtgtcctgtgtgcgagaagaagttcgcgcggagcgaccacctctccaagcacatcaaggtgcaccgcttcccgcggagcagccgctccgtgcgctccgtgaactgaaagcgccctgaaccccagcctgtccgtcaccccggatccccaccccatccccatttttttaagcaataatttatttgcctcctccagagggacatggcaatgttaccagcccaccttctgaagcctgggaggtgtgaacccagggcccgccaaccgctgcctttctcgggagtacttagagcctcgaacccgcgtccctgggggctgggccccaggcgcacggggctggaggcaggccttcgtgccttcgtgccttcgtgccttcccgcggtggccaggcctctgctgcagccgctggttgcaggcagagttttggggacctggcccttctcccactgggctcccccatcctgggccaaggccagaactttagtgctaggggaagatgaaatgtgcagttttgaaatgttgggtttccagagagagtcatgctggaggagaaggaagtaggccagaagtccagggctgcactgtggtgtgagggtggctttgtctaagatgcctgctcagcatgatcaccagagggtgtgggcaggtccctggagccgggggggggggggggggggggggggggcaggaccgggccgctgggccctcatgtgggagagaggtgaaaagcgtcccccactagggggctggcagtgcatgtgcttgagttaaatgtgcagggcagacagagccagaagggcctgtacccaggggctcgtcccctcctccggtttcccagacaaatccagacaccagcctttagggtggccttgggaggagagggccaggctgtcctgggtgtgagagaactagatagagcctcccaaccctgatttagaaatgcattccttattttgtctagaaattaataaatgaactagcttgttttgacaggtttatttcacatcctatgaatgtatgtaaataaactgtacataggtccatccacataaaatatcttttaataacatatcaacatttgtgtaaatttgaaatttaaaaaaatctatgaagctggtgtacatatgttacaattacgtatattttctttggtccttcataaaaatatatttactttgccaataaaaagaaaaagaactcaca

SEQ ID NO: 147058 - DNA, 2890 bp, Homo sapiens
  Payload ID: 9089
  Gene Symbol: KLF16
  Gene Name: Kruppel-like factor 16
  Uniprot ID: Q9BXK1
  ENST ID: ENST00000250916
  CDS Start-End: 72-830
cgccgccggccggacggacgccgctcccgccgcctccgctccgcccgccgcgccgcgcgcccttgctcggcatgtcggcggccgtggcgtgcgtggattacttcgccgccgacgtgctcatggccatctcttcgggcgccgtggtgcaccgcgggcggcccggccccgagggcgcgggccccgccgccggcctggatgtgcgcgcggcgcgccgcgaggccgcctcacccgggaccccggggccacccccgccgccccccgccgcttctggcccgggccccggcgccgccgcggcgccccacctgctggccgccagcatcctggccgacctgcgcggcggacccggagccgccccggggggcgcctcgcccgcctcctcctcctcagccgcctcgtccccgtcctcgggccgcgcccccggcgccgcgccctccgccgccgccaagagccaccgctgtcccttcccggactgcgccaaagcctactacaagtcctcgcacctaaagtcgcacctgcggacgcacacaggggaacgcccttttgcttgtgactggcagggctgcgacaagaagttcgcccgctccgacgagctggcccgccaccaccggacgcacacgggcgagaagcgcttctcctgccctctgtgctccaagcgcttcacccgcagtgaccacctggccaagcacgcccgccgccaccccggcttccacccggacctgctccggcgccctggtgcccgcagtacctcccccagcgactcgctgccctgcagcctggccgggagccctgcgcccagccccgcgcccagcccagcccccgcaggcctgtagggccctcgtgcagcccaccctgaccgccaggatgcttctgccatccaggggtgtagtgaggacccacggggagcctgggccccttccagccgtgggcaaaccctgaagacacccctgcccccctccagagagtgaggagggggcctgagactggacctgggtctgcctgacctcagaggtggctctcaggatgggtgacgggggcttgtgtctgtaaatagccatgatactaactttcttcccatctgtgcaacggggcccccccagggcagctaggaggtcctcccctctcctctccaccaccccctgctgcccccctcccggggtggggtttgggggggtggagtggacttctgggagccggcccggggaaagcaccccctgccccatccctgcagattgggatgaagtgttcagacagccatagaggagtcgggggttgacacggcccctgcctctccccaccccacccccaccccaccgaaagccatgggagtagttcagggaaatgggggtgcagcccagccaccccccattcgggtactcaatctcaggtgtccacaagttctgcccacggtaggggctgcctggccccccagacctcgggggtagagccaggagtggggcagcgttaggatgcccggaggggctccaggtgttgcttctgagacctgggatggggagggaggggacctctgggttcttccaaagaacatttgactcagtggggtcgggagggaatcctggcttatttattttcctctgtcctcgggtgtgggggccctagctcgccctctctgggtgggtgggtgagagaggctgcaggggaggctggcaccgggcttgggcctccagtccctgccttgctgactttggccgttgcggtatcacgtgacaatcaactctcccttaacgacgactgcggctgttgggctgcgctgccctccctggcctgcaggtggggccgtggagcccatgcccgccggggttgcaggctcttccgggcctgggctgcagcctggcccggccctgcttccctggcctcccctccttctcctgggtgcttggaagaggtgggtcctggcccgtggttgaggtcttgcctcgtggactggaagcagagggctggctgtgcagcctcctggggtagctcgttttttttgcaccgggtagaatattttttcaggcacggattcctttttttctgggcccccatgggtggtccggcatcctcagggggtgtgagtgtgtgtggggggtctctgagctgaacttgggtggggtggggacttgttcctcgggggccacctttgtgtccttgtcagcggtcgtcctgctgtggcctgggttgcatttcctcttggggggggtattgaggacccccagcctggaatgagaagggtccccggttccatgtcagacccagaaaggtggatccccccactgttggctgcaggaggtttttggtacccccttttgttccagaaccgtcctgcctctcgcttggggacaggggggctttggatggcactggtgtgcacctggacccagccccggcctggcaggatccagggatgggtgcctgggatcctggggggagggaggcaggggacgcccttctggagctgggctcggagggtcctgccccatccagccctcggctctctgtgttctctgtccctagcctcaaaccctcttctggcagcgctagtgagatgccttagtctgtgggggtgggtgggggactggggccccgttttcctttgtgagtcttggttggccccagccctggcaggggcctgtctggagcaggggtaggtagggctgtgggttccagaactctataactgggcccctctccagtgtccaggggcttggagagacctgcgcccacccctccactctcccaggagtcgctgatcactgggacctggttccagccgtttgcaggggaggcggctccgagaggcgtgtgctttccgtgggtggcgcccctcccccgccctgcctggcctcatccttgtatttaattaattaaacaagcccctttttaaacccta

SEQ ID NO: 147059 - DNA, 1134 bp, Homo sapiens
  Payload ID: 9089
  Gene Symbol: KLF16
  Gene Name: Kruppel-like factor 16
  Uniprot ID: Q9BXK1
  ENST ID: ENST00000541015
  CDS Start-End: 1-759
atgtcggcggccgtggcgtgcgtggattacttcgccgccgacgtgctcatggccatctcttcgggcgccgtggtgcaccgcgggcggcccggccccgagggcgcgggccccgccgccggcctggatgtgcgcgcggcgcgccgcgaggccgcctcacccgggaccccggggccacccccgccgccccccgccgcttctggcccgggccccggcgccgccgcggcgccccacctgctggccgccagcatcctggccgacctgcgcggcggacccggagccgccccggggggcgcctcgcccgcctcctcctcctcagccgcctcgtccccgtcctcgggccgcgcccccggcgccgcgccctccgccgccgccaagagccaccgctgtcccttcccggactgcgccaaagcctactacaagtcctcgcacctaaagtcgcacctgcggacgcacacaggggaacgcccttttgcttgtgactggcagggctgcgacaagaagttcgcccgctccgacgagctggcccgccaccaccggacgcacacgggcgagaagcgcttctcctgccctctgtgctccaagcgcttcacccgcagtgaccacctggccaagcacgcccgccgccaccccggcttccacccggacctgctccggcgccctggtgcccgcagtacctcccccagcgactcgctgccctgcagcctggccgggagccctgcgcccagccccgcgcccagcccagcccccgcaggcctgtagggccctcgtgcagcccaccctgaccgccaggatgcttctgccatccaggggtgtagtgaggacccacggggagcctgggccccttccagccgtgggcaaaccctgaagacacccctgcccccctccagagagtgaggagggggcctgagactggacctgggtctgcctgacctcagagtgtccaggggcttggagagacctgcgcccacccctccactctcccaggagtcgctgatcactgggacctggttccagccgtttgcaggggaggcggctccgagaggcgtgtgctttccgtgggtggcgcccctcccccgccctgcctggcctcatccttgtatttaattaattaaacaagcccctttttaaacccta

SEQ ID NO: 147060 - DNA, 508 bp, Homo sapiens
  Payload ID: 9089
  Gene Symbol: KLF16
  Gene Name: Kruppel-like factor 16
  ENST ID: ENST00000592313
  CDS Start-End: 20-367
gcggtcgggcggcgagcggatggccgccccggcggcagtggcgggggctccgggggcccagcgaggggaacgcccttttgcttgtgactggcagggctgcgacaagaagttcgcccgctccgacgagctggcccgccaccaccggacgcacacgggcgagaagcgcttctcctgccctctgtgctccaagcgcttcacccgcagtgaccacctggccaagcacgcccgccgccaccccggcttccacccggacctgctccggcgccctggtgcccgcagtacctcccccagcgactcgctgccctgcagcctggccgggagccctgcgcccagccccgcgcccagcccagcccccgcaggcctgtagggccctcgtgcagcccaccctgaccgccaggatgcttctgccatccaggggtgtagtgaggacccacggggagcctgggccccttccagccgtgggcaaaccctgaagacacccctgcccccctccagagagtgaggaggg

SEQ ID NO: 147061 - DNA, 1133 bp, Homo sapiens
  Payload ID: 9089
  Gene Symbol: KLF16
  Gene Name: Kruppel-like factor 16
  Uniprot ID: Q9BXK1
  ENST ID: ENST00000617223
  CDS Start-End: 1-759
atgtcggcggccgtggcgtgcgtggattacttcgccgccgacgtgctcatggccatctcttcgggcgccgtggtgcaccgcgggcggcccggccccgagggcgcgggccccgccgccggcctggatgtgcgcgcggcgcgccgcgaggccgcctcacccgggaccccggggccacccccgccgccccccgccgcttctggcccgggccccggcgccgccgcggcgccccacctgctggccgccagcatcctggccgacctgcgcggcggacccggagccgccccggggggcgcctcgcccgcctcctcctcctcagccgcctcgtccccgtcctcgggccgcgcccccggcgccgcgccctccgccgccgccaagagccaccgctgtcccttcccggactgcgccaaagcctactacaagtcctcgcacctaaagtcgcacctgcggacgcacacaggggaacgcccttttgcttgtgactggcagggctgcgacaagaagttcgcccgctccgacgagctggcccgccaccaccggacgcacacgggcgagaagcgcttctcctgccctctgtgctccaagcgcttcacccgcagtgaccacctggccaagcacgcccgccgccaccccggcttccacccggacctgctccggcgccctggtgcccgcagtacctcccccagcgactcgctgccctgcagcctggccgggagccctgcgcccagccccgcgcccagcccagcccccgcaggcctgtagggccctcgtgcagcccaccctgaccgccaggatgcttctgccatccaggggtgtagtgaggacccacggggagcctgggccccttccagccgtgggcaaaccctgaagacacccctgcccccctccagagagtgaggagggggcctgagactggacctgggtctgcctgacctcagagtgtccaggggcttggagagacctgcgcccacccctccactctcccaggagtcgctgatcactgggacctggttccagccgtttgcaggggaggcggctccgagaggcgtgtgctttccgtgggtggcgcccctcccccgccctgcctggcctcatccttgtatttaattaattaaacaagcccctttttaaaccct

SEQ ID NO: 147062 - DNA, 3131 bp, Homo sapiens
  Payload ID: 9090
  Gene Symbol: KLF17
  Gene Name: Kruppel-like factor 17
  Uniprot ID: Q5JT82
  ENST ID: ENST00000372299
  CDS Start-End: 59-1228
gccgtggtggctggttccctgtctcttcagtagagagtctagaccccacccagtcttcatgtacggccgaccgcaggctgagatggaacaggaggctggggagctgagccggtggcaggcggcgcaccaggctgcccaggataacgagaactcagcgcccatcttgaacatgtcttcatcttctggaagctctggagtgcacacctcttggaaccaaggcctaccaagcattcagcactttcctcacagcgcagagatgctggggtcccctttggtgtctgttgaggcgccggggcagaatgtgaatgaaggggggccacagttcagtatgccactgcctgagcgtggtatgagctactgcccccaagcgactctcactccttcccggatgatttactgtcagagaatgtctccccctcagcaagagatgacgattttcagtgggccccaactaatgcccgtaggagagcccaatattccaagggtagccaggcccttcggtgggaatctaaggatgccccccaatgggctgccagtctcggcttccactggaatcccaataatgtcccacactgggaaccctccagtgccttaccctggcctctcgacagtaccttctgacgaaacattgttgggcccgactgtgccttccactgaggcccaggcagtgctcccctccatggctcagatgttgcccccgcaagatgcccatgaccttgggatgcccccagctgagtcccagtcattgctggttttaggatctcaggactctcttgtcagtcagccagactctcaagaaggcccatttctaccagagcagcccggacctgctccacagacagtagagaagaactccaggcctcaggaagggactggtagaaggggctcctcagaggcaaggccttactgctgcaactacgagaactgcggaaaagcttataccaaacgctcccacctcgtgagccaccagcgcaagcacacaggtgagaggccatattcttgcaactgggaaagttgttcatggtctttcttccgttctgatgagcttagacgacatatgcgggtacacaccagatatcgaccatataaatgtgatcagtgcagccgggagttcatgaggtctgaccatctcaagcaacaccagaagactcatcggccgggaccctcagacccacaggccaacaacaacaatggagagcaggacagtcctcctgctgctggtccttaggtgaatgaagaaggaagaggattccaggctgagagcactggacgtggcaactgttcagaggagaggcagtcttcaagttctacattcattcagaaaaatgttttttgagcctacaatactgagcgcaacaaggctgtggagacccatggtgaggagcatggagttaactaaaggatgtgtcagggaagaaagacttctcaaggaggtgcctccatcagacccaaaggactcatgggggctagctgcacctcacatttcttggacatataccgttggacatgtctatcttctggaaactatggcatggacagtaaggattcagaagtgcatgaaggcaccctgcctctgcagagcagaaagatcatagacaacatttatgaatgtgcccagtgctgccaagaagagaagccggtcctctgcaggctcaagcctatctgggcctctggggaagccccacagccttggctgtgcctgcccctgccctctcacccctaccctgaccttgtcctacttcactgcctttgtctgtgttactagtggccccagtatacctgggatggacatccaggtgcccttcatccaagctcctatgtgaggggaatggacattattaaaagaacaggggcagaagtggctcatttatgacccattcactagccccagggattgaagtcttgggtactcaaagtgtctttctaccagggcaccagatcccttccatggagcaggtcatctcgggttcactgggccagggatggtctctgttccccagcccacctggctcacacacagcctcatgggtagggtcagcaaaccagatggcttgttgttggaatgtaggatgagaggcctgcttggtgacctagcattttcaccaagaagtggacgtggagaggaccagagtgatcaagggtgtatgatgtgcactacaatggtgggcaaaacaggctcctgctcttgtggaggtcacaatctagcggagaaaggatgttactagaagtacacaaattgggcccggcgcgatggctcacgcctgtaatcccagcacttttggaggccgaggcaggcggatcatttgaggttagagattcgagaccagccgggccaacatggtgaaaccccatctctacaaaaaatacaaaaattagcctggcatatggcgggtaccgtaatcctagctactcgggagactgacgggagaatcgcttgaacccaggaggcggaggttgcagtgagctcagatctcaccattgcactccagcctgggcgactgagcgagactctatctcaaaacaatcaaaacaaaaaagacctgtggactctagtagattttgaatcctgcctctgccatttcctggctatgaggtgtcttgagaaatttacttgtcactcttgcttctgatagtaaaggggatggtgcgatagattcaagatggagagataaggttaagtgttttctttggctgcaacatggagattagattagagcaaggatgtaagggagaggaagggacatagcagtatttcaggtgagagtcaaggtggctttggctagggtgtgagagtggaggtagggagaagtaggaaagtgatagttaactggatttgttaggtgagggtgaggccaagggtgacttccaggttcctgacttgtgttataagtaacacagaagaagaatggatgaacttgattcgttttccattgattgtgatatctatcatacctgcaaaaaatattttgtatatatccaatttaataataaatgcactcatgttaggaaggtcaaaaaaaaggaaaaaagaaaaataataaaaaataataaaaatccttaggataacttgaggccaggagtttgagaccagtgtgaccttgtctctgtaaaaaataaaattaaaagaaaaa

SEQ ID NO: 147063 - DNA, 695 bp, Homo sapiens
  Payload ID: 9090
  Gene Symbol: KLF17
  Gene Name: Kruppel-like factor 17
  ENST ID: ENST00000476802
  CDS Start-End: 39-386
gtctcttcagtagagagtctagaccccacccagtcttcatgtacggccgaccgcaggctgagatggaacaggaggctggggagctgagccggtggcaggcggcgcaccaggctgcccaggataacgagaactcagcgcccatcttgaacatgtcttcatcttctggaagctctggagtgcacacctcttggaaccaaggcctaccaagcattcagcactttcctcacagcgcagagatgctggggtcccctttggtgtctgttgaggcgccggggcagaatgtgaatgaaggggggccacagttcagtatgccactgcctgagcgtgcccggacctgctccacagacagtagagaagaactccaggcctcaggaagggactggtagaaggggctcctcagaggcaaggccttactgctgcaactacgagaactgcggaaaagcttataccaaacgctcccacctcgtgagccaccagcgcaagcacacaggtgagaggccatattcttgcaactgggaaagttgttcatggtctttcttccgttctgatgagcttagacgacatatgcgggtacacaccagatatcgaccatataaatgtgatcagtgcagccgggagttcatgaggtctgaccatctcaagcaacaccagaagactcatcggccgggaccctcagacccacaggccaacaacaa

SEQ ID NO: 147064 - DNA, 3159 bp, Homo sapiens
  Payload ID: 9091
  Gene Symbol: KLF18
  Gene Name: Kruppel-like factor 18
  ENST ID: ENST00000634670
  CDS Start-End: 1-3159
atggattccagtcttctccaggcaattgaggaaattgagaaatttttccagcatctctctgagcggcatacagaacaggcagaaaccccagatgcaccagaaccacagaactgtatgcctctgactgcccatgctgaggagagccaacatgagtcaacccagagcaagacgatgcctcccttggggtccacaatgatgacttctgcatgcactaacatccctgggacagttctcacccaggacttaacaatgcaccctcttaaagcccttgaagacctaagtgagacttattccatgggccagaaagtgacttcctttgatcaggtaaaacacacagcaggctcccagatgacagatgttactgtcaccccaaagtcatcacccactgattgccagaagacaaccatcactgcaagcaacatgacaatctccaatgaaagtagccagctgaacaccccaagcagtgaccagaccctcaatgagagtcagataccagccctgcttggagatcagatgaagaccctcagtgataaccagactctctgtggggaccaggtgaccttcagtagtgaccagaccctcactgatggtcatacagtgacttccggtagcgatgagaccctctctgggggccaaatgacaaccagtctagacctctatggagggcaaatgatgacttccattgataaccagaccctctgtggggagcagatgacgacctccagtggtaaccaggccttctacgggagacagatgacgacctccactggtaaccagaccctctgtggagagcagatgacaacctccactggtaaccaggccctctatggggggcagatgacgacctccgctagtaaccagaccctctgtggagagcagatgacaacctccactagtaaccagaccctctgtggggagcaagtgatgacctccactggtaaccaagccctctgtggagggcagatgacgacctccactggtaaccagaacctctatggggggcagatgatgacctccactggtaaccagaccctctactgggggcagatgatgacctccactggtaaccagaacctctgtggagagcaagtgatgacctccactggtaaccaagccctctgtggagggcagatgacgacctccactggtaaccagaacctctatggggggcagatgatgacctccactggtaaccagaccctctactgggggcagatgatgacctccactggtaaccagaacctctgtggagagcaagtgatgacctccactggtaaccaagccctctgtggagggcagatgacgacctccactggtaaccagaacctctgtggagagcaagtgatgacctccactagtaaccagaccctctgtggagagcagacgacgacctccactagtaaccagaccctctgtggggagcaggtgacgacctccactggtaaccaggccctctacggggggcagatgatgacctccactggtaaccagaccctctactgggggcagatgatgacctccactggtaaccagaacctctgtggagagcagatgacaacctccactggtaaccaggccctctacggggggcagatgacaacctctactagtaaccagaccctctgtggagagcagatgacgacccccactagtaaccagaccctctgtggggagcaggtgacgacctccactggtaaccaggccctctacggggggcagatcacgacctccactagtaaccagaccctctgtggagagcagatgacgacctccactagtaaccagaccctttgtggggagcaggtgacgacctccactggtaaccaggccctctatggggggcagatgatgacctccactggtaaccaggccctctacggggggcagatgacaacctctgctagtaaccagaccctctgtggagagcagatgacaacctccactagtaaccagaccctctgtgaggagcaggtgatgacctccactggtaaccaggccctctgtggagagcagatgacaacctccactggtaaccaggccctctacggggggcagatgacgacctccactagtaaccagaccctctgtggagagcagacgacgacctccactagtaaccagaccctctgtggggagcaggtgacgacctccactggtaaccaggccctctatggggggcagatgatgacctccactggtaaccagaccctctactgggggcagatgatgacctccactggtaaccagaacctctgtggagagcagatgacaacctccactggtaaccaggccctctacggggggcagatgacgacctctactagtaaccagaccctctgtggagagcagatgacgacccccactagtaaccagaccctctgtggggagcaggtgacgacctccactggtaaccaggccctctacagggggcagatcacgacctccactagtaaccagaccctctgtggagagcagatgacgacctccactagtaaccagaccctctgtggggagcaggtgacgacctccactggtaaccaggccctctatggggggcagatgatgacctccactggtaaccagaacctctacggggggcagaatatgacctccactgataaccaggccctctatggaggccagatggcaacatatagtggcaaccagaccctctatggggaccagatgctgactcttcaggtgggcaatatgacaacgctcactgatgaccacagcctttatgggggatatatgatgtcccatcagttctcatcattgccatacccaggattcctatgcttttcaagttcccatttgattcaaggacaactcccaaaacagaagacacagagctgccagttctggaagaatcctgaggtttcaaggccctatgtctgcacttacgaggactgcaagatgtcttattcaaaggcttgccacctccgaacccacatgcgcaagcacaccggggagaagccctatgtatgcgatgtagagggatgtacgtggaaatttgcccgctcagatgagctcaacagacacaagaaaaggcacactggggaaaggccctacctgtgttcaatatgcagcaagaattttgcaagatctgatcacctaaagcagcatgcaaaggtccacaacattcgcccaggattatga

SEQ ID NO: 147065 - DNA, 2018 bp, Homo sapiens
  Payload ID: 9092
  Gene Symbol: KLF2
  Gene Name: Kruppel-like factor 2
  Uniprot ID: Q9Y5W3
  ENST ID: ENST00000248071
  CDS Start-End: 108-1175
ccgcggcccacagagccgtccccgcccgcccgcgccccgaccagcccggcctcgggcagccactcaccggtgtccccgtccgcgtcctttctccccgggtcccggccatggcgctgagtgaacccatcctgccgtccttctccactttcgccagcccgtgccgcgagcgcggcctgcaggagcgctggccgcgcgccgaacccgagtccggcggcaccgacgacgacctcaacagcgtgctggacttcatcctgtccatggggctggatggcctgggcgccgaggccgccccggagccgccgccgccgcccccgccgcctgcgttctattaccccgaacccggcgcgcccccgccctacagcgcccccgcgggtggcctggtgtctgagctgctgcgacccgagctggatgcgccgctggggcccgcactgcacggccgctttctgctggcgccgcccggccgcctggtcaaggccgagccccctgaagcggacggcggcggcggctacggctgcgcccccgggctgacccgtggaccgcgcggcctcaagcgcgagggcgccccgggcccggcggcttcgtgcatgcgaggtcccgggggccgccccccgccgccgcccgacacaccgccgctcagccccgacggccccgcgcgcctgcccgcgcccggtccgcgcgcctccttcccgccgcctttcggtggccctggtttcggcgcgcccgggcccggcctgcattacgcgccgcctgcgcccccagccttcggtctcttcgacgacgcggccgccgccgcggcagccctgggcctggcgccccccgccgcccgcggtctcctcacgccgcctgcgtccccgctggagctgctggaggccaagccaaagcgcggccgccgctcttggccccgcaaacgcaccgccactcacacctgcagctacgcgggctgcggcaagacctacaccaagagttcgcatctgaaggcgcatctgcgcacgcacacaggtgagaagccctaccactgcaactgggacggctgcggctggaagtttgcgcgctcagacgagctcacgcgccactaccgaaagcacacgggccaccggccattccagtgccatctgtgcgatcgtgccttctcgcgctccgatcacctggcgctgcacatgaaacggcacatgtagccgggacgcccccgcccacctgcgcgcggccgtggcgggtcccacgcgccgggcgcggccccctcccaaactgtgactggtatttattggacccagagaaccgggccgggcacagcgtggctacagagggtctccctcgatgacgacgacgacgacgccaccaccccagcccccgtctgtgactgaaggcccggtgggaaaagaccacgatcctccttgacgagttttgtttttcaaaatggtgcaataatttaagtggcatcttctctcccaccgggtctacactagaggatcgaggcttgtgatgccttgtgagaaataagggccttaatttgtactgtctgcggcattttttataatattgtatatagtgactgacaaatattgtattactgtacatagagagacaggtgggcatttttgggctacctggttcgtttttataagattttgctgggttggttttttttttaattaaaaagttttgcatcttttaaaaaaaatcacagcactggtctggttgcttggaactggggccttggggcacttgggaggaggggggagcggagagtttgatggagggcagccccactaaagcatcgtgtgcagtgggtcctgcgtctgccagcaccgggactgccagctgctgtgcctgcctgccaggaacctgtgggtttttctgtaaatttagacactgcattttaggactgagggagggttattttaaggttgttctttgagccataaattgcctctttgccccacagctggggaaagtgctggtcccactgacgtggcctcctctacgttgaaaaaaataaaactacttacctcttcctggaa

SEQ ID NO: 147066 - DNA, 564 bp, Homo sapiens
  Payload ID: 9092
  Gene Symbol: KLF2
  Gene Name: Kruppel-like factor 2
  ENST ID: ENST00000592003
  CDS Start-End: 85-321
gcccgcccgcgccccgaccagcccggcctcgggcagccactcaccggtgtccccgtccgcgtcctttctccccgggtcccggccatggcgctgagtgaacccatcctgccgtccttctccactttcgccagcccgtgccgcgagcgcggcctgcaggaggtgagaagccctaccactgcaactgggacggctgcggctggaagtttgcgcgctcagacgagctcacgcgccactaccgaaagcacacgggccaccggccattccagtgccatctgtgcgatcgtgccttctcgcgctccgatcacctggcgctgcacatgaaacggcacatgtagccgggacgcccccgcccacctgcgcgcggccgtggcgggtcccacgcgccgggcgcggccccctcccaaactgtgactggtatttattggacccagagaaccgggccgggcacagcgtggctacagagggtctccctcgatgacgacgacgacgacgccaccaccccagcccccgtctgtgactgaaggcccggtgggaaaagaccacgatcctccttgacgagttttg

SEQ ID NO: 147067 - DNA, 5122 bp, Homo sapiens
  Payload ID: 9093
  Gene Symbol: KLF3
  Gene Name: Kruppel-like factor 3 (basic)
  Uniprot ID: P57682
  ENST ID: ENST00000261438
  CDS Start-End: 306-1343
cgcagagcgagcggcgccggcgtcatgtgactgcccggagttggtgccaggagccagaggggagccaggagcggagccgcgcggagccggggcccgagccggagcgcagcgagagcgcccgccgcacgcgcgcccgtccccgtcccctgcggccgccaacgccgcccggactggagccctgacattgctgcgctcggggggctccaggcagcccgtatcggggcctttatttctcgtcggcggcgccctgcaccgcgcctcgcaaagccaaacaccagagcaccctagaaggtttaactaaaagaatgctcatgtttgacccagttcctgtcaagcaagaggccatggaccctgtctcagtgtcatacccatctaattacatggaatccatgaagcctaacaagtatggggtcatctactccacaccattgcctgagaagttctttcagaccccagaaggtctgtcgcacggaatacagatggagccagtggacctcacggtgaacaagcggagttcacccccttcggctgggaattcgccctcctctctgaagttcccgtcctcacaccggagagcctcgcctgggttgagcatgccttcttccagcccaccgataaaaaaatactcacccccttctccaggcgtgcagcccttcggcgtgccgctgtccatgccaccagtgatggcagctgccctctcgcggcatggaatacggagcccggggatcctgcccgtcatccagccggtggtggtgcagcccgtcccctttatgtacacaagtcacctccagcagcctctcatggtctccttatcggaggagatggaaaattccagtagtagcatgcaagtacctgtaattgaatcatatgagaagcctatatcacagaaaaaaattaaaatagaacctgggatcgaaccacagaggacagattattatcctgaagaaatgtcaccccccttaatgaactcagtgtcccccccgcaagcattgttgcaagagaatcacccttcggtcatcgtgcagcctgggaagagacctttacctgtggaatccccggatactcaaaggaagcggaggatacacagatgtgattatgatggatgcaacaaagtgtacactaaaagctcccacttgaaagcacacagaagaacacacacaggagaaaaaccctacaaatgtacatgggaagggtgcacatggaagtttgctcggtctgatgaactaacaagacatttccgaaaacatactggaatcaaacctttccagtgcccggactgtgaccgcagcttctcccgttctgaccatcttgccctccataggaaacgccacatgctagtctgattgcctctgtgtcctgcctcagcgtgactccccactcacctggctctctctctgtcctgcctcccattatctaacacattttttacatgtacattttaatttgattcagctggtctgaatctctgaatttatatcatccaaaacttccatatggtcagtagtagatgttctctaatcctccctctccttaccacgggtcagacctaaagaatgtgaacacttttttttttttttctggggatgctaagcaaacccttcttacagatacgtttaatgtaataagaacaagggaacatgtaaactaacataaccaattgtcagttctccatgtattcctcaaaagaatgtcagagtaaatgtattagaaatacagtatccagactgctagtccttgccagagacattcttacctctgccctgtgataatattttatgcttgacagtgaaaacaagtgtggccccttgcaccggttagctagaagtacagccagatttcaagctagtgcagtcacctcttccgtcattcttcacaaatcttgtcaacctggatcttagacttcatctgaatcgagttctttgccctcctttgtgcctgcagctcatatggaggtctttgccaccaatgggagatgagcccaaactttcgatctaggtgggtgatgtgtagcagttcaagggaagggtgctgtgttttcatagcatggagtcggaggagagggccatttagcagggggagcagaagaggcaattcctcctgggctaggggttgtcagtgaggtttcaacattttgttagctgtgtgcagcattcccagagcttcagtctctgtgcatactcagctttgtagaaccatgctgcaaagccatataccgatggggttatccatgcaactatctccattcctacaatgtccttaatatgagatcatcaaacattgatagtagggactccatggaatatttgcccagtaatggtaagaaatctttcgggtaagagtatggatggttcttcttttacccaatctgcttatagctttttttgtaaacagggaaatgttgagtggtacttgtattcccttatcaaattaatcacatagcttttatacagaaactcttcctgtgtgagctgttaaggtgccaaattggctgtcatttgtattcatgacacataccataaagcatctgctaatgctttaatggattgattcaattaagacctgagtgacactatttgtaaatataactagttgtgaagcacacatacctttattttgggaatttatgagaaaatatagaaaaccacagatcagggattcatatatgtagctcaaaaattcccaaaagtttactgttagagttggcaatttcctatcactatttcagtgtcagaacaaactgaaaataatggctcgtgtttatgttgaagataaatagcaccattattgggggaagttattcaaaagcaggcttttgagcaccatagtctaaatgccaataaaaataattcatacatagaaatgtcattggtcctgaatttgaagaaagtgagcaacagtagttaaatgtgggtgcatataaccaaattccccttcatcaagaatggaggagaagagagaagaatgaaatcctgaagattcatcccagccgcaactcaggatccaacacaactttaactgggaggaatacattgtttgatcatttttaaaacatctgtgaatgagtgattccggaggcctgtgaattgtgtggggagcttgctttgatggcactgtgttaataaaagttgtagggactgtgcacctaagaggctaagaggtcccactcatccgccctgtgaaccagctgtaaagaaatgtagttaagaaatgcaaagaaatgtgttatcttggcacttgggtttgattttcctttttttaaagcactgcaaaacttctttaggatactaaaacatcctaattgggctgtttttttgttttgttttgtttttcagctaaaggcaaagataatttttttttcagctgaagtttttcttttttgcaactatgacatgaattgagtgataaaatggctctttgaaaagtagatattgtctgtattgtaaatgcttagtcatattcatggcaaagtgttcatttcttgagatggttctttcacaacacacaagaatcaagatggaacgcaaggaaaatctttttgttttgaccgaggtaaccagtttatgtgtgttccaatccatagagaagtgggggaaagggcgagaaaggatcagattgatctgggatcagctttgagcctgagttcagtgaatagcctcatgggcatctcatggaattgatgcatttgctgtggcatatttaaattttgttcaaaagatttgaagcaagaccttgcaaagactcttaacattactgttcagcttgcttagattgtgttaacagttcatttaacaaagatccgttttaactctgaacaaaagcaacccagagcggccattctctattcccatgctggtcaatacgctttcattaccaattggcccttaccaaacttttcttatatatatatttgtattttactatgatagttgagaaatttagcctcttagtcatttttagctgttattgtggaagacctcaaatacaagattagatgcccttgaacatgttttaatgatgtgtgtcatgttactatcaatggtgatttcaatcgcaatattttaaattgatgagaatgatttgtaaacatgaagttactattacgtaaattctgtttgttatagagtttcttcagttgttacccaagtgtcatcctagagaagtcagaagaatcagaatccatcgtattttagagttatgtgaatctacatcataaatgggcattaacattctaaattgcttggtttggagaatgtgttagcagcatagctatattcaactagggagatgctaaatacacagaagtttcaagagccttggaacagaattacaggggaactatatatgtatatgtatattttattaaacacccatctgcactatcagtattgcactaatgtggaatttgaaagactattttgctgatactgtatatatgcgcatcattcctgattagattgttgtaaagacaatctgaaagatctaaggttttaaaataatttggtttgaaaatatacagttgtcttgaaggaattgctgtcatacatgaagttgctccgagctgtctttattctcttcttggtcaaggttaacaattgctaaatgatcgcaaattcacctaaacaatacatttacaaagccatctttacatgcattaaacgagggctacaacaatattgttttacaaatactagcacttttttttctgttatgtacttagtgttagagggtcaaaataatctttctgcttagcatctcttaaaccatacctgcaaatatagcaggattattacatttacagtactttaatacttgtataaactatgcagaaatttttaataaagtgtaatatattttataagctaataagactgaatgggtaaaggtttttagcatgcattagtatacttgcagatactgaaacattttggtaatctttcttactaaagatgtgaatgtttaatgtaccttctctgtttctactctgtagtccaatgggaattcagtaatgacattttgtcatgtcaaactgtgaacataaatttgtactgtacagtcctcatatactatatacagtatgcaatatatattatatacttgttaataaaaccatcagaatattaaa

SEQ ID NO: 147068 - DNA, 1871 bp, Homo sapiens
  Payload ID: 9093
  Gene Symbol: KLF3
  Gene Name: Kruppel-like factor 3 (basic)
  Uniprot ID: P57682
  ENST ID: ENST00000514033
  CDS Start-End: 305-1003
gcagagcgagcggcgccggcgtcatgtgactgcccggagttggtgccaggagccagaggggagccaggagcggagccgcgcggagccggggcccgagccggagcgcagcgagagcgcccgccgcacgcgcgcccgtccccgtcccctgcggccgccaacgccgcccggactggagccctgacattgctgcgctcggggggctccaggcagcccgtatcggggcctttatttctcgtcggcggcgccctgcaccgcgcctcgcaaagccaaacaccagagcaccctagaaggtttaactaaaagaatgctcatgtttgacccagttcctgtcaagcaagaggccatggaccctgtctcagtgtcatacccatctaattacatggaatccatgaagcctaacaagtatggggtcatctactccacaccattgcctgagaagttctttcagaccccagaaggtctgtcgcacggaatacagatggagccagtggacctcacggtgaacaagcggagttcacccccttcggctgggaattcgccctcctctctgaagttcccgtcctcacaccggagagcctcgcctgggttgagcatgccttcttccagcccaccgataaaaaaatactcacccccttctccaggcgtgcagcccttcggcgtgccgctgtccatgccaccagtgatggcagctgccctctcgcggcatggaatacggagcccggggatcctgcccgtcatccagccggtggtggtgcagcccgtcccctttatgtacacaagtcacctccagcagcctctcatggtctccttatcggaggagatggaaaattccagtagtagcatgcaagtacctgtaattgaatcatatgagaagcctatatcacagaaaaaaattaaaatagaacctgggatcgaaccacagaggacagattattatcctgaagaaatgtcaccccccttaatgaactcagtgtcccccccgcaagcattgttgcaagagtaagtatatttaggtctacccagcatttgcatagtagtgtgcatcttggaacctggagcagaagcacaagatttcacacgtgtgatgtggtgtggatgaccaggaacggcttgtgatctgtggccgccactggtccagtaccactggtcaagatgggagaatctctccaaaaacaatatgctgttacactgacaacgttatgacaaaagttacatcaagttttcatggaatcagtcatccatgattttgcaccttaccacatgaattatttttgttttttttccattcttccaggctatgtatacttagtttttccattatgagaatccttgtatagattaaacttggtgttctgtggatcatgtaaagttttcatgtggacacacatagtccttacagagtgtatagtatcctgtagaattgctatccagtaggaaggctgtgcagtgttggtcagcatccaagcacctgaatggtggtttcttgtaggtctaacatggtataatgtggtagttgccacacacagcttcagtaacctcatttgtgggatcctgctgtagataaccttgacctccaccagtgattacactgaaggctgggtttgtagttgctaagaagatggttttcgggtccaacaaggatcccacctctgctctctgccatatgtatgatcttggactagtcacttaatcttgctgccccatttctgttttcattattgattgtagttgtgattgtcttgtgttatggtgcttcagcattggattcagcagccagcttcctagtacgaaggcaacgattacctccacagggtcccttccattgtcctcctgcatcattttcctccaacttgaataaatgttctacccac

SEQ ID NO: 147069 - DNA, 2813 bp, Homo sapiens
  Payload ID: 9094
  Gene Symbol: KLF4
  Gene Name: Kruppel-like factor 4 (gut)
  Uniprot ID: O43474
  ENST ID: ENST00000374672
  CDS Start-End: 475-1914
ctcccacccgcccgtggcccgcgcccatggccgcgcgcgctccacacaactcaccggagtccgcgccttgcgccgccgaccagttcgcagctccgcgccacggcagccagtctcacctggcggcaccgcccgcccaccgccccggccacagcccctgcgcccacggcagcactcgaggcgaccgcgacagtggtgggggacgctgctgagtggaagagagcgcagcccggccaccggacctacttactcgccttgctgattgtctatttttgcgtttacaacttttctaagaacttttgtatacaaaggaactttttaaaaaagacgcttccaagttatatttaatccaaagaagaaggatctcggccaatttggggttttgggttttggcttcgtttcttctcttcgttgactttggggttcaggtgccccagctgcttcgggctgccgaggaccttctgggcccccacattaatgaggcagccacctggcgagtctgacatggctgtcagcgacgcgctgctcccatctttctccacgttcgcgtctggcccggcgggaagggagaagacactgcgtcaagcaggtgccccgaataaccgctggcgggaggagctctcccacatgaagcgacttcccccagtgcttcccggccgcccctatgacctggcggcggcgaccgtggccacagacctggagagcggcggagccggtgcggcttgcggcggtagcaacctggcgcccctacctcggagagagaccgaggagttcaacgatctcctggacctggactttattctctccaattcgctgacccatcctccggagtcagtggccgccaccgtgtcctcgtcagcgtcagcctcctcttcgtcgtcgccgtcgagcagcggccctgccagcgcgccctccacctgcagcttcacctatccgatccgggccgggaacgacccgggcgtggcgccgggcggcacgggcggaggcctcctctatggcagggagtccgctccccctccgacggctcccttcaacctggcggacatcaacgacgtgagcccctcgggcggcttcgtggccgagctcctgcggccagaattggacccggtgtacattccgccgcagcagccgcagccgccaggtggcgggctgatgggcaagttcgtgctgaaggcgtcgctgagcgcccctggcagcgagtacggcagcccgtcggtcatcagcgtcagcaaaggcagccctgacggcagccacccggtggtggtggcgccctacaacggcgggccgccgcgcacgtgccccaagatcaagcaggaggcggtctcttcgtgcacccacttgggcgctggaccccctctcagcaatggccaccggccggctgcacacgacttccccctggggcggcagctccccagcaggactaccccgaccctgggtcttgaggaagtgctgagcagcagggactgtcaccctgccctgccgcttcctcccggcttccatccccacccggggcccaattacccatccttcctgcccgatcagatgcagccgcaagtcccgccgctccattaccaagagctcatgccacccggttcctgcatgccagaggagcccaagccaaagaggggaagacgatcgtggccccggaaaaggaccgccacccacacttgtgattacgcgggctgcggcaaaacctacacaaagagttcccatctcaaggcacacctgcgaacccacacaggtgagaaaccttaccactgtgactgggacggctgtggatggaaattcgcccgctcagatgaactgaccaggcactaccgtaaacacacggggcaccgcccgttccagtgccaaaaatgcgaccgagcattttccaggtcggaccacctcgccttacacatgaagaggcatttttaaatcccagacagtggatatgacccacactgccagaagagaattcagtattttttacttttcacactgtcttcccgatgagggaaggagcccagccagaaagcactacaatcatggtcaagttcccaactgagtcatcttgtgagtggataatcaggaaaaatgaggaatccaaaagacaaaaatcaaagaacagatggggtctgtgactggatcttctatcattccaattctaaatccgacttgaatattcctggacttacaaaatgccaagggggtgactggaagttgtggatatcagggtataaattatatccgtgagttgggggagggaagaccagaattcccttgaattgtgtattgatgcaatataagcataaaagatcaccttgtattctctttaccttctaaaagccattattatgatgttagaagaagaggaagaaattcaggtacagaaaacatgtttaaatagcctaaatgatggtgcttggtgagtcttggttctaaaggtaccaaacaaggaagccaaagttttcaaactgctgcatactttgacaaggaaaatctatatttgtcttccgatcaacatttatgacctaagtcaggtaatatacctggtttacttctttagcatttttatgcagacagtctgttatgcactgtggtttcagatgtgcaataatttgtacaatggtttattcccaagtatgccttaagcagaacaaatgtgtttttctatatagttccttgccttaataaatatgtaatataaatttaagcaaacgtctattttgtatatttgtaaactacaaagtaaaatgaacattttgtggagtttgtattttgcatactcaaggtgagaattaagttttaaataaacctataatattttatctgaa

SEQ ID NO: 147070 - DNA, 800 bp, Homo sapiens
  Payload ID: 9094
  Gene Symbol: KLF4
  Gene Name: Kruppel-like factor 4 (gut)
  ENST ID: ENST00000411706
  CDS Start-End: 103-800
gaggaccggtgggacgcgccggaacgacggccgaaagccgcccctgactctcctgtctccgctccctgccttgctcgcaggcagccacctggcgagtctgacatggctgtcagcgacgcgctgctcccatctttctccacgttcgcgtctggcccggcgggaagggagaagacactgcgtcaagcaggtgccccgaataaccgctggcgggaggagctctcccacatgaagcgacttcccccagtgcttcccggccgcccctatgacctggcggcggcgaccgtggccacagacctggagagcggcggagccggtgcggcttgcggcggtagcaacctggcgcccctacctcggagagagaccgaggagttcaacgatctcctggacctggactttattctctccaattcgctgacccatcctccggagtcagtggccgccaccgtgtcctcgtcagcgtcagcctcctcttcgtcgtcgccgtcgagcagcggccctgccagcgcgccctccacctgcagcttcacctatccgatccgggccgggaacgacccgggcgtggcgccgggcggcacgggcggaggcctcctctatggcagggagtccgctccccctccgacggctcccttcaacctggcggacatcaacgacgtgagcccctcgggcggcttcgtggccgagctcctgcggccagaattggacccggtgtacattccgccgcagcagccgcagccgccaggtggcgggctgatgggcaagttcgtgctgaaggcgtcgctgagcgcccctggcagcgagta

SEQ ID NO: 147071 - DNA, 822 bp, Homo sapiens
  Payload ID: 9094
  Gene Symbol: KLF4
  Gene Name: Kruppel-like factor 4 (gut)
  ENST ID: ENST00000420475
  CDS Start-End: 756-822
actcctctggccttctcttgaggctcccagttcacgctgcacagtgctgggcactgcctcctctccacacccctagcgccccccacccctcagcagaagggcccgcgaggaaccgtgcgaggtcaggccgagcgccggcaccgccaccggcactggcgctgagcgacgagagcggactcctgcgagcgcagagagggagggggagatggagggctggatgagtcacgcggataatcgcgctcttctccagcgcgcagacagcgcggcaagcgcgtatgctagcaggggtgcggacgcgtgaccgtgccgcccgctgaccccaccagtcttcgcgggcttcgaacccagggagccgacaatggcgttcgcagctccgcgccacggcagccagtctcacctggcggcaccgcccgcccaccgccccggccacagcccctgcgcccacggcagcactcgaggcgaccgcgacagtggtgggggacgctgctgagtggaagagagcgcagcccggccaccggacctacttactcgccttgctgattgtctatttttgcgtttacaacttttctaagaacttttgtatacaaaggaactttttaaaaaagacgcttccaagttatatttaatccaaagaagaaggatctcggccaatttggggttttgggttttggcttcgtttcttctcttcgttgactttggggttcaggtgccccagctgcttcgggctgccgaggaccttctgggcccccacattaatgaggcagccacctggcgagtctgacatggctgtcagcgacgcgctgctcccatctttctccacgt

SEQ ID NO: 147072 - DNA, 1956 bp, Homo sapiens
  Payload ID: 9094
  Gene Symbol: KLF4
  Gene Name: Kruppel-like factor 4 (gut)
  ENST ID: ENST00000610832
  CDS Start-End: 622-1059
agtttcccgaccagagagaacgaacgtgtctgcgggcgcgcggggagcagaggcggtggcgggcggcggcggcaccgggagccgccgagtgaccctcccccgcccctctggccccccaccctcccacccgcccgtggcccgcgcccatggccgcgcgcgctccacacaactcaccggagtccgcgccttgcgccgccgaccagttcgcagctccgcgccacggcagccagtctcacctggcggcaccgcccgcccaccgccccggccacagcccctgcgcccacggcagcactcgaggcgaccgcgacagtggtgggggacgctgctgagtggaagagagcgcagcccggccaccggacctacttactcgccttgctgattgtctatttttgcgtttacaacttttctaagaacttttgtatacaaaggaactttttaaaaaagacgcttccaagttatatttaatccaaagaagaaggatctcggccaatttggggttttgggttttggcttcgtttcttctcttcgttgactttggggttcaggtgccccagctgcttcgggctgccgaggaccttctgggcccccacattaatgaggcagccacctggcgagtctgacatggctgtcagcgacgcgctgctcccatctttctccacgttcgcgtctggcccggcgggaagggagaagacactgcgtcaagcaggtgccccgaataacctcatgccacccggttcctgcatgccagaggagcccaagccaaagaggggaagacgatcgtggccccggaaaaggaccgccacccacacttgtgattacgcgggctgcggcaaaacctacacaaagagttcccatctcaaggcacacctgcgaacccacacaggtgagaaaccttaccactgtgactgggacggctgtggatggaaattcgcccgctcagatgaactgaccaggcactaccgtaaacacacggggcaccgcccgttccagtgccaaaaatgcgaccgagcattttccaggtcggaccacctcgccttacacatgaagaggcatttttaaatcccagacagtggatatgacccacactgccagaagagaattcagtattttttacttttcacactgtcttcccgatgagggaaggagcccagccagaaagcactacaatcatggtcaagttcccaactgagtcatcttgtgagtggataatcaggaaaaatgaggaatccaaaagacaaaaatcaaagaacagatggggtctgtgactggatcttctatcattccaattctaaatccgacttgaatattcctggacttacaaaatgccaagggggtgactggaagttgtggatatcagggtataaattatatccgtgagttgggggagggaagaccagaattcccttgaattgtgtattgatgcaatataagcataaaagatcaccttgtattctctttaccttctaaaagccattattatgatgttagaagaagaggaagaaattcaggtacagaaaacatgtttaaatagcctaaatgatggtgcttggtgagtcttggttctaaaggtaccaaacaaggaagccaaagttttcaaactgctgcatactttgacaaggaaaatctatatttgtcttccgatcaacatttatgacctaagtcaggtaatatacctggtttacttctttagcatttttatgcagacagtctgttatgcactgtggtttcagatgtgcaataatttgtacaatggtttattcccaagtatgccttaagcagaacaaatgtgtttttctatatagttccttgccttaataaatatgtaatataaatttaagcaaacgtctattttgtatatttgtaaactacaaagtaaaatgaacattttgtggagtttgtattttgcatactcaaggtgagaattaagttttaaataaacctataatattttatctg

SEQ ID NO: 147073 - DNA, 3566 bp, Homo sapiens
  Payload ID: 9095
  Gene Symbol: KLF5
  Gene Name: Kruppel-like factor 5 (intestinal)
  Uniprot ID: Q13887
  ENST ID: ENST00000377687
  CDS Start-End: 537-1910
gcggccgccctgcgcgcgaagctcgtggcccgagaggggtgcggtcgggccgacggaggcggggccctggctgcctctctccctgctcataggctggccgctcaggcctggccggcctcggggcctcgggattcgcggcggcgctgccaatcaggcgatcgggccccgcccccccggagttgggtgaaatagaggcgggcgtcaagtgtcagtagtcgcggggcaggtacgtgcgctcgcggttctctcgcggaggtcggcggtggcgggagcgggctccggagagcctgagagcacggtggggcggggcgggagaaagtggccgcccggaggacgttggcgtttacgtgtggaagagcggaagagttttgcttttcgtgcgcgccttcgaaaactgcctgccgctgtctgaggagtccacccgaaacctcccctcctccgccggcagccccgcgctgagctcgccgacccaagccagcgtgggcgaggtgggaagtgcgcccgacccgcgcctggagctgcgcccccgagtgcccatggctacaagggtgctgagcatgagcgcccgcctgggacccgtgccccagccgccggcgccgcaggacgagccggtgttcgcgcagctcaagccggtgctgggcgccgcgaatccggcccgcgacgcggcgctcttccccggcgaggagctgaagcacgcgcaccaccgcccgcaggcgcagcccgcgcccgcgcaggccccgcagccggcccagccgcccgccaccggcccgcggctgcctccagaggacctggtccagacaagatgtgaaatggagaagtatctgacacctcagcttcctccagttcctataattccagagcataaaaagtatagacgagacagtgcctcagtcgtagaccagttcttcactgacactgaagggttaccttacagtatcaacatgaacgtcttcctccctgacatcactcacctgagaactggcctctacaaatcccagagaccgtgcgtaacacacatcaagacagaacctgttgccattttcagccaccagagtgaaacgactgcccctcctccggccccgacccaggccctccctgagttcaccagtatattcagctcacaccagaccgcagctccagaggtgaacaatattttcatcaaacaagaacttcctacaccagatcttcatctttctgtccctacccagcagggccacctgtaccagctactgaatacaccggatctagatatgcccagttctacaaatcagacagcagcaatggacactcttaatgtttctatgtcagctgccatggcaggccttaacacacacacctctgctgttccgcagactgcagtgaaacaattccagggcatgcccccttgcacatacacaatgccaagtcagtttcttccacaacaggccacttactttcccccgtcaccaccaagctcagagcctggaagtccagatagacaagcagagatgctccagaatttaaccccacctccatcctatgctgctacaattgcttctaaactggcaattcacaatccaaatttacccaccaccctgccagttaactcacaaaacatccaacctgtcagatacaatagaaggagtaaccccgatttggagaaacgacgcatccactactgcgattaccctggttgcacaaaagtttataccaagtcttctcatttaaaagctcacctgaggactcacactggtgaaaagccatacaagtgtacctgggaaggctgcgactggaggttcgcgcgatcggatgagctgacccgccactaccggaagcacacaggcgccaagcccttccagtgcggggtgtgcaaccgcagcttctcgcgctctgaccacctggccctgcatatgaagaggcaccagaactgagcactgcccgtgtgacccgttccaggtcccctgggctccctcaaatgacagacctaactattcctgtgtaaaaacaacaaaaacaaacaaaagcaagaaaaccacaactaaaactggaaatgtatattttgtatatttgagaaaacagggaatacattgtattaataccaaagtgtttggtcattttaagaatctggaatgcttgctgtaatgtatatggctttactcaagcagatctcatctcatgacaggcagccacgtctcaacatgggtaaggggtgggggtggaggggagtgtgtgcagcgtttttacctaggcaccatcatttaatgtgacagtgttcagtaaacaaatcagttggcaggcaccagaagaagaatggattgtatgtcaagattttacttggcattgagtagtttttttcaatagtaggtaattccttagagatacagtatacctggcaattcacaaatagccattgaacaaatgtgtgggtttttaaaaattatatacatatatgagttgcctatatttgctattcaaaattttgtaaatatgcaaatcagctttataggtttattacaagttttttaggattcttttggggaagagtcataattcttttgaaaataaccatgaatacacttacagttaggatttgtggtaaggtacctctcaacattaccaaaatcatttctttagagggaaggaataatcattcaaatgaactttaaaaaagcaaatttcatgcactgattaaaataggattattttaaatacaaaaggcattttatatgaattataaactgaagagcttaaagatagttacaaaatacaaaagttcaacctcttacaataagctaaacgcaatgtcatttttaaaaagaaggacttagggtgtcgttttcacatatgacaatgttgcatttatgatgcagtttcaagtaccaaaacgttgaattgatgatgcagttttcatatatcgagatgttcgctcgtgcagtactgttggttaaatgacaatttatgtggattttgcatgtaatacacagtgagacacagtaattttatctaaattacagtgcagtttagttaatctattaatactgactcagtgtctgcctttaaatataaatgatatgttgaaaacttaaggaagcaaatgctacatatatgcaatataaaatagtaatgtgatgctgatgctgttaaccaaagggcagaataaataagcaaaatgccaaaaggggtcttaattgaaatgaaaatttaattttgtttttaaaatattgtttatctttatttattttgtggtaatatagtaagtttttttagaagacaattttcataacttgataaattatagttttgtttgttagaaaagttgctcttaaaagatgtaaatagatgacaaacgatgtaaataattttgtaagaggcttcaaaatgtttatacgtggaaacacacctacatgaaaagcagaaatcggttgctgttttgcttctttttccctcttatttttgtattgtggtcatttcctatgcaaataatggagcaaacagctgtatagttgtagaattttttgagagaatgagatgtttatatattaacgacaattttttttttggaaaataaaaagtgcctaaaagatgta

SEQ ID NO: 147074 - DNA, 2951 bp, Homo sapiens
  Payload ID: 9095
  Gene Symbol: KLF5
  Gene Name: Kruppel-like factor 5 (intestinal)
  Uniprot ID: Q13887
  ENST ID: ENST00000539231
  CDS Start-End: 196-1296
actttagctcagacctttcttttaaccttgcctatcatgtttcgagtcagaatttaaatactgtgcagtttaagctacaatacgcttggcctataacttggttccaggcatttatatttatgtcacttttgtctacttattatactaacaaggtggaaaaagcaatcccagtctctccaaaagacaagatgtgaaatggagaagtatctgacacctcagcttcctccagttcctataattccagagcataaaaagtatagacgagacagtgcctcagtcgtagaccagttcttcactgacactgaagggttaccttacagtatcaacatgaacgtcttcctccctgacatcactcacctgagaactggcctctacaaatcccagagaccgtgcgtaacacacatcaagacagaacctgttgccattttcagccaccagagtgaaacgactgcccctcctccggccccgacccaggccctccctgagttcaccagtatattcagctcacaccagaccgcagctccagaggtgaacaatattttcatcaaacaagaacttcctacaccagatcttcatctttctgtccctacccagcagggccacctgtaccagctactgaatacaccggatctagatatgcccagttctacaaatcagacagcagcaatggacactcttaatgtttctatgtcagctgccatggcaggccttaacacacacacctctgctgttccgcagactgcagtgaaacaattccagggcatgcccccttgcacatacacaatgccaagtcagtttcttccacaacaggccacttactttcccccgtcaccaccaagctcagagcctggaagtccagatagacaagcagagatgctccagaatttaaccccacctccatcctatgctgctacaattgcttctaaactggcaattcacaatccaaatttacccaccaccctgccagttaactcacaaaacatccaacctgtcagatacaatagaaggagtaaccccgatttggagaaacgacgcatccactactgcgattaccctggttgcacaaaagtttataccaagtcttctcatttaaaagctcacctgaggactcacactggtgaaaagccatacaagtgtacctgggaaggctgcgactggaggttcgcgcgatcggatgagctgacccgccactaccggaagcacacaggcgccaagcccttccagtgcggggtgtgcaaccgcagcttctcgcgctctgaccacctggccctgcatatgaagaggcaccagaactgagcactgcccgtgtgacccgttccaggtcccctgggctccctcaaatgacagacctaactattcctgtgtaaaaacaacaaaaacaaacaaaagcaagaaaaccacaactaaaactggaaatgtatattttgtatatttgagaaaacagggaatacattgtattaataccaaagtgtttggtcattttaagaatctggaatgcttgctgtaatgtatatggctttactcaagcagatctcatctcatgacaggcagccacgtctcaacatgggtaaggggtgggggtggaggggagtgtgtgcagcgtttttacctaggcaccatcatttaatgtgacagtgttcagtaaacaaatcagttggcaggcaccagaagaagaatggattgtatgtcaagattttacttggcattgagtagtttttttcaatagtaggtaattccttagagatacagtatacctggcaattcacaaatagccattgaacaaatgtgtgggtttttaaaaattatatacatatatgagttgcctatatttgctattcaaaattttgtaaatatgcaaatcagctttataggtttattacaagttttttaggattcttttggggaagagtcataattcttttgaaaataaccatgaatacacttacagttaggatttgtggtaaggtacctctcaacattaccaaaatcatttctttagagggaaggaataatcattcaaatgaactttaaaaaagcaaatttcatgcactgattaaaataggattattttaaatacaaaaggcattttatatgaattataaactgaagagcttaaagatagttacaaaatacaaaagttcaacctcttacaataagctaaacgcaatgtcatttttaaaaagaaggacttagggtgtcgttttcacatatgacaatgttgcatttatgatgcagtttcaagtaccaaaacgttgaattgatgatgcagttttcatatatcgagatgttcgctcgtgcagtactgttggttaaatgacaatttatgtggattttgcatgtaatacacagtgagacacagtaattttatctaaattacagtgcagtttagttaatctattaatactgactcagtgtctgcctttaaatataaatgatatgttgaaaacttaaggaagcaaatgctacatatatgcaatataaaatagtaatgtgatgctgatgctgttaaccaaagggcagaataaataagcaaaatgccaaaaggggtcttaattgaaatgaaaatttaattttgtttttaaaatattgtttatctttatttattttgtggtaatatagtaagtttttttagaagacaattttcataacttgataaattatagttttgtttgttagaaaagttgctcttaaaagatgtaaatagatgacaaacgatgtaaataattttgtaagaggcttcaaaatgtttatacgtggaaacacacctacatgaaaagcagaaatcggttgctgttttgcttctttttccctcttatttttgtattgtggtcatttcctatgcaaataatggagcaaacagctgtatagttgtagaattttttgagagaatgagatgtttatatattaacgacaattttttttttggaaaataaaaagtgcctaaaagatgt

SEQ ID NO: 147075 - DNA, 2169 bp, Homo sapiens
  Payload ID: 9096
  Gene Symbol: KLF6
  Gene Name: Kruppel-like factor 6
  Uniprot ID: Q99612
  ENST ID: ENST00000469435
  CDS Start-End: 180-1025
ttgcaaatattgtgtgggctccgcgcgctgcgggctgcgggagggtccggccgggcgtctctgcgagcctggagtttgcatgaaactttcacctgcgctccggggagactttcggctccggctcccaccgcgcgcctcgccgccctcgcgaccgcgggctccgtccaacccggcccgacatggacgtgctccccatgtgcagcatcttccaggagctccagatcgtgcacgagaccggctacttctcggcgctgccgtctctggaggagtactggcaacagacctgcctagagctggaacgttacctccagagcgagccctgctatgtttcagcctcagaaatcaaatttgacagccaggaagatctgtggaccaaaatcattctggctcgggagaaaaaggaggaatccgaactgaagatatcttccagtcctccagaggacactctcatcagcccgagcttttgttacaacttagagaccaacagcctgaactcagatgtcagcagcgaatcctctgacagctccgaggaactttctcccacggccaagtttacctccgaccccattggcgaagttttggtcagctcgggaaaattgagctcctctgtcacctccacgcctccatcttctccggaactgagcagggaaccttctcaactgtggggttgcgtgcccggggagctgccctcgccagggaaggtgcgcagcgggacttcggggaagccaggtgacaagggaaatggcgatgcctcccccgacggcaggaggagggtgcaccggtgccactttaacggctgcaggaaagtttacaccaaaagctcccacttgaaagcacaccagcggacgcacacaggtcagtgcccacgcgggccccggagggcggccgctggtgggcgccactgcattgcaccagccctggagggagccgggcctggctgcacaggatgtggtcagggcagacaaatcctcacttcctcagatgttttccaccaaagcattaggtctttttggagttcagagtagaatcctaaagactggacttttgagttggataaatgtgtaacaattttcagattaaacaaacaagagactagatccttttctccacggacacccaaacctccaccccccaccccttagtagtgctggggatccgaggccactgccccttcaccagtgcactcgcacgaggctacctcgagcggccctggggtttcctaaatgaaactcaagggtcaggacagagggttgctgggcagcgtggagtgtgtgggtttgatgctgacggcccgaggcccgagtgggaccggcctgctctgtaagcagcagcattgatcagcgagtgtttcctgagaacttctccgtgtctcatgcagcctttgtttctgataccgcttgaaacagtttcttaatgaaatgccatacctaggtgaaagtgctatttaaaaataccttgacatgttctaggataattggtgaggaatcacagaacatttagaactgggaagggtcttagtgatcacgtgatgcaggctcttctcttatcagtaggagagcaaattgctgagagtcagtcccagacaggcttggtgacagctgagattgagatccgggtggcccaatatccaggcccaggcctgtctcaacataccctgagattggcttgacaactttgttttctcaggtagcacttgtagtaaattcatatttatgatttgaccaaggaatgaagtgaacccagttgttcaattgccatttagagaatgattccggggccctgtactggggctttccagaagctcgtaacttcagctttgtagaaaggtagaacgtccctgaggaaactgcagaggcacattccatagggaagtgaggatggaacagaagtgtgtttgggagaaacagttgccatgaagaaagcaatagctctgcctttgccggggctgtgggtccggcaggctgacacctcatcccgcaagcattttgctggtctgagtcgtggtcgttcttccacgttaactttgatgacagcaccatgggcttggctgaagctgtgtcccttggacagcagtgggaggcctgagactgggtcaggagagagctgctgttgtctctctgaggctgccagttgttgtgtgttaccgatgccagaagccactgggtccct

SEQ ID NO: 147076 - DNA, 4656 bp, Homo sapiens
  Payload ID: 9096
  Gene Symbol: KLF6
  Gene Name: Kruppel-like factor 6
  Uniprot ID: Q99612
  ENST ID: ENST00000497571
  CDS Start-End: 262-1113
ggcgggggcggagggggaggctggcagcggagctttgaatagggaagttttgcaggggttacgtttgcagtcagtccggtgtttgcaaatattgtgtgggctccgcgcgctgcgggctgcgggagggtccggccgggcgtctctgcgagcctggagtttgcatgaaactttcacctgcgctccggggagactttcggctccggctcccaccgcgcgcctcgccgccctcgcgaccgcgggctccgtccaacccggcccgacatggacgtgctccccatgtgcagcatcttccaggagctccagatcgtgcacgagaccggctacttctcggcgctgccgtctctggaggagtactggcaacagacctgcctagagctggaacgttacctccagagcgagccctgctatgtttcagcctcagaaatcaaatttgacagccaggaagatctgtggaccaaaatcattctggctcgggagaaaaaggaggaatccgaactgaagatatcttccagtcctccagaggacactctcatcagcccgagcttttgttacaacttagagaccaacagcctgaactcagatgtcagcagcgaatcctctgacagctccgaggaactttctcccacggccaagtttacctccgaccccattggcgaagttttggtcagctcgggaaaattgagctcctctgtcacctccacgcctccatcttctccggaactgagcagggaaccttctcaactgtggggttgcgtgcccggggagctgccctcgccagggaaggtgcgcagcgggacttcggggaagccaggtgacaagggaaatggcgatgcctcccccgacggcaggaggagggtgcaccggtgccactttaacggctgcaggaaagtttacaccaaaagctcccacttgaaagcacaccagcggacgcacacaggagaaaagccttacagatgctcatgggaagggtgtgagtggcgttttgcaagaagtgatgagttaaccaggcacttccgaaagcacaccggggccaagccttttaaatgctcccactgtgacaggtgtttttccaggtctgaccacctggccctgcacatgaagaggcacctctgagggagcagagaggtggatcctgtaggctaaaaggcttccaggctgagagccggccgtggaaggagggatgcgtgttccagccaaagcatgccgttctgcaccctacccagttgcctccagggcctctccttggaaggtcttttgagggctaaaaaggtcctgtaagaagcggcatagcacccgtggtgcatggtatgtgggtgaccctggactcgccactggtacccgcccttccgagcggcgcctaagcctttgccgtgagcatgcacactgagaatgctaatggttgggttgattgtatgttgaggatctattactgaccgtatgatgaggccaactttttttccttgtggttagcaagactgcaagagatggaaaaaaagtagtttgaatgttttgtgtgtaaggagtataccatgagatgagatgaccaccaatcatttccttggggggagggggtgtctgcaccttagaaaaaaaaagaaaaatcaaaaaaacaaaaaaacaaaaacaaaaaaagaaggaaaatcttggagggtgggcgtgggaactcaggaccccagagtggcgagtggtgtggggagggagagcctctctcccccttttctgtgtgagaggaactcttagtgtctggtgcagctattaaatgtgcaatgtgtcaagtagcttgttttacacgctacaacatagctcatttgtaacccattgtataagctgtgtatttacaaatataacacaacaatttaacttttccttagaatacaaaaagtcatgcatggtctggggaactatatgcttttccatttttaagtcaggactgcaatactgattccagttaatgagcagctaagatccaatctgtctaatacagtgaccccctagccatccgggcctggcaatatacaattttttttcccctccaagtttgtaacactccccttccagaaaggcattgtgcaacacaggattatttttaaatgattctgaatttgaattaactttttggagaattctgtgatgcccttagaagaaattggacacgtattgagtgtcacaaagctggggctgggaattgctggtctaatgtttcattagacttaagaacctaaaatttttctcagttgggtggataaaaccactaacgcttagaaactgttttctcatgcagctatgtttctcttatttatgccttgaggactaatttctggttttctagctgttaatgcactgttgaccttcataatggtgccttacgcaagcgatcccttctgtgggggtctcatacaggggtgtgggcgatgcatgctttattaaggctcttgtttcacctggcagtgtactgtatcaacgtataatacagaaaaaaaatctctttaaggtcctccttcacaaagacatagagtgaaactccctttacatgtcagtatttgttcaacactttaggcaacttgactgtcagtgttaaaatggaaaacaggaaaatggaaaaatctgaccaattctgccaccttgagactttcatatagaccttgcacaacaattgtatagatcacacaccggctgtatttaatatgtaacattttcacacatattaaagatacagaagtattaaaaaacccccaatgttaatgtatttgcttaaaaggcacaagtttcacatatctgtctagctatctgttggtaatacagaaagtatactacttttttaaaaaagtgggcagaattcttgtgtatgtatatttgtgtgtacagtatgtgtatgtgtgtatatatatatattatatatatagataatatataaatattttttttaaggagaaactagaatgtttagctagaaaattccacagcctgtgaagaaatatttcaaaatggccataaaggaggtaaaaatgaaaaccataacctaacttttatagaggctttatctttaatttaacgatgtgcggaggactttcttgcttgaatctgttccgggctgtctgctctgtccatcaaatgggcaggtctggaatggggcaccttcggccgttcagaagtggcctgaacagaatgctggaacccaggctggactcggacacactaaggttttgattttgaatttcagccttattagaagatctaacctaagagtaagctaaccacagggattcttttgtagaacactttttatgcagatgaagctattttttccagcaagtagattcttccagtttttccaaggagtaatttccccgaattggcataccacggcgtggacagctgatatttcacccagctgctggcttgtgggtgtggctctttgctttatatatatatacacacatgtgagtctggctgggctggtattttgtttgatcttcctggaaatgagcagtgactaacgctcacataactggttttttttttatctgggctgatgaatacatttacctaagaaactcatttcgttttacttaagaggggaagtgcagttttcttttggcagttcagaatccaagcacttgatttgctgggtttggaaaactccttttttggccttctatgtgcttagccataacaattccattaagcaagaaggtaagcaaaagacaaaaaaaaaaaaaggaaaaaaaaaaacttgcactggcttgtctcacttacgaaacatgtcggagctgtttgcctgggtggggctgggtaccgtacctgtcaatgcctgtgattttcataattagcacgtacataaagaagtacattctgttcaggtgataactgagcctcaatcaagcagaaactttttgcttgaaattaaaaaaaaatttctattagtgaaatttcttttttttttttttttggaagcaccctgttatctaaagaatctttgtaagatttttgtaaaattttgttttacaagattttatttgaaattgttttttgcaagattgttatatttctgtatgaatgtattttttattggaataacataaaagaattcttatcagcatcttgagtctggttgttttttttgggggaagggggttgttggaacagattcctcctgcattcatcaccctggcttcctcctgggggcaaatcttcattgagcaaccctgagaacaactcaccgacctcagccccttcctctttccacagcctgtcctgggagctggagaggatgtcagcgagcctgacattgccctccctgaatgcatcaaatactcttctccaaggactgacaaaaacaaccccccggctgtgggcacagtagggaaccatgccggtttgatcttccattgctcaagccagggaatgcattgcagaggcacctgcacaacgacaaacttgagtgtttccctgccacttctgtgcctccacagcctgctccagttccgcagctagagctgggcctaccttccccagccagccctgccacacacctggctgaggcatgtctgggaggggtggaggaggcagagggactccaggccagagggctgttctcacaacctcagcccactctcagtcaaggagggcagaaaataaaagatgacatcactgcca

SEQ ID NO: 147077 - DNA, 4537 bp, Homo sapiens
  Payload ID: 9096
  Gene Symbol: KLF6
  Gene Name: Kruppel-like factor 6
  Uniprot ID: Q99612
  ENST ID: ENST00000542957
  CDS Start-End: 268-981
gagccaggcgggggcggagggggaggctggcagcggagctttgaatagggaagttttgcaggggttacgtttgcagtcagtccggtgtttgcaaatattgtgtgggctccgcgcgctgcgggctgcgggagggtccggccgggcgtctctgcgagcctggagtttgcatgaaactttcacctgcgctccggggagactttcggctccggctcccaccgcgcgcctcgccgccctcgcgaccgcgggctccgtccaacccggcccgacatggacgtgctccccatgtgcagcatcttccaggagctccagatcgtgcacgagaccggctacttctcggcgctgccgtctctggaggagtactggcaacagacctgcctagagctggaacgttacctccagagcgagccctgctatgtttcagcctcagaaatcaaatttgacagccaggaagatctgtggaccaaaatcattctggctcgggagaaaaaggaggaatccgaactgaagatatcttccagtcctccagaggacactctcatcagcccgagcttttgttacaacttagagaccaacagcctgaactcagatgtcagcagcgaatcctctgacagctccgaggaactttctcccacggccaagtttacctccgaccccattggcgaagttttggtcagctcgggaaaattgagctcctctgtcacctccacgcctccatcttctccggaactgagcagggaaccttctcaactgtggggttgcgtgcccggggagctgccctcgccagggaaggtgcgcagcgggacttcggggaagccaggtgacaagggaaatggcgatgcctcccccgacggcaggaggagggtgcaccggtgccactttaacggctgcaggaaagtttacaccaaaagctcccacttgaaagcacaccagcggacgcacacaggtgtttttccaggtctgaccacctggccctgcacatgaagaggcacctctgagggagcagagaggtggatcctgtaggctaaaaggcttccaggctgagagccggccgtggaaggagggatgcgtgttccagccaaagcatgccgttctgcaccctacccagttgcctccagggcctctccttggaaggtcttttgagggctaaaaaggtcctgtaagaagcggcatagcacccgtggtgcatggtatgtgggtgaccctggactcgccactggtacccgcccttccgagcggcgcctaagcctttgccgtgagcatgcacactgagaatgctaatggttgggttgattgtatgttgaggatctattactgaccgtatgatgaggccaactttttttccttgtggttagcaagactgcaagagatggaaaaaaagtagtttgaatgttttgtgtgtaaggagtataccatgagatgagatgaccaccaatcatttccttggggggagggggtgtctgcaccttagaaaaaaaaagaaaaatcaaaaaaacaaaaaaacaaaaacaaaaaaagaaggaaaatcttggagggtgggcgtgggaactcaggaccccagagtggcgagtggtgtggggagggagagcctctctcccccttttctgtgtgagaggaactcttagtgtctggtgcagctattaaatgtgcaatgtgtcaagtagcttgttttacacgctacaacatagctcatttgtaacccattgtataagctgtgtatttacaaatataacacaacaatttaacttttccttagaatacaaaaagtcatgcatggtctggggaactatatgcttttccatttttaagtcaggactgcaatactgattccagttaatgagcagctaagatccaatctgtctaatacagtgaccccctagccatccgggcctggcaatatacaattttttttcccctccaagtttgtaacactccccttccagaaaggcattgtgcaacacaggattatttttaaatgattctgaatttgaattaactttttggagaattctgtgatgcccttagaagaaattggacacgtattgagtgtcacaaagctggggctgggaattgctggtctaatgtttcattagacttaagaacctaaaatttttctcagttgggtggataaaaccactaacgcttagaaactgttttctcatgcagctatgtttctcttatttatgccttgaggactaatttctggttttctagctgttaatgcactgttgaccttcataatggtgccttacgcaagcgatcccttctgtgggggtctcatacaggggtgtgggcgatgcatgctttattaaggctcttgtttcacctggcagtgtactgtatcaacgtataatacagaaaaaaaatctctttaaggtcctccttcacaaagacatagagtgaaactccctttacatgtcagtatttgttcaacactttaggcaacttgactgtcagtgttaaaatggaaaacaggaaaatggaaaaatctgaccaattctgccaccttgagactttcatatagaccttgcacaacaattgtatagatcacacaccggctgtatttaatatgtaacattttcacacatattaaagatacagaagtattaaaaaacccccaatgttaatgtatttgcttaaaaggcacaagtttcacatatctgtctagctatctgttggtaatacagaaagtatactacttttttaaaaaagtgggcagaattcttgtgtatgtatatttgtgtgtacagtatgtgtatgtgtgtatatatatatattatatatatagataatatataaatattttttttaaggagaaactagaatgtttagctagaaaattccacagcctgtgaagaaatatttcaaaatggccataaaggaggtaaaaatgaaaaccataacctaacttttatagaggctttatctttaatttaacgatgtgcggaggactttcttgcttgaatctgttccgggctgtctgctctgtccatcaaatgggcaggtctggaatggggcaccttcggccgttcagaagtggcctgaacagaatgctggaacccaggctggactcggacacactaaggttttgattttgaatttcagccttattagaagatctaacctaagagtaagctaaccacagggattcttttgtagaacactttttatgcagatgaagctattttttccagcaagtagattcttccagtttttccaaggagtaatttccccgaattggcataccacggcgtggacagctgatatttcacccagctgctggcttgtgggtgtggctctttgctttatatatatatacacacatgtgagtctggctgggctggtattttgtttgatcttcctggaaatgagcagtgactaacgctcacataactggttttttttttatctgggctgatgaatacatttacctaagaaactcatttcgttttacttaagaggggaagtgcagttttcttttggcagttcagaatccaagcacttgatttgctgggtttggaaaactccttttttggccttctatgtgcttagccataacaattccattaagcaagaaggtaagcaaaagacaaaaaaaaaaaaaggaaaaaaaaaaacttgcactggcttgtctcacttacgaaacatgtcggagctgtttgcctgggtggggctgggtaccgtacctgtcaatgcctgtgattttcataattagcacgtacataaagaagtacattctgttcaggtgataactgagcctcaatcaagcagaaactttttgcttgaaattaaaaaaaaatttctattagtgaaatttcttttttttttttttttggaagcaccctgttatctaaagaatctttgtaagatttttgtaaaattttgttttacaagattttatttgaaattgttttttgcaagattgttatatttctgtatgaatgtattttttattggaataacataaaagaattcttatcagcatcttgagtctggttgttttttttgggggaagggggttgttggaacagattcctcctgcattcatcaccctggcttcctcctgggggcaaatcttcattgagcaaccctgagaacaactcaccgacctcagccccttcctctttccacagcctgtcctgggagctggagaggatgtcagcgagcctgacattgccctccctgaatgcatcaaatactcttctccaaggactgacaaaaacaaccccccggctgtgggcacagtagggaaccatgccggtttgatcttccattgctcaagccagggaatgcattgcagaggcacctgcacaacgacaaacttgagtgtttccctgccacttctgtgcctccacagcctgctccagttccgcagctagagctgggcctaccttccccagccagccctgccacacacctggctgaggcatgtctgggaggggtggaggaggcagagggactccaggccagagggctgttctcacaacctcagcccactctcagtcaaggagggcagaaaataaaagatgacatcactgcc

SEQ ID NO: 147078 - DNA, 8362 bp, Homo sapiens
  Payload ID: 9097
  Gene Symbol: KLF7
  Gene Name: Kruppel-like factor 7 (ubiquitous)
  Uniprot ID: O75840
  ENST ID: ENST00000309446
  CDS Start-End: 378-1286
agcgctgcagaaatagatggcagcttcgtgtcagtgagtttgcatcccccttcctgatccacgagctggagtgattagagccctggaagggaattgttactcccgtggagaagtccccttttcctggcagtcgtctgcactgtacacgctggatgcctctctccatccaccccactcactcgctcctctctcacctcctctctccctctcctgcattgatttttttttttcctttttagttgactgaaacaaaacaaaacaaaagggccactggatgtctgccttcttggggggtgagccagacagactgacaaacaaacagccccaactgtgttcgggggagggtttcgcctcccgttttgcccggcagcagcagcatggacgtgttggctagttatagtatattccaggagctacaacttgtccacgacaccggctacttctcagctttaccatccctggaggagacctggcagcagacatgccttgaattggaacgctacctacagacggagccccggaggatctcagagacctttggtgaggacttggactgtttcctccacgcttcccctcccccgtgcattgaggaaagcttccgtcgcttagaccccctgctgctccccgtggaagcggccatctgtgagaagagctcggcagtggacatcttgctctctcgggacaagttgctatctgagacctgcctcagcctccagccggccagctcttctctagacagctacacagccgtcaaccaggcccagctcaacgcagtgacctcattaacgcccccatcgtcccctgagctcagccgccatctggtcaaaacctcacaaactctctctgccgtggatggcacggtgacgttgaaactggtggccaagaaggctgctctcagctccgtaaaggtgggaggggtcgcaacagctgcagcagccgtgacggctgcgggggccgttaagagtggacagagcgacagtgaccaaggagggctgggggctgaagcatgtcccgaaaacaagaagagggttcaccgctgtcagtttaacgggtgccggaaagtttatacaaaaagctcccacttaaaggcccaccagaggactcacacaggtgagaagccttataagtgctcatgggagggatgtgagtggcgttttgcacgaagcgatgagctcacgaggcactacaggaaacacacaggtgcaaagcccttcaaatgcaaccactgcgacaggtgtttttccaggtctgaccatcttgccctccacatgaagagacatatctaaaaaaccgaaaggccagagttgccatggcatcggctagtgtctaaaggaaacgccatgaggcagggggctggacttcaggcggggacccattgcctcgcagaagaaagttctcacttataaacctctgtacacacacacacacacacacacatatacacacactcacagacccacacacatacacactgtcatgcactcaactatatttaaaatatatacgtctattctttatgccttgccctagccagatggaagaagatgaagaaggaaaccaggtgaactcagcaaggcagactggctgcttacttcagcactattggaattatttcccgctgttgccaatggaaatcaaagaaaatggatgtgacgtctgtgcaggtggacggcagtccgaggggcttatttcacttgcttctcagtgcaacttgataggagaatccagcatcttaaagttgcatatgtgtagcactaatgtttctttttaaatagttgggggaaaatgacctagaaaaccaaattgcagtttggtagccaaaattaactcttggtttatttgtcctttgtgtgtgaaaagtcctactattccgtgcgtcagacttcctcacagaactgttgactggttttggttcttagtactattgagatctttcgcgtcgatcccaacggccttagcggcggcagactggaataacaccttacacctttctggcctgcatttctgtagacttcactctcaagggaggagttttcttttcttacgttttgacttttgcacaccatatgcactagggattctggaaacttctagcatgactgcaaagtggccaagagaataaagtccttgatgataaatcacagtatatcccttgagcctcaccttattgccagtgctagattttttctttttaatctctccgtttttgctaacgaaaacttgaaaagcttatttggaagcttaaatgttttatcttttctccatggactaaacctctccaggactctctcggcacctggatgtccagctctcgaagcagccagtcagatgggacatcacagttctctcatcctccttgaggcatgatgacctcagctcatagtgatcaaccgttgtgctgtgtgtcattgctaccccataaccagttacagcatagatgtcgctagtctcagagggcagctgcgtatttaatttaactctggtttatgacctgacaaaaagccaaaaatatcactctttccaggagtggggaaaactgaggatgcctcccaagtctagtggcttcacaaaagatcatcctgtcttctctgtcatgcccactgagctcctattcccctacgtgttacaatacacaatttaaaacgccattgtgggagtgaagggttgacatttaaggaaaaggttgaggtgtttctctcatgggctgtctaaaaggagagacacgtttctttctttccttttttttttggctaggcccaccatgacttgtgacctagaacccccaggattaacagaggcctcacatttactctgcaagctgactccaaaggagtctacagtccttacttgtcatgccacactcacacatccagtagtggtctctatctacccgcattcctagctagctggcactggcctcaactccaaagactgcctttaggaccatcaaatggcctatgcaagcaagcggggtggttattaggacagattgtatattttgtatattctgggaccatcccttcaagacacgtctataaaacaaaaatggcgcttggtccacacacggttgctgctccctcctaccagctggctcccctcctgtcctcctttgactgtttgactcattgactgttaaaatgccaccccatacatatttgggatgcaaaactgaagtcaaaaggaaataatataagaaacacaaacacatatatgacagcaaccttcaagatctgggttttcagctttctgcaacctttgttttcactgaaatgttgaaactactcgtctgagggcaaaggaacctcctcacaaatgctatagctgccaattggacacttggggcatttcgaggtctggccctaagaatttactttctccttttccttttttctatttagaccaaaaaaaacaaaaacaaaaacaaaaaaaaaaacaaaataatacaaaacgaaaaaaaaagaaagaacacccgttaacacacacgcgcacacacacacaaaatctgtccatttgccggaggcaattgtatgtatgttagttggagggtattaaaaatcagttttattccaaagatttaaaactagacatgacttaaaaacaatttctggagcactgcttgctgacaatctcgtagttctctgctgcatttgagtgcattttgtggccagtccatcagggcgtaccatgggattatatttgaatgtgtggtgcatccttcctggatgaaggatgtgtgagggaccttgaacctcagctgtattaaactgtagcgcctccagtcagtgcactagatgaaacttttagacaccctgaattctgttggttcctttcttttcctttatgtagcagcctccagcatgaatgcacgcacacgccagtgatggcattaagccatggccaccacgatttgcaaatgttctctcccaagctggagctgctcttgcctctcgaatgctattattaagggtttataatacttaatttaattttcgaactgaccaatgcaaggctctattaaaaagaaagtttaaaaaatgcaaaagagtaatcattgcttgtttgctccctattttcatctgtggtctcatttgaatgtggcagaacaaaggccctttggtcctcatcagtgtctgaaatgttcagtaatttctctctcttttgtatcagtgaggtcctttgtaatctgctcctgacctttcttggagcagggtgcattgaaactcaatggtggtgcttgcttgcttcagagtcatttgttgactgtgagaattggcctaagaatttggtgggtgctaagtggatggctttgaaactgttcttctttagccgagttgacacctgtgaatgatgaccagtcctgatcattttggaaatggatttgtaataaaacgtccatcacctctgcagtggcagagatggttactaagagccgctagagcgagcaggttttccaagaagtaacctgaagacattttgctcccaagaggactggttatttaaaacagtgcattaatggacatttgaaacacattaaacccctttctcatttcagttgttacctcctaaccctccaggggatcccaaatttgaaaggaaaaacccggcctggtgtttctggtggtgtcctaacaagcacgcttttatccagggttcagatttgttcatgtagaaaaagagtttctaagccactgacaattttttttttttgtaatttcaaattatacttctttctcctgccacatgactgtaagtcatagacatggaaacctgaaattataatgctgctcctagctactggcctcctgccccacccatggttaatggctcagctcaatgcctggtggtaatgagtattatgtccagaaaaagagatgttcagattccatgacaaagctgcatttttgtaaaaatattggagaccccaaaatgaacttcatgctgaccatttcctcctctctgtgtgctttcccttgcaaagcccttcaaatatcctcttctctcgacgccatctcctctccacctgcacctcttgtgccctttgtacatctttgattgcctgatgataacagggtaaaaggacagccaacctcatgcctgattagcagaactgaatcctagttttaaaaaatcttctctggcttcagagaagattttataaggacttttgtttgggataagctttccagattatccatgtctatttgcatcaaaggggaaagaaatggggcttttggatggctcttccagtgcattcggaacattgcctcttgcctttattcctgcattttatggcaaagccaaaagaaactcaagttgcaagaacaaaacccagtgactcgttttgatggttcaaaatggtttcctttatggaagtcacttcataaaatgttaagtaaaaagtgggaagtgcttctgtcttctcttttgcatgagttgcttttaggagcaggaagaaggtaggcaaagtaagataaagatgcaacacatttaactacaaaaatcaggttcattttttagtttattagaatttttttgaaatcttaagagggccagcatttctggctacaattttgcacccagaacattgccaaaatgaacattcagtaaatagaacctgattgaaatttactcctggaagctttcctttgcattttcgggaagtggccacctgccaagcgcaagagttggggggcaggaggggaggactcaaattcagggtgtctggattaaatttcggtgaacatggtgatatctcagtttgaaaactagagggcctatcctgagtatacatcaatgtctctttgatggcctactttcctcagtgaggatctttgggaatacttgagatggaacaacagaaatgtgtgaaaggaagcagaaacttcttgtaaataacgtgacctcccacgacgaactgcctgaggcttcagggttttttcttgcttttaacactcttaaatctcctctgttggttcctaatagatcccagaaaagggaaaaataaagctgcagttaactttcttatgtgcatccttccaatagagtactgtatttttcaggtgttttgcatttaacataaaagtcctcgggaaacaggtgtcaaaaacagagagagaaatcctgggccatcacttcacaaatatcccaaacaagatattcttttcaaacagggctccctctcagtggtcatgagggaaggttgataatgttctttgttggggactgtttatacaattttttttcaactgtgagctttggaatcgtaacttgctgtgagtccagcttctgtctactgccataagatggaccccacgtcagcataatgagggtggtatatatgctcgcacctagacatgcgcatatgtacctgtcgtaccttcacggaaggaaaacaggctactgacgtttcggaggagtagccaccagtgcctaatatcttttgggggggatggatgcttataattgccagtatatcgaaaccacactgggagttccacatagcggggaggggttgggggtgggcagaggggacattttaaacctaggcctttggactggaggcagaacgatttctgcaaacctaggtcctgaaggctttggggcttattggctggttctcaacctttttgttttttcttcccagcatgcatttcctatctaaacccagacttagtttaatttccttatctttcacttctgcttcattccagggaggaaaaatacacctgttaatggccaagatctccttgctaacacagaggcaaaaataaatgtctaatgtttttgaagcctccccttcctttccacaagcccccacccgcccccgcgtcaagctccttctcccacttcctactcccacacaacttcccagccactgaaacttttctttcaaatctctattatcctcttaacagttgcttgaataaatttatttttgcactatacattttctttttgccagatgtgtctaacaagtgtgtttggagagacctactcccagccccgtctccttccccgcctccccccgtcacattctctcaggccttctctggtatttataatatatcacagaagtacccagtcttatagccctcggttatgcctttttttgacattttattttttttaagctttttatatatatatatatataaatatattactttgtcaagtttttttgctgtacaaaagtcttaagatttaaaactattatttgtattatatgatggtggtatgttaatgttacaaaattattaatgaagaaaaaatttatttttgttactggtctgtttcataattcttttttaaattggtatattgtaagatatctatgcaaaaaatgttatgtgacgcatttttatttaagaatgtaatatgtgtaataaacagtagaatgtgtttggccttggaatactttactgtatttctccttagcttgtttcactggggaaaaaaatcttcgaaagacgcaagtgggtacttacatacttcgtgaaagttttctttcttggagaaagggaaagcaaaaggttgtattaggttatcttcgtttgggaagttgtgtgtgtgtgtgcgtatgtgtgtattttatagtttcattgaggcagctcaatgcccaaataagggtcactgagtttatttcttcaaggggaaaaagggagccaattgttggagattatgaaaagcaatattttagaatgatagagattacaagatgttatttgtttagggggttgggagaggcttattgaaagcggtttatttggcgagagaaggaggcagtttgttctgggatggtgtttaataggaacctattgggaaaggatctttgaagcagtctgtgaaggaggaagggtaaagatcagagggaataatttaggtgaggggtagggggcagtaaaatgacaggaggtggttggagtggggaggaaatgggtaaccggaagccaggaaatccagctggctgtggagagtacaaaaaactagatggaaatacaagcagcttcagacccagagaagagagggagatgaaagccccagggaaaattctcagaactgaaaagaaaagtactaaaatctctgccacacacgacttccaggaaagagcatcaccagtaaggaggaaggtagagaacccagctggtggtgtcgcctcagcatcccgagctcagcgattccccgagagaagtggtgtcattcacaggaaacagcagtaaaacacatttgtcacatgggacacagcagtagtcaagctttctttgcattctttggacttacagaagtggatacggtggtgaataacctctatccctaatcaaatgaatctgacaagaaactttccaataaatgtttactttagaaa

SEQ ID NO: 147079 - DNA, 3037 bp, Homo sapiens
  Payload ID: 9097
  Gene Symbol: KLF7
  Gene Name: Kruppel-like factor 7 (ubiquitous)
  Uniprot ID: O75840
  ENST ID: ENST00000421199
  CDS Start-End: 105-914
agatgtaacagatctctctatgtctacatcccaactccagaaaacgagaaatcgagttcctcctctcaccatcgaagctctgcagacacctcgctggagaccccatgacatgccttgaattggaacgctacctacagacggagccccggaggatctcagagacctttggtgaggacttggactgtttcctccacgcttcccctcccccgtgcattgaggaaagcttccgtcgcttagaccccctgctgctccccgtggaagcggccatctgtgagaagagctcggcagtggacatcttgctctctcgggacaagttgctatctgagacctgcctcagcctccagccggccagctcttctctagacagctacacagccgtcaaccaggcccagctcaacgcagtgacctcattaacgcccccatcgtcccctgagctcagccgccatctggtcaaaacctcacaaactctctctgccgtggatggcacggtgacgttgaaactggtggccaagaaggctgctctcagctccgtaaaggtgggaggggtcgcaacagctgcagcagccgtgacggctgcgggggccgttaagagtggacagagcgacagtgaccaaggagggctgggggctgaagcatgtcccgaaaacaagaagagggttcaccgctgtcagtttaacgggtgccggaaagtttatacaaaaagctcccacttaaaggcccaccagaggactcacacaggtgagaagccttataagtgctcatgggagggatgtgagtggcgttttgcacgaagcgatgagctcacgaggcactacaggaaacacacaggtgcaaagcccttcaaatgcaaccactgcgacaggtgtttttccaggtctgaccatcttgccctccacatgaagagacatatctaaaaaaccgaaaggccagagttgccatggcatcggctagtgtctaaaggaaacgccatgaggcagggggctggacttcaggcggggacccattgcctcgcagaagaaagttctcacttataaacctctgtacacacacacacacacacacacatatacacacactcacagacccacacacatacacactgtcatgcactcaactatatttaaaatatatacgtctattctttatgccttgccctagccagatggaagaagatgaagaaggaaaccaggtgaactcagcaaggcagactggctgcttacttcagcactattggaattatttcccgctgttgccaatggaaatcaaagaaaatggatgtgacgtctgtgcaggtggacggcagtccgaggggcttatttcacttgcttctcagtgcaacttgataggagaatccagcatcttaaagttgcatatgtgtagcactaatgtttctttttaaatagttgggggaaaatgacctagaaaaccaaattgcagtttggtagccaaaattaactcttggtttatttgtcctttgtgtgtgaaaagtcctactattccgtgcgtcagacttcctcacagaactgttgactggttttggttcttagtactattgagatctttcgcgtcgatcccaacggccttagcggcggcagactggaataacaccttacacctttctggcctgcatttctgtagacttcactctcaagggaggagttttcttttcttacgttttgacttttgcacaccatatgcactagggattctggaaacttctagcatgactgcaaagtggccaagagaataaagtccttgatgataaatcacagtatatcccttgagcctcaccttattgccagtgctagattttttctttttaatctctccgtttttgctaacgaaaacttgaaaagcttatttggaagcttaaatgttttatcttttctccatggactaaacctctccaggactctctcggcacctggatgtccagctctcgaagcagccagtcagatgggacatcacagttctctcatcctccttgaggcatgatgacctcagctcatagtgatcaaccgttgtgctgtgtgtcattgctaccccataaccagttacagcatagatgtcgctagtctcagagggcagctgcgtatttaatttaactctggtttatgacctgacaaaaagccaaaaatatcactctttccaggagtggggaaaactgaggatgcctcccaagtctagtggcttcacaaaagatcatcctgtcttctctgtcatgcccactgagctcctattcccctacgtgttacaatacacaatttaaaacgccattgtgggagtgaagggttgacatttaaggaaaaggttgaggtgtttctctcatgggctgtctaaaaggagagacacgtttctttctttccttttttttttggctaggcccaccatgacttgtgacctagaacccccaggattaacagaggcctcacatttactctgcaagctgactccaaaggagtctacagtccttacttgtcatgccacactcacacatccagtagtggtctctatctacccgcattcctagctagctggcactggcctcaactccaaagactgcctttaggaccatcaaatggcctatgcaagcaagcggggtggttattaggacagattgtatattttgtatattctgggaccatcccttcaagacacgtctataaaacaaaaatggcgcttggtccacacacggttgctgctccctcctaccagctggctcccctcctgtcctcctttgactgtttgactcattgactgttaaaatgccaccccatacatatttgggatgcaaaactgaagtcaaaaggaaataatataagaaacacaaacacatatatgacagcaaccttcaagatctgggttttcagctttctgcaacctttgttttcactgaaatgttgaaactactcgtctgagggcaaaggaacctcctcacaaatgctatagctgccaattggacacttggggcatttcgaggtctggccctaagaatttactttctccttttccttttttctatttagaccaaaaaaaa

SEQ ID NO: 147080 - DNA, 594 bp, Homo sapiens
  Payload ID: 9097
  Gene Symbol: KLF7
  Gene Name: Kruppel-like factor 7 (ubiquitous)
  ENST ID: ENST00000457962
  CDS Start-End: 413-594
attgtgcagggttttcatctcagatgtaacagatctctctatgtctacatcccaactccagaaaacgagaaatcgagttcctcctctcaccatcgaagctctgcagacacctcgctggagaccccatggtgagcctcatcacgtaaaggccccctcgcaagctgccggctccagcttgcgccccacgtctacctaggctccctctagcctctttaacgcacagtcgagcaacaggccccttgcaatcaactctagccgccggactcccgaccagttgactgaaacaaaacaaaacaaaagggccactggatgtctgccttcttggggggtgagccagacagactgacaaacaaacagccccaactgtgttcgggggagggtttcgcctcccgttttgcccggcagcagcagcatggacgtgttggctagttatagtatattccaggagctacaacttgtccacgacaccggctacttctcagctttaccatccctggaggagacctggcagcagacatgccttgaattggaacgctacctacagacggagccccggaggatctcagagacctttggtgaggacttggactgttt

SEQ ID NO: 147081 - DNA, 539 bp, Homo sapiens
  Payload ID: 9097
  Gene Symbol: KLF7
  Gene Name: Kruppel-like factor 7 (ubiquitous)
  Uniprot ID: O75840
  ENST ID: ENST00000458272
  CDS Start-End: 4-342
agcatggacgtgttggctagttatagtatattccaggagctacaacttgtccacgacaccggctacttctcagctttaccatccctggaggagacctggcagcagacatgccttgaattggaacgctacctacagacggagccccggaggatctcagagacctttggtgagaagccttataagtgctcatgggagggatgtgagtggcgttttgcacgaagcgatgagctcacgaggcactacaggaaacacacaggtgcaaagcccttcaaatgcaaccactgcgacaggtgtttttccaggtctgaccatcttgccctccacatgaagagacatatctaaaaaaccgaaaggccagagttgccatggcatcggctagtgtctaaaggaaacgccatgaggcagggggctggacttcaggcggggacccattgcctcgcagaagaaagttctcacttataaacctctgtacacacacacacacacacacacatatacacacactcacagacccacacacatacacactgtcatgcact

SEQ ID NO: 147082 - DNA, 750 bp, Homo sapiens
  Payload ID: 9097
  Gene Symbol: KLF7
  Gene Name: Kruppel-like factor 7 (ubiquitous)
  ENST ID: ENST00000426163
  CDS Start-End: 413-750
acacgcggcctaatggacgccctcctcgagatcccacggctgcgcggagaaccgaacggagggagggagtttggggagggggaagagcaggaggaggagaaaagggagggggaagactacaaactagcaaggatggggtggggggtggggagggaagggaaggggggggaagagaagcgatcgcgagagaaaaaaatgcaacctcccaaaataaagagcaaagattgcattaggagcgaacagcgctgcagaaatagatggcagcttcgtgtcattgactgaaacaaaacaaaacaaaagggccactggatgtctgccttcttggggggtgagccagacagactgacaaacaaacagccccaactgtgttcgggggagggtttcgcctcccgttttgcccggcagcagcagcatggacgtgttggctagttatagtatattccaggagctacaacttgtccacgacaccggctacttctcagctttaccatccctggaggagacctggcagcagacatgccttgaattggaacgctacctacagacggagccccggaggatctcagagacctttggtgaggacttggactgtttcctccacgcttcccctcccccgtgcattgaggaaagcttccgtcgcttagaccccctgctgctccccgtggaagcggccatctgtgagaagagctcggcagtggacatcttgctctctcgggacaagttgctatctgagacctgcctcagcctcca

SEQ ID NO: 147083 - DNA, 1788 bp, Homo sapiens
  Payload ID: 9097
  Gene Symbol: KLF7
  Gene Name: Kruppel-like factor 7 (ubiquitous)
  Uniprot ID: O75840
  ENST ID: ENST00000423015
  CDS Start-End: 230-922
cacttcctcctcaggcgcttcttctctgcaccctggcagcccgtggggagttcgggaaggggccctggatgccttttctgcttgtttttgattgactgaaacaaaacaaaacaaaagggccactggatgtctgccttcttggggggtgagccagacagactgacaaacaaacagccccaactgtgttcgggggagggtttcgcctcccgttttgcccggcagcagcagcatggacgtgttggctagttatagtatattccaggagctacaacttgtccacgacaccggctacttctcagctttaccatccctggaggagacctggcagcagacatgccttgaattggaacgctacctacagacggagccccggaggatctcagagacctttggtgaggacttggactgtttcctccacgcttcccctcccccgtgcattgaggaaagcttccgtcgcttagaccccctgctgctccccgtggaagcggccatctgtgagaagagctcggcagtggacatcttgctctctcgggacaagttgctatctgagacctgcctcagcctccagccggccagctcttctctagacagctacacagccgtcaaccaggcccagctcaacgcagtgacctcattaacgcccccatcgtcccctgagctcagccgccatctggtcaaaacctcacaaactctctctgccgtggatggcacggtgacgttgaaactggtggccaagaaggctgctctcagctccgtaaaggtgagaagccttataagtgctcatgggagggatgtgagtggcgttttgcacgaagcgatgagctcacgaggcactacaggaaacacacaggtgcaaagcccttcaaatgcaaccactgcgacaggtgtttttccaggtctgaccatcttgccctccacatgaagagacatatctaaaaaaccgaaaggccagagttgccatggcatcggctagtgtctaaaggaaacgccatgaggcagggggctggacttcaggcggggacccattgcctcgcagaagaaagttctcacttataaacctctgtacacacacacacacacacacacatatacacacactcacagacccacacacatacacactgtcatgcactcaactatatttaaaatatatacgtctattctttatgccttgccctagccagatggaagaagatgaagaaggaaaccaggtgaactcagcaaggcagactggctgcttacttcagcactattggaattatttcccgctgttgccaatggaaatcaaagaaaatggatgtgacgtctgtgcaggtggacggcagtccgaggggcttatttcacttgcttctcagtgcaacttgataggagaatccagcatcttaaagttgcatatgtgtagcactaatgtttctttttaaatagttgggggaaaatgacctagaaaaccaaattgcagtttggtagccaaaattaactcttggtttatttgtcctttgtgtgtgaaaagtcctactattccgtgcgtcagacttcctcacagaactgttgactggttttggttcttagtactattgagatctttcgcgtcgatcccaacggccttagcggcggcagactggaataacaccttacacctttctggcctgcatttctgtagacttcactctcaagggaggagttttcttttcttacgttttgacttttgcacaccatatgcactagggattctggaaacttctagcatgactgcaaagtggccaagagaataaagtccttgatgataaa

SEQ ID NO: 147084 - DNA, 7954 bp, Homo sapiens
  Payload ID: 9097
  Gene Symbol: KLF7
  Gene Name: Kruppel-like factor 7 (ubiquitous)
  Uniprot ID: O75840
  ENST ID: ENST00000412414
  CDS Start-End: 54-878
agcctgtgcaagtgatttgggagaggaaggggagatgatgtaactggttcggcatgttcccgtcttggccaacatgccttgaattggaacgctacctacagacggagccccggaggatctcagagacctttggtgaggacttggactgtttcctccacgcttcccctcccccgtgcattgaggaaagcttccgtcgcttagaccccctgctgctccccgtggaagcggccatctgtgagaagagctcggcagtggacatcttgctctctcgggacaagttgctatctgagacctgcctcagcctccagccggccagctcttctctagacagctacacagccgtcaaccaggcccagctcaacgcagtgacctcattaacgcccccatcgtcccctgagctcagccgccatctggtcaaaacctcacaaactctctctgccgtggatggcacggtgacgttgaaactggtggccaagaaggctgctctcagctccgtaaaggtgggaggggtcgcaacagctgcagcagccgtgacggctgcgggggccgttaagagtggacagagcgacagtgaccaaggagggctgggggctgaagcatgtcccgaaaacaagaagagggttcaccgctgtcagtttaacgggtgccggaaagtttatacaaaaagctcccacttaaaggcccaccagaggactcacacaggtgagaagccttataagtgctcatgggagggatgtgagtggcgttttgcacgaagcgatgagctcacgaggcactacaggaaacacacaggtgcaaagcccttcaaatgcaaccactgcgacaggtgtttttccaggtctgaccatcttgccctccacatgaagagacatatctaaaaaaccgaaaggccagagttgccatggcatcggctagtgtctaaaggaaacgccatgaggcagggggctggacttcaggcggggacccattgcctcgcagaagaaagttctcacttataaacctctgtacacacacacacacacacacacatatacacacactcacagacccacacacatacacactgtcatgcactcaactatatttaaaatatatacgtctattctttatgccttgccctagccagatggaagaagatgaagaaggaaaccaggtgaactcagcaaggcagactggctgcttacttcagcactattggaattatttcccgctgttgccaatggaaatcaaagaaaatggatgtgacgtctgtgcaggtggacggcagtccgaggggcttatttcacttgcttctcagtgcaacttgataggagaatccagcatcttaaagttgcatatgtgtagcactaatgtttctttttaaatagttgggggaaaatgacctagaaaaccaaattgcagtttggtagccaaaattaactcttggtttatttgtcctttgtgtgtgaaaagtcctactattccgtgcgtcagacttcctcacagaactgttgactggttttggttcttagtactattgagatctttcgcgtcgatcccaacggccttagcggcggcagactggaataacaccttacacctttctggcctgcatttctgtagacttcactctcaagggaggagttttcttttcttacgttttgacttttgcacaccatatgcactagggattctggaaacttctagcatgactgcaaagtggccaagagaataaagtccttgatgataaatcacagtatatcccttgagcctcaccttattgccagtgctagattttttctttttaatctctccgtttttgctaacgaaaacttgaaaagcttatttggaagcttaaatgttttatcttttctccatggactaaacctctccaggactctctcggcacctggatgtccagctctcgaagcagccagtcagatgggacatcacagttctctcatcctccttgaggcatgatgacctcagctcatagtgatcaaccgttgtgctgtgtgtcattgctaccccataaccagttacagcatagatgtcgctagtctcagagggcagctgcgtatttaatttaactctggtttatgacctgacaaaaagccaaaaatatcactctttccaggagtggggaaaactgaggatgcctcccaagtctagtggcttcacaaaagatcatcctgtcttctctgtcatgcccactgagctcctattcccctacgtgttacaatacacaatttaaaacgccattgtgggagtgaagggttgacatttaaggaaaaggttgaggtgtttctctcatgggctgtctaaaaggagagacacgtttctttctttccttttttttttggctaggcccaccatgacttgtgacctagaacccccaggattaacagaggcctcacatttactctgcaagctgactccaaaggagtctacagtccttacttgtcatgccacactcacacatccagtagtggtctctatctacccgcattcctagctagctggcactggcctcaactccaaagactgcctttaggaccatcaaatggcctatgcaagcaagcggggtggttattaggacagattgtatattttgtatattctgggaccatcccttcaagacacgtctataaaacaaaaatggcgcttggtccacacacggttgctgctccctcctaccagctggctcccctcctgtcctcctttgactgtttgactcattgactgttaaaatgccaccccatacatatttgggatgcaaaactgaagtcaaaaggaaataatataagaaacacaaacacatatatgacagcaaccttcaagatctgggttttcagctttctgcaacctttgttttcactgaaatgttgaaactactcgtctgagggcaaaggaacctcctcacaaatgctatagctgccaattggacacttggggcatttcgaggtctggccctaagaatttactttctccttttccttttttctatttagaccaaaaaaaacaaaaacaaaaacaaaaaaaaaaacaaaataatacaaaacgaaaaaaaaagaaagaacacccgttaacacacacgcgcacacacacacaaaatctgtccatttgccggaggcaattgtatgtatgttagttggagggtattaaaaatcagttttattccaaagatttaaaactagacatgacttaaaaacaatttctggagcactgcttgctgacaatctcgtagttctctgctgcatttgagtgcattttgtggccagtccatcagggcgtaccatgggattatatttgaatgtgtggtgcatccttcctggatgaaggatgtgtgagggaccttgaacctcagctgtattaaactgtagcgcctccagtcagtgcactagatgaaacttttagacaccctgaattctgttggttcctttcttttcctttatgtagcagcctccagcatgaatgcacgcacacgccagtgatggcattaagccatggccaccacgatttgcaaatgttctctcccaagctggagctgctcttgcctctcgaatgctattattaagggtttataatacttaatttaattttcgaactgaccaatgcaaggctctattaaaaagaaagtttaaaaaatgcaaaagagtaatcattgcttgtttgctccctattttcatctgtggtctcatttgaatgtggcagaacaaaggccctttggtcctcatcagtgtctgaaatgttcagtaatttctctctcttttgtatcagtgaggtcctttgtaatctgctcctgacctttcttggagcagggtgcattgaaactcaatggtggtgcttgcttgcttcagagtcatttgttgactgtgagaattggcctaagaatttggtgggtgctaagtggatggctttgaaactgttcttctttagccgagttgacacctgtgaatgatgaccagtcctgatcattttggaaatggatttgtaataaaacgtccatcacctctgcagtggcagagatggttactaagagccgctagagcgagcaggttttccaagaagtaacctgaagacattttgctcccaagaggactggttatttaaaacagtgcattaatggacatttgaaacacattaaacccctttctcatttcagttgttacctcctaaccctccaggggatcccaaatttgaaaggaaaaacccggcctggtgtttctggtggtgtcctaacaagcacgcttttatccagggttcagatttgttcatgtagaaaaagagtttctaagccactgacaattttttttttttgtaatttcaaattatacttctttctcctgccacatgactgtaagtcatagacatggaaacctgaaattataatgctgctcctagctactggcctcctgccccacccatggttaatggctcagctcaatgcctggtggtaatgagtattatgtccagaaaaagagatgttcagattccatgacaaagctgcatttttgtaaaaatattggagaccccaaaatgaacttcatgctgaccatttcctcctctctgtgtgctttcccttgcaaagcccttcaaatatcctcttctctcgacgccatctcctctccacctgcacctcttgtgccctttgtacatctttgattgcctgatgataacagggtaaaaggacagccaacctcatgcctgattagcagaactgaatcctagttttaaaaaatcttctctggcttcagagaagattttataaggacttttgtttgggataagctttccagattatccatgtctatttgcatcaaaggggaaagaaatggggcttttggatggctcttccagtgcattcggaacattgcctcttgcctttattcctgcattttatggcaaagccaaaagaaactcaagttgcaagaacaaaacccagtgactcgttttgatggttcaaaatggtttcctttatggaagtcacttcataaaatgttaagtaaaaagtgggaagtgcttctgtcttctcttttgcatgagttgcttttaggagcaggaagaaggtaggcaaagtaagataaagatgcaacacatttaactacaaaaatcaggttcattttttagtttattagaatttttttgaaatcttaagagggccagcatttctggctacaattttgcacccagaacattgccaaaatgaacattcagtaaatagaacctgattgaaatttactcctggaagctttcctttgcattttcgggaagtggccacctgccaagcgcaagagttggggggcaggaggggaggactcaaattcagggtgtctggattaaatttcggtgaacatggtgatatctcagtttgaaaactagagggcctatcctgagtatacatcaatgtctctttgatggcctactttcctcagtgaggatctttgggaatacttgagatggaacaacagaaatgtgtgaaaggaagcagaaacttcttgtaaataacgtgacctcccacgacgaactgcctgaggcttcagggttttttcttgcttttaacactcttaaatctcctctgttggttcctaatagatcccagaaaagggaaaaataaagctgcagttaactttcttatgtgcatccttccaatagagtactgtatttttcaggtgttttgcatttaacataaaagtcctcgggaaacaggtgtcaaaaacagagagagaaatcctgggccatcacttcacaaatatcccaaacaagatattcttttcaaacagggctccctctcagtggtcatgagggaaggttgataatgttctttgttggggactgtttatacaattttttttcaactgtgagctttggaatcgtaacttgctgtgagtccagcttctgtctactgccataagatggaccccacgtcagcataatgagggtggtatatatgctcgcacctagacatgcgcatatgtacctgtcgtaccttcacggaaggaaaacaggctactgacgtttcggaggagtagccaccagtgcctaatatcttttgggggggatggatgcttataattgccagtatatcgaaaccacactgggagttccacatagcggggaggggttgggggtgggcagaggggacattttaaacctaggcctttggactggaggcagaacgatttctgcaaacctaggtcctgaaggctttggggcttattggctggttctcaacctttttgttttttcttcccagcatgcatttcctatctaaacccagacttagtttaatttccttatctttcacttctgcttcattccagggaggaaaaatacacctgttaatggccaagatctccttgctaacacagaggcaaaaataaatgtctaatgtttttgaagcctccccttcctttccacaagcccccacccgcccccgcgtcaagctccttctcccacttcctactcccacacaacttcccagccactgaaacttttctttcaaatctctattatcctcttaacagttgcttgaataaatttatttttgcactatacattttctttttgccagatgtgtctaacaagtgtgtttggagagacctactcccagccccgtctccttccccgcctccccccgtcacattctctcaggccttctctggtatttataatatatcacagaagtacccagtcttatagccctcggttatgcctttttttgacattttattttttttaagctttttatatatatatatatataaatatattactttgtcaagtttttttgctgtacaaaagtcttaagatttaaaactattatttgtattatatgatggtggtatgttaatgttacaaaattattaatgaagaaaaaatttatttttgttactggtctgtttcataattcttttttaaattggtatattgtaagatatctatgcaaaaaatgttatgtgacgcatttttatttaagaatgtaatatgtgtaataaacagtagaatgtgtttggccttggaatactttactgtatttctccttagcttgtttcactggggaaaaaaatcttcgaaagacgcaagtgggtacttacatacttcgtgaaagttttctttcttggagaaagggaaagcaaaaggttgtattaggttatcttcgtttgggaagttgtgtgtgtgtgtgcgtatgtgtgtattttatagtttcattgaggcagctcaatgcccaaataagggtcactgagtttatttcttcaaggggaaaaagggagccaattgttggagattatgaaaagcaatattttagaatgatagagattacaagatgttatttgtttagggggttgggagaggcttattgaaagcggtttatttggcgagagaaggaggcagtttgttctgggatggtgtttaataggaacctattgggaaaggatctttgaagcagtctgtgaaggaggaagggtaaagatcagagggaataatttaggtgaggggtagggggcagtaaaatgacaggaggtggttggagtggggaggaaatgggtaaccggaagccaggaaatccagctggctgtggagagtacaaaaaactagatggaaatacaagcagcttcagacccagagaagagagggagatgaaagccccagggaaaattctcagaactgaaaagaaaagtactaaaatctctgccacacacgacttccaggaaagagcatcaccagtaaggaggaaggtagagaacccagctggtggtgtcgcctcagcatcccgagctcagcgattccccgagagaagtggtgtcattcacaggaaacagcagtaaaacacatttgtcacatgggacacagcagtagtcaagctttctttgcattctttggacttacagaagtggatacggtggtgaataacctctatccctaatcaaatgaatctgacaagaaactttccaataaatgtttactttagaaa

SEQ ID NO: 147085 - DNA, 574 bp, Homo sapiens
  Payload ID: 9097
  Gene Symbol: KLF7
  Gene Name: Kruppel-like factor 7 (ubiquitous)
  ENST ID: ENST00000451244
  CDS Start-End: 202-357
taaagagcaaagattgcattaggagcgaacagcgctgcagaaatagatggcagcttcgtgtcattgactgaaacaaaacaaaacaaaagggccactggatgtctgccttcttggggggtgagccagacagactgacaaacaaacagccccaactgtgttcgggggagggtttcgcctcccgttttgcccggcagcagcagcatggacgtgttggctagttatagtatattccaggagctacaacttgtccacgacaccggctacttctcagctttaccatccctggaggagacctggcagcagaaaattattgaagatcatctccaaaaagaaaacacaccagtttcttattattgactatgaaatcaacatgactgggtgggactggggaaaagacagatttatcagtccctaagagctgatggaaactgcatcctttaggtggaacacagagttggctgtaaggagacattcctttgtttttgttgtcttgaacaaaaggaaggacagtagatgacacagacatgccttgaattggaacgctacctacagacggagccccggaggatctcag

SEQ ID NO: 147086 - DNA, 578 bp, Homo sapiens
  Payload ID: 9097
  Gene Symbol: KLF7
  Gene Name: Kruppel-like factor 7 (ubiquitous)
  ENST ID: ENST00000435602
  CDS Start-End: 54-578
agcctgtgcaagtgatttgggagaggaaggggagatgatgtaactggttcggcatgttcccgtcttggccaacatgccttgaattggaacgctacctacagacggagccccggaggatctcagagacctttggtgaggacttggactgtttcctccacgcttcccctcccccgtgcattgaggaaagcttccgtcgcttagaccccctgctgctccccgtggaagcggccatctgtgagaagagctcggcagtggacatcttgctctctcgggacaagttgctatctgagacctgcctcagcctccagccggccagctcttctctagacagctacacagccgtcaaccaggcccagctcaacgcagtgacctcattaacgcccccatcgtcccctgagctcagccgccatctggtcaaaacctcacaaactctctctgccgtggatggcacggtgacgttgaaactggtggccaagaaggctgctctcagctccgtaaaggtgggaggggtcgcaacagctgcagcagccgtgacggctgcgggggccgttaagagtggacagagcgacagtgaccaa

SEQ ID NO: 147087 - DNA, 4821 bp, Homo sapiens
  Payload ID: 9098
  Gene Symbol: KLF8
  Gene Name: Kruppel-like factor 8
  Uniprot ID: O95600
  ENST ID: ENST00000374928
  CDS Start-End: 487-1260
tcctttgggcctagcagggccagagaaagacggaatcactctacccactcaggttgcccagagagcactttaggttctgactcgcgtggggcgcgaggtaccccgtggggcagctaggtgcctccaagaaaccccgccccagaggacccgcacgagttgctgccatttttcgctgaagcccctgccctggggctggtgttcttctctatgattctaccaatcgtcggcatttttttcctcccttctttctttttaggaaggcgctggggtgtgcggcggcaacggcggcggtgaagggatcctcttgtgcccggagaaataggggagtgggggcccaagaacgagaagacgagaacgcgtcgccctgcgctatgtcagaatggggcgggtgtgaggggaacagctctcttgcgatcagctcaggagtatgagcctcccggaggacggcatgagttctggacacttcaggagtcctcagctagtgacatggtcgatatggataaactcataaacaacttggaggtccaacttaattcagaaggtggctcaatgcaggtattcaagcaggtcactgcttctgttcggaacagagatccccctgagatagaatacagaagtaatatgacttctccaacactcctggatgccaaccccatggagaacccagcactgtttaatgacatcaagattgagcccccagaagaacttttggctagtgatttcagcctgccccaagtggaaccagttgacctctcctttcacaagcccaaggctcctctccagcctgctagcatgctacaagctccaatacgtccccccaagccacagtcttctccccagacccttgtggtgtccacgtcaacatctgacatgagcacttcagcaaacattcctactgttctgaccccaggctctgtcctgacctcctctcagagcactggtagccagcagatcttacatgtcattcacactatcccctcagtcagtctgccaaataagatgggtggcctgaagaccatcccagtggtagtgcagtctctgcccatggtgtatactactttgcctgcagatgggggccctgcagccattacagtcccactcattggaggagatggtaaaaatgctggatcagtgaaagttgaccccacctccatgtctccactggaaattccaagtgacagtgaggagagtacaattgagagtggatcctcagccttgcagagtctgcagggactacagcaagagagagaagccttataaatgcacctgggatggctgctcctggaaatttgctcgctcagatgagctcactcgccatttccgcaagcacacaggcatcaagccttttcggtgcacagactgcaaccgcagcttttctcgttctgaccacctgtccctgcatcgccgtcgccatgacaccatgtgagccgcacaggtcacactagagaagctgcgctggtatctttcctggtcgtgtgctgaggttgggacaattttttcctctttgacttcagcttgcatatggggttgaagcagcccactgagccaagttgaggagactggaggaaaagagagctggtctcccgtggggctcttcatattctaccttcacttctccactgtccagacccgtttttttcaacctccacatgggttgaattccagtgtggcacccatggctgccttcccatccccccctgctctgaaataggacatttttcctacagtaacaaaacaggaatcaaactcaaggctgtgaacaaacatacgctgctttattctttccaatttttctcttgttttctagaactcttatccatatgtttttaaaataagtacctaaaagtggtttgatagtgtcctaaacgacttttttaacttcctaaatggaaagagcataacaatgtagttgattggtaagatttacagggatttggtttctgagtttgaggcacattcccagtgaataagctgagtcccataccacactcaaaaggttttaataaatctaatcctatttcttcttaaagtttggttttcagacagtgctggtgcttctgcttcttaagttcatcaagggaatgaggagttcttgtccttctcctcctcttttttttcttttccactttctccttcaggattaaagattttgctgcacaattgttatttgttaggttaaatttggacaaatattcaaagcacacatagacatataagtaaggagaaaaatgttccaggagagtaggttgggcagtgacaggaacaaacagacctaggatgatcctgagaacaaatagaggggttcctttacttgtataggatatcaaaagtgctgttaatcacaaacctcattcaaatggcaggctgtcgagacagtgtcttgaggggctggctgtactgtttattttttcgtttacacaaagaagcaattgagtatattgcatgatgagaaatcacacactagggtcatgttatacagaagtaaggggttggaaaaatggaatgttgttcactccatggaattattggcattcattcctgtgtttcaaatgaaacatagatgcttttcatgaaaactgacctacaaaaagcaatttgatgttctgcaactgctatgaaaacctaagccatttattttagctgatagcagattgcataatatactcatttagctgcccaatcagattgttttataatattacctggggtacaaaatcctctgttcctggccctggaccacagatctacctccacatggcatatttcctttctggggtcaggggtaggggagggggctttgcatcacttgaatttagactcagcctctctttaaaagattgtctttatattgaacacctttttcttttcaaccctgcttgaatactttaggttactatttcctgaggctgtccattctcactatattgtagaattctagcaccaagaagggatcccgttaaccatctagtcctatccatccctcatattttacagatgagacaaatacgggtcagatttttttctccagatgtttctttgagcccttatacacctgcacgcttattctcctggggatcacataattttatttatttattttttgagagacggtttcactccatcacccaggctggagtgcagtggcgtaatcttggctcactgcaacctccgcctcctgggttcaagtgattctcctgcctcagcctcccaaatagcttggattacaggtgcgtgccaccacacctagctaagttttgtattattagtagagatggggtttcgccatgttggccaggctggtctcaaactcctgacctcaagtgatccccccacctcggcctcccaaagtgctgggatcacaggtgtgagtcaccacacctggccaggatcacattattaaaccaaattaaagtttatgtgattggttgcaatatttgtctaattttatatgttttcttcaggaaaactttagaactcaaaaatcatttacagctgattaaatagcaagtaaaatgtacttgtggtcattgccgtataacattaggcacacgcttctaacacttctataatatctagattttatttacctcattttaacttgcaatgtctgtctatctcatgaactctccataaatccaagaactgcctgtagttttcaaaatgacatgtgggtttttactgttatcattgttatttcgatagggctttttcctgattttgggtatacaagttccaaacttgcataataattgctaacgcactaggcgatatctagggccagtctgttaaaggggacctctaatgtagctataagacaggttggtaaagatgaactaacataagtttaagctaataattcagtagttgatgcagtatttcacagtagagcccgagcttactcatttttttcaaaatttggatcctgatactcctttttcagagttcagaactgaactgctcccctaagacctcagaatcttttgcattgagacatatgatctatttataaataaaggttatcaaatatcttgttgaactaattaggttgatcaaattaggatcccaaatattggggtccctgacatctgagcctttatctaaaaatgtttctgtaacataatgacagcctttatgtttgttaattgcctatagtaaagaagcaattttaagcctattctcatttccctctcccctacaaaaaatgataaaagctttccaattacttacatatgctctaacaagtgtctcaggattcattaacagaattttatagagtacagtaattcaaatatagcacagtacagagtttaccaaaaacacataaaactttgctagatagacagtgaggtggaaaggaactaaaatgtatctctcttgaatagcatttggggttcaattgaatttgttgtgtttacaacagcaaagcaccgttagcctggacagttgcttatggcatcgatagggttggataatattctgggatttgttgcagcagaattcctctatctgatgatcagcagttgaacataaacttcataattatagtaaaatttaggaaaaactatgagtgtgaagagtatgaactgattgggtagattaggcagagtgcattatgggcaagacaaaggttttcgatattaacttcttttaaaataaactttttattttcaaacagtttcagttttacagaaaaaatgtgaagctagtacagagaggtctcatttaccccacacccagtttctcctgttattagcatctcacattaatatgtggtatatttgttacaattaataaaacacattgatatgttaatattattaa

SEQ ID NO: 147088 - DNA, 1543 bp, Homo sapiens
  Payload ID: 9098
  Gene Symbol: KLF8
  Gene Name: Kruppel-like factor 8
  Uniprot ID: O95600
  ENST ID: ENST00000468660
  CDS Start-End: 289-1368
cccctgatttttgggttggatgcttgagagctttgtttcccttgttccgagagtggcccagctgggtctgaatcgactccctcccctttcgaccccctcctcattttccagcccggagaaataggggagtgggggcccaagaacgagaagacgagaacgcgtcgccctgcgctatgtcagaatggggcgggtgtgaggggaacagctctcttgcgatcagctcaggagtatgagcctcccggaggacggcatgagttctggacacttcaggagtcctcagctagtgacatggtcgatatggataaactcataaacaacttggaggtccaacttaattcagaaggtggctcaatgcaggtattcaagcaggtcactgcttctgttcggaacagagatccccctgagatagaatacagaagtaatatgacttctccaacactcctggatgccaaccccatggagaacccagcactgtttaatgacatcaagattgagcccccagaagaacttttggctagtgatttcagcctgccccaagtggaaccagttgacctctcctttcacaagcccaaggctcctctccagcctgctagcatgctacaagctccaatacgtccccccaagccacagtcttctccccagacccttgtggtgtccacgtcaacatctgacatgagcacttcagcaaacattcctactgttctgaccccaggctctgtcctgacctcctctcagagcactggtagccagcagatcttacatgtcattcacactatcccctcagtcagtctgccaaataagatgggtggcctgaagaccatcccagtggtagtgcagtctctgcccatggtgtatactactttgcctgcagatgggggccctgcagccattacagtcccactcattggaggagatggtaaaaatgctggatcagtgaaagttgaccccacctccatgtctccactggaaattccaagtgacagtgaggagagtacaattgagagtggatcctcagccttgcagagtctgcagggactacagcaagaaccagcagcaatggcccaaatgcagggagaagagtcgcttgacttgaagagaagacggattcaccaatgtgactttgcaggatgcagcaaagtgtacaccaaaagctctcacctgaaagctcaccgcagaatccatacaggagagaagccttataaatgcacctgggatggctgctcctggaaatttgctcgctcagatgagctcactcgccatttccgcaagcacacaggcatcaagccttttcggtgcacagactgcaaccgcagcttttctcgttctgaccacctgtccctgcatcgccgtcgccatgacaccatgtgagccgcacaggtcacactagagaagctgcgctggtatctttcctggtcgtgtgctgaggttgggacaattttttcctctttgacttcagcttgcatatggggttgaagcagcccactgagccaagttgaggagactggaggaaaagagagctggtctcccgtggggctcttcatat

SEQ ID NO: 147089 - DNA, 1908 bp, Homo sapiens
  Payload ID: 9098
  Gene Symbol: KLF8
  Gene Name: Kruppel-like factor 8
  ENST ID: ENST00000358094
  CDS Start-End: 147-833
acgagaagacgagaacgcgtcgccctgcgctatgtcagaatggggcgggtgtgaggggaacagctctcttgcgatcagctcaggagtatgagcctcccggaggacggcatgagttctggacacttcaggagtcctcagctagtgacatggtcgatatggataaactcataaacaacttggaggtccaacttaattcagaaggtggctcaatgcaggtattcaagcaggtcactgcttctgttcggaacagagatccccctgagatagaatacagaagtaatatgacttctccaacactcctggatgccaaccccatggagaacccagcactgtttaatgacatcaagattgagcccccagaagaacttttggctagtgatttcagcctgccccaagtggaaccagttgacctctcctttcacaagcccaaggctcctctccagcctgctagcatgctacaagctccaatacgtccccccaagccacagtcttctccccagacccttgtggtgtccacgtcaacatctgacatgagcacttcagcaaacattcctactgttctgaccccaggctctgtcctgacctcctctcagagcactggtagccagcagatcttacatgtcattcacactatcccctcagtcagtctgccaaataagatgggtggcctgaagaccatcccagtggtagtgcagtctctgcccatggtgtatactactttgcctgcagatgggggccctgcagccattacagtcccactcattggaggagatggtaaaaatgctggatcaggagcacaaaggccaaggtggatgttctcacatctggactaatcctagaatttgattttaggacagccaggagctattcatgaaagttgaccccacctccatgtctccactggaaattccaagtgacagtgaggagagtacaattgagagtggatcctcagccttgcagagtctgcagggactacagcaagaaccagcagcaatggcccaaatgcagggagaagagtcgcttgacttgaagagaagacggattcaccaatgtgactttgcaggatgcagcaaagtgtacaccaaaagctctcacctgaaagctcaccgcagaatccatacaggagagaagccttataaatgcacctgggatggctgctcctggaaatttgctcgctcagatgagctcactcgccatttccgcaagcacacaggcatcaagccttttcggtgcacagactgcaaccgcagcttttctcgttctgaccacctgtccctgcatcgccgtcgccatgacaccatgtgagccgcacaggtcacactagagaagctgcgctggtatctttcctggtcgtgtgctgaggttgggacaattttttcctctttgacttcagcttgcatatggggttgaagcagcccactgagccaagttgaggagactggaggaaaagagagctggtctcccgtggggctcttcatattctaccttcacttctccactgtccagacccgtttttttcaacctccacatgggttgaattccagtgtggcacccatggctgccttcccatccccccctgctctgaaataggacatttttcctacagtaacaaaacaggaatcaaactcaaggctgtgaacaaacatacgctgctttattctttccaatttttctcttgttttctagaactcttatccatatgtttttaaaataagtacctaaaagtggtttgatagtgtcctaaacgacttttttaacttcctaaatggaaagagcataacaatgtagttgattggtaagatttacagggatttggtttctgagtttgaggcacattcccagtgaataagctgagtcccataccacactcaaaaggttttaataaatctaatcctatttcttcttaaa

SEQ ID NO: 147090 - DNA, 1150 bp, Homo sapiens
  Payload ID: 9098
  Gene Symbol: KLF8
  Gene Name: Kruppel-like factor 8
  ENST ID: ENST00000635281
  CDS Start-End: 65-823
cctgcgctatgtcagaatggggcgggtgtgaggggaacagctctcttgcgatcagctcaggagtatgagcctcccggaggacggcatgagttctggacacttcaggagtcctcagctagtgacatggtcggtcactgcttctgttcggaacagagatccccctgagatagaatacagaagtaatatgacttctccaacactcctggatgccaaccccatggagaacccagcactgtttaatgacatcaagattgagcccccagaagaacttttggctagtgatttcagcctgccccaagtggaaccagttgacctctcctttcacaagcccaaggctcctctccagcctgctagcatgctacaagctccaatacgtccccccaagccacagtcttctccccagacccttgtggtgtccacgtcaacatctgacatgagcacttcagcaaacattcctactgttctgaccccaggctctgtcctgacctcctctcagagcactggtagccagcagatcttacatgtcattcacactatcccctcagtcagtctgccaaataagatgggtggcctgaagaccatcccagtggtagtgcagtctctgcccatggtgtatactactttgcctgcagatgggggccctgcagccattacagtcccactcattggaggagatggtaaaaatgctggatcagtgaaagttgaccccacctccatgtctccactggaaattccaagtgacagtgaggagagtacaattgagagtggatcctcagccttgcagagtctgcagggactacagcaagagagagaagccttataaatgcacctgggatggctgctcctggaaatttgctcgctcagatgagctcactcgccatttccgcaagcacacaggcatcaagccttttcggtgcacagactgcaaccgcagcttttctcgttctgaccacctgtccctgcatcgccgtcgccatgacaccatgtgagccgcacaggtcacactagagaagctgcgctggtatctttcctggtcgtgtgctgaggttgggacaattttttcctctttgacttcagcttgcatatggggttgaagcagcccactgagccaagttgaggagactggaggaaaagagagctggtctcccgt

SEQ ID NO: 147091 - DNA, 5175 bp, Homo sapiens
  Payload ID: 9099
  Gene Symbol: KLF9
  Gene Name: Kruppel-like factor 9
  Uniprot ID: Q13886
  ENST ID: ENST00000377126
  CDS Start-End: 1262-1996
tgacataatggggtttttttaattatagattcacactgcatttattcatcacccctgtcctctcatccataactcaaatttactaccagcaacacaaaatacaaagatgtgtccagtttcactacagctcttcgcgtttacaagtgtcgagcgcttgctttcggaacgcccttgtgattggccgagccaatgccagtgacatcaaccaacttacttttgattggaaggctggttgctgggactgtagcgtttgcaggaagtcacttaactgtttgggagctggaaaaccgaagctgaagttctcttttgccataggaacgagcgcaactgactaggaaagatgtgtcccaaagctccgcaagctggaacgtgagccaggaggcccggaccggccacgggaccgcgaggcactccgaaagtgtgcggctgccccttccctgcctcccagctgttacccttttaaatgtcagtgttcgaggctgtaggggtagcacgaggcagcgaaacggaacagtcggattggccgcacgcctcagttctagacgcacctctccaccgaaggccgttctgactggcagggggagaaagtaaacagagttgaatcaccctccccactggccaattggagggggtttggtttgtgacgtgatgggattctgcgaaattgttactgagcaagagaatgccggaacggtgcggaccggccggagcaggggttcagaagccgtcagtggactcgggaaaaagtgtctcttagacctggcgctcggcgggaccctcgccacccgcgtcggggtgatcgggtgaatgtcctggggctttggctcgacggcgaggcggccgagggcgtgcacctctcttgcagtttcctctcccagcgcctcgggggcgttttcagtcgaataaacttgcgaccgccacgtgtggcatctttccaagggagccggctcagaggggccggcgcgcccgtcgggggatcgcggccggcgcggggcaggggcggcggctagaggcggcggcgcggcggagcccggggccgtggatgctgcgtgcggaggcgctgccggttacgtaaagatgaggggctgaggtcgcctcggcgctcctgcgagtcggaagcgccccgcgcccccgcccccttggccgccgcgccgtgccgcgccgcgccgcgctcgtcgtccgaggccagggcagggcgagccgaacctccgcagccaccgccaagtttgtccgcgccgcctgggctgccgtcgcccgcaccatgtccgcggccgcctacatggacttcgtggctgcccagtgtctggtttccatttcgaaccgcgctgcggtgccggagcatggggtcgctccggacgccgagcggctgcgactacctgagcgcgaggtgaccaaggagcacggtgacccgggggacacctggaaggattactgcacactggtcaccatcgccaagagcttgttggacctgaacaagtaccgacccatccagaccccctccgtgtgcagcgacagtctggaaagtccagatgaggatatgggatccgacagcgacgtgaccaccgaatctgggtcgagtccttcccacagcccggaggagagacaggatcctggcagcgcgcccagcccgctctccctcctccatcctggagtggctgcgaaggggaaacacgcctccgaaaagaggcacaagtgcccctacagtggctgtgggaaagtctatggaaaatcctcccatctcaaagcccattacagagtgcatacaggtgaacggccctttccctgcacgtggccagactgccttaaaaagttctcccgctcagacgagctgacccgccactaccggacccacactggggaaaagcagttccgctgtccgctgtgtgagaagcgcttcatgaggagtgaccacctcacaaagcacgcccggcggcacaccgagttccaccccagcatgatcaagcgatcgaaaaaggcgctggccaacgctttgtgaggtgctgcccgtggaagccagggagggatggaccccgaaaggagaaaagtactcccaggaaacagacgcgtgaaaactgagccccagaagaggcacacttgacggcacaggaagtcactgctctttggtcaatattctgattttcctctccctgcattgtttttaaaaagcacattgtagcctaagatcaaagtcaacaacactcggtccccttgaagaggcaactctctgaacccgtctctgactgttggagggaaggcaaatgcttttgggttttttggtttttgtttttgtttttttttctccttttatttttttgcgggggagggtagggagtgggtgggggggaggggggtaaggccaagactggggtagaattttaaagattcaacactggtgtacatatgtccgctgggtgagttgacctgtggcctcgcacagtgattctgggccctttatgcttgctgtctctcagaattgttttcttaccttttaatgtaatgacgagtgtgcttcagtttgtttagcaaaaccactctcttgaatcacgttaacttttgagattaaaaaaaaaaacgccatagcacagctgtctttatgcaagcaagagcacatctactccagcatgatctgtcatctaaagacttgaaaacaaaaaacagttacttatagtcaatgggtaagcagagtctgaatttatactaatcaagacaaacctttgaaaggttacactaagtacagaacttttaaaccttgctttgtatgagttgtactttttgaacataagctgcacttttattttctaatgcagaggatgaataagttaaatacatgctttgaggatagaagcagatgttctgtttggcaccacgttataatctgcttattttacaatatacacgtttccctaagaaatcatggcagagatgtgagggcagaatatacacaacagatgctgaaggagaaggagggtagtgttttgcaaaagaaaaagaaaagaaccaacagaattttaactctattaacttttccaaattttcctatgcttttagttaacatcattattgtatcctaatgccactaggggagagagcttttgactctgttgggttttatttgaatgtgtgcataacagtaatgagatctggaaacacctattttttggggaaaaaggtttgttggtctccttcctgtgttcctacaaaactcccactctcaggtgcaagagttatgtagaaggaaagggagctgaaataggaacagaaaaatcaacccctataactagtgaacaccaagggaaaataccacaatgatttcagaggagactctgcaaaatcgtcccttgtggagaatgcaggcaacatggaatactaggaatgaaatcacatcactgtatcttttacatcaatagcctcaccactaatatatcttgtatctaggtgtctataatggctgaaaccactacatccatctatgccatttacctgaaaacttaactgtggcctttatgaggccagaaaagtgaactgagttttcgtagttaagacctcaaatgaggggagtcagcagtgatcatgggggaaatgtttacattttttttttcttcagaagtaacgctttctgatgattttatctgatatttaaaacagggagctatggtgcactctagtttatacttgcgctctgaaatgtgtaaacatagggtgcctacctatttcacctgacccatactcgtttctgattcagaatcagtgtgggctcctgcagtgggcgcgggtcacggctgactccaacttccaatacaacagccatcactagcacagtgtttttttgtttaaccaacgtagttgtattagtagttctataaagagaactgcttttaacattagggactgggagcagtccatgggataaaaaggaaagtgttttctcacgagaaaacatgtcaggaaaaataaagaacactttctacctctgtttcagatttttgaaacacttattttaaaccaaattttaatttctgtgtccaaaataagttttaaggacatctgttcttccatacgaaataggttaggctgcctatttctcactgagctcatggaatggttctgcttatgatactctgcacgctgccttttagtgagtgaggagtttggggttgcctagcaacttgctaacttgtaaaaagtcatctttccctcacagaaagaaacgaaagaaagcaaagcaaagtcagtgaaagacaatctttatagtttcaggagtaaatctaaatgtggcttttgtcaagcacttagatggatataaatgcagcaacttgttttaaaaaaatgcacaatttacttcccaaaaaagttgttacttgccttttcaagttgttgacaaacacacatttgatattctcttatatgttatagtaatgtaacgtataaactcaagcctttttattctttgtgattaaatcctgttttaaaatgtcacaaaacaggaaccagcattctaattagatttactatatcaagatatggttcaaataggactactagagttcattgaacactaaaactatgaaacaattactttttatattaaaaagaccatggatttaacttatgaaaatccaaatgcaggatagtaatttttgtttacttttttaaccaaactgaatttttgaaagactattgcaggtgtttaaaaagaaagaaaagttgttttatctaatactgtaagtagttgtcatattctggaaaatttaatagttttagagttaagatatctcctctctttggttagggaagaagaaagcccttcaccattgtggaatgatgccctggctttaaggtttagctccacatcatgcttctcttgagaattctatttggtagttacaattacagaaactgattagtttgtcagtttgcagatagatttagcacagtactcatcactcggatagattgagatgttctttcacatcagatgatctgtaacactgtaagatactgatctttacaactgtttaatcagttttatttttgtacagtattagtgacctaagttattttgctgtcccgtttttgtaaatcaaatgaaattataaaagaggattctgacagtaggtattttgtacatatgtatatatgttgtccaaataaaaataataaatgataaagactgaa

SEQ ID NO: 147092 - DNA, 1714 bp, Homo sapiens
  Payload ID: 9100
  Gene Symbol: KTI12
  Gene Name: KTI12 chromatin associated homolog
  Uniprot ID: Q96EK9
  ENST ID: ENST00000371614
  CDS Start-End: 56-1120
gcgtacaacccggaagttggcgcagcgcggttgccaatggtcgctccctgagaggatgccgctcgtggtgttttgcgggctgccgtacagcggcaagagccggcgtgctgaagagttgcgcgtggcgctggctgccgagggccgcgcggtgtacgtggtggacgacgcagctgtcctgggcgcagaggacccagcggtgtacggcgattctgcccgtgagaaggcattgcgtggagctctgcgagcctccgtggaacggcgcctgagtcgccacgacgtggtcatcctggactcgcttaactacatcaaaggtttccgttacgagctctactgcctggcacgggcggcgcgcaccccgctctgcctggtctactgcgtacggcccggcggcccgatcgcgggacctcaggtggcgggcgcgaacgagaaccctggccggaacgtcagtgtgagttggcggccacgcgctgaggaggacgggagagcccaggcggcgggcagcagcgtcctcagggaactgcatactgcggactctgtagtaaatggaagtgcccaggccgacgtacccaaggaactggagcgagaagaatccggggctgcggagtctccagctcttgtgactccggattcagagaaatctgcaaagcatgggtccggtgccttttactctcccgaactcctggaggccctaacgctgcgctttgaggctcccgattctcggaatcgctgggaccggcctttattcactttggtgggcctagaggagccgttgcccctggcggggatccgctctgccctgtttgagaaccgggccccaccaccccatcagtctacgcagtcccagcccctcgcctccggcagctttctgcaccagttggaccaggtcacgagtcaagtactggccggattgatggaagcgcagaagagcgctgtccccggggacttgctcacgcttcctggtaccacagagcacttgcggtttacccggcccttgaccatggcagaactgagtcgccttcgtcgccagtttatttcgtacactaaaatgcatcccaacaatgagaacttgccgcaactggccaacatgtttcttcagtatttgagccagagcctgcactgaccagaggaggtaggggggaagccatggcttctgatctccactccactttatttctctgggaaaaataggctgcaggtctccagagcatatcgatgcagtactgtactagagctgttgtgactgattcactcaaactttcctgcatacccctgtgccaggccttgggtttacagcataagttcagactaaagagaatggagaactattgtggtgcaacctggcaaatccctcagaggacagagctaaggtggacagggattacctagattggatcctacttgggctatcacagagcattgaccattggcttccctcatctgaggcgtgggagagcagactggatagatgagaattgttttaaaacaattgtgaacagaaactgaagatggtacagttctacatctgcacctgcccttttttcataccacaaaagtattttttgagtactgtactgactttttgctagtttctattctgggaccgagttcacagataaatccattggtttgtatccttgagaaactttgtttttgtggaagtaagaaagttatctactagattatttcctctaataaaatcttttaaaatagtcta

SEQ ID NO: 147093 - DNA, 2014 bp, Homo sapiens
  Payload ID: 9101
  Gene Symbol: KCNIP1
  Gene Name: Kv channel interacting protein 1
  ENST ID: ENST00000328939
  CDS Start-End: 538-1188
gctggcagcaggcagcaggcagcaggcgggcgcgctgtggctccgcgccgcgcggtccgggctctgttcattcatgattggtactcggccctccgagacccagcccgagcgcagggaggggagccgagtgtgcggcaggaggggcgggcggacggcggctcccgcaccgcacgcggcgctggctcggcagcctcggccgggcggccgctctggccccgtgtccagtgccaggcaggcttcagggcaccgtcctcggccctgggcgagggaaccgccgggccgggtcctcgcgcggggaagcggttccgaaggctcgcggggagcggctagccctgagtccctgcatgtgcggggctgaagaaggaagccagaagcctcctagcctcgcctccacgcttgctgaataccaagctgcaggcgagctgccgggcgcttttctctcctccaattcagagtagacaaaccacggggatttctttccagggtaggggaggggccgggcccggggtcccaactcgcactcaagtcttcgctgccatgggggccgtcatgggcaccttctcatctctgcaaaccaaacaaaggcgaccctcgaaagataagattgaagatgagctggagatgaccatggtttgccatcggcccgagggactggagcagctcgaggcccagaccaacttcaccaagagggagctgcaggtcctttatcgaggcttcaaaaatgagtgccccagtggtgtggtcaacgaagacacattcaagcagatctatgctcagtttttccctcatggagatgccagcacgtatgcccattacctcttcaatgccttcgacaccactcagacaggctccgtgaagttcgaggactttgtaaccgctctgtcgattttattgagaggaactgtccacgagaaactaaggtggacatttaatttgtatgacatcaacaaggacggatacataaacaaagaggagatgatggacattgtcaaagccatctatgacatgatggggaaatacacatatcctgtgctcaaagaggacactccaaggcagcatgtggacgtcttcttccagaaaatggacaaaaataaagatggcatcgtaactttagatgaatttcttgaatcatgtcaggaggacgacaacatcatgaggtctctccagctgtttcaaaatgtcatgtaactggtgacactcagccattcagctctcagagacattgtactaaacaaccaccttaacaccctgatctgcccttgttctgattttacacaccaactcttgggacagaaacaccttttacactttggaagaattctctgctgaagactttctatggaacccagcatcatgtggctcagtctctgattgccaactcttcctctttcttcttcttgagagagacaagatgaaatttgagtttgttttggaagcatgctcatctcctcacactgctgccctatggaaggtccctctgcttaagcttaaacagtagtgcacaaaatatgctgcttacgtgcccccagcccactgcctccaagtcaggcagaccttggtgaatctggaagcaagaggacctgagccagatgcacaccatctctgatggcctcccaaaccaatgtgcctgtttctcttcctttggtgggaagaatgagagttatccagaacaattaggatctgtcatgaccagattgggagagccagcacctaacatatgtgggataggactgaattattaagcatgatattgtctgatgacccaaactgcccatgtcatttgtttccagaaacgaggaccaataattctctcacactggcatttgtgctggtagtacaagtcctttaatatgtccaggaagggagccattgcccagtggtccatatctccaccacatcccctgcttgagcccagcgctgcatgtccctcccaagaagtccagaatgcctgcaaattgctgtaattttataccatgttctaaccaataaacagaactatttcttacactctcaa

SEQ ID NO: 147094 - DNA, 1197 bp, Homo sapiens
  Payload ID: 9101
  Gene Symbol: KCNIP1
  Gene Name: Kv channel interacting protein 1
  Uniprot ID: Q9NZI2
  ENST ID: ENST00000377360
  CDS Start-End: 391-1068
aagaaagacagtcagcaaagcctgggagagctccagctcctccctccctgctctgctcaacttcactctcctcctcggttcccttggagtaccttgtgccccggcagtgctgtcccggccctggcatcctgaggtcctcccgtggtgaggacttaagtggacagcaggagtgggtggagagagggagggagagtttgccctgcaggctctctggatgcagaagccagactcgctgcagaggcagctgtgctgttcccggagcctggcttcaggggtgcatccgtcactcagggttcattcacccaggcaggctccaagttcctggggtgcacaaggtgggcactgtcccttctgggtgctgacagcagagcctggctcccctccgccaccatgagcggctgctccaaaagatgcaagcttgggttcgtgaaatttgcccagaccatctttaagctcatcactgggaccctcagcaaagataagattgaagatgagctggagatgaccatggtttgccatcggcccgagggactggagcagctcgaggcccagaccaacttcaccaagagggagctgcaggtcctttatcgaggcttcaaaaatgagtgccccagtggtgtggtcaacgaagacacattcaagcagatctatgctcagtttttccctcatggagatgccagcacgtatgcccattacctcttcaatgccttcgacaccactcagacaggctccgtgaagttcgaggactttgtaaccgctctgtcgattttattgagaggaactgtccacgagaaactaaggtggacatttaatttgtatgacatcaacaaggacggatacataaacaaagaggagatgatggacattgtcaaagccatctatgacatgatggggaaatacacatatcctgtgctcaaagaggacactccaaggcagcatgtggacgtcttcttccagaaaatggacaaaaataaagatggcatcgtaactttagatgaatttcttgaatcatgtcaggaggacgacaacatcatgaggtctctccagctgtttcaaaatgtcatgtaactggtgacactcagccattcagctctcagagacattgtactaaacaaccaccttaacaccctgatctgcccttgttctgattttacacaccaactcttgggacagaaacaccttttacactttggaaga

SEQ ID NO: 147095 - DNA, 2249 bp, Homo sapiens
  Payload ID: 9101
  Gene Symbol: KCNIP1
  Gene Name: Kv channel interacting protein 1
  ENST ID: ENST00000390656
  CDS Start-End: 763-1425
gctggcagcaggcagcaggcagcaggcgggcgcgctgtggctccgcgccgcgcggtccgggctctgttcattcatgattggtactcggccctccgagacccagcccgagcgcagggaggggagccgagtgtgcggcaggaggggcgggcggacggcggctcccgcaccgcacgcggcgctggctcggcagcctcggccgggcggccgctctggccccgtgtccagtgccaggcaggcttcagggcaccgtcctcggccctgggcgagggaaccgccgggccgggtcctcgcgcggggaagcggttccgaaggctcgcggggagcggctagccctgagtccctgcatgtgcggggctgaagaaggaagccagaagcctcctagcctcgcctccacgcttgctgaataccaagctgcaggcgagctgccgggcgcttttctctcctccaattcagagtagacaaaccacggggatttctttccagggtaggggaggggccgggcccggggtcccaactcgcactcaagtcttcgctgccatgggggccgtcatgggcaccttctcatctctgcaaaccaaacaaaggcgaccctcgaaagaactaccttaaattaatttgttgaaaggacagatggatggatggttgatggaagtagcaggcttccagcagcaggggatggagtgagtgtgtggataccgctggatcagcagaaggttataccattttagagtaactatctcggacttcggagagttcctggataagattgaagatgagctggagatgaccatggtttgccatcggcccgagggactggagcagctcgaggcccagaccaacttcaccaagagggagctgcaggtcctttatcgaggcttcaaaaatgagtgccccagtggtgtggtcaacgaagacacattcaagcagatctatgctcagtttttccctcatggagccctgccttgtttggaaggttctccctgtgtggaattcctgcccccatcacctgccctccttttctgccttgtagatgccagcacgtatgcccattacctcttcaatgccttcgacaccactcagacaggctccgtgaagttcgaggactttgtaaccgctctgtcgattttattgagaggaactgtccacgagaaactaaggtggacatttaatttgtatgacatcaacaaggacggatacataaacaaagaggagatgatggacattgtcaaagccatctatgacatgatggggaaatacacatatcctgtgctcaaagaggacactccaaggcagcatgtggacgtcttcttccagaaaatggacaaaaataaagatggcatcgtaactttagatgaatttcttgaatcatgtcaggaggacgacaacatcatgaggtctctccagctgtttcaaaatgtcatgtaactggtgacactcagccattcagctctcagagacattgtactaaacaaccaccttaacaccctgatctgcccttgttctgattttacacaccaactcttgggacagaaacaccttttacactttggaagaattctctgctgaagactttctatggaacccagcatcatgtggctcagtctctgattgccaactcttcctctttcttcttcttgagagagacaagatgaaatttgagtttgttttggaagcatgctcatctcctcacactgctgccctatggaaggtccctctgcttaagcttaaacagtagtgcacaaaatatgctgcttacgtgcccccagcccactgcctccaagtcaggcagaccttggtgaatctggaagcaagaggacctgagccagatgcacaccatctctgatggcctcccaaaccaatgtgcctgtttctcttcctttggtgggaagaatgagagttatccagaacaattaggatctgtcatgaccagattgggagagccagcacctaacatatgtgggataggactgaattattaagcatgatattgtctgatgacccaaactgcccatgtcatttgtttccagaaacgaggaccaataattctctcacactggcatttgtgctggtagtacaagtcctttaatatgtccaggaagggagccattgcccagtggtccatatctccaccacatcccctgcttgagcccagcgctgcatgtccctcccaagaagtccagaatgcctgcaaattgctgtaattttataccatgttctaaccaataaacagaactatttcttacactctc

SEQ ID NO: 147096 - DNA, 684 bp, Homo sapiens
  Payload ID: 9101
  Gene Symbol: KCNIP1
  Gene Name: Kv channel interacting protein 1
  Uniprot ID: Q9NZI2
  ENST ID: ENST00000411494
  CDS Start-End: 1-684
atgggggccgtcatgggcaccttctcatctctgcaaaccaaacaaaggcgaccctcgaaagacatcgcctggtggtattaccagtatcagagagataagattgaagatgagctggagatgaccatggtttgccatcggcccgagggactggagcagctcgaggcccagaccaacttcaccaagagggagctgcaggtcctttatcgaggcttcaaaaatgagtgccccagtggtgtggtcaacgaagacacattcaagcagatctatgctcagtttttccctcatggagatgccagcacgtatgcccattacctcttcaatgccttcgacaccactcagacaggctccgtgaagttcgaggactttgtaaccgctctgtcgattttattgagaggaactgtccacgagaaactaaggtggacatttaatttgtatgacatcaacaaggacggatacataaacaaagaggagatgatggacattgtcaaagccatctatgacatgatggggaaatacacatatcctgtgctcaaagaggacactccaaggcagcatgtggacgtcttcttccagaaaatggacaaaaataaagatggcatcgtaactttagatgaatttcttgaatcatgtcaggaggacgacaacatcatgaggtctctccagctgtttcaaaatgtcatgtaa

SEQ ID NO: 147097 - DNA, 726 bp, Homo sapiens
  Payload ID: 9101
  Gene Symbol: KCNIP1
  Gene Name: Kv channel interacting protein 1
  Uniprot ID: Q9NZI2
  ENST ID: ENST00000434108
  CDS Start-End: 1-726
atgggggccgtcatgggcaccttctcatctctgcaaaccaaacaaaggcgaccctcgaaagataagattgaagatgagctggagatgaccatggtttgccatcggcccgagggactggagcagctcgaggcccagaccaacttcaccaagagggagctgcaggtcctttatcgaggcttcaaaaatgagtgccccagtggtgtggtcaacgaagacacattcaagcagatctatgctcagtttttccctcatggagccctgccttgtttggaaggttctccctgtgtggaattcctgcccccatcacctgccctccttttctgccttgtagatgccagcacgtatgcccattacctcttcaatgccttcgacaccactcagacaggctccgtgaagttcgaggactttgtaaccgctctgtcgattttattgagaggaactgtccacgagaaactaaggtggacatttaatttgtatgacatcaacaaggacggatacataaacaaagaggagatgatggacattgtcaaagccatctatgacatgatggggaaatacacatatcctgtgctcaaagaggacactccaaggcagcatgtggacgtcttcttccagaaaatggacaaaaataaagatggcatcgtaactttagatgaatttcttgaatcatgtcaggaggacgacaacatcatgaggtctctccagctgtttcaaaatgtcatgtaa

SEQ ID NO: 147098 - DNA, 639 bp, Homo sapiens
  Payload ID: 9101
  Gene Symbol: KCNIP1
  Gene Name: Kv channel interacting protein 1
  ENST ID: ENST00000517344
  CDS Start-End: 189-317
caggctctctggatgcagaagccagactcgctgcagaggcagctgtgctgttcccggagcctggcttcaggggtgcatccgtcactcagggttcattcacccaggcaggctccaagttcctggggtgcacaaggtgggcactgtcccttctgggtgctgacagcagagcctggctcccctccgccaccatgagcggctgctccaaaagatgcaagcttgggttcgtgaaatttgcccagaccatctttaagctcatcactgggaccctcagcaaagatggagtcaaaagtggaactggggcccgcagagccggatagcttgggcagtacgtgtgtgcacctgcaggctgtggagacaggtatttccatggagctcactcgccctgcctctcatccaggcctgaaaatcatagagcatcccgctggccatctgcatcagcccgacccccacaggatagaagactggcacatccaagttgctccttccacaccctctccccactgaggcctcgtctcctccgccctgtggccaattgaagactcagcatcatcaagactggagggacagagcatttgaatcatcagacgctgggccagacgtcaccccacgcgttttctcattttatcgtcctaagaagcc

SEQ ID NO: 147099 - DNA, 1845 bp, Homo sapiens
  Payload ID: 9101
  Gene Symbol: KCNIP1
  Gene Name: Kv channel interacting protein 1
  Uniprot ID: Q9NZI2
  ENST ID: ENST00000520740
  CDS Start-End: 460-1026
ggctagccctgagtccctgcatgtgcggggctgaagaaggaagccagaagcctcctagcctcgcctccacgcttgctgaataccaagctgcaggcgagctgccgggcgcttttctctcctccaattcagagtagacaaaccacggggatttctttccagggtaggggaggggccgggcccggggtcccaactcgcactcaagtcttcgctgccatgggggccgtcatgggcaccttctcatctctgcaaaccaaacaaaggcgaccctcgaaagaactaccttaaattaatttgttgaaaggacagatggatggatggttgatggaagtagcaggcttccagcagcaggggatggagtgagtgtgtggataccgctggatcagcagaaggttataccattttagagtaactatctcggacttcggagagttcctggataagattgaagatgagctggagatgaccatggtttgccatcggcccgagggactggagcagctcgaggcccagaccaacttcaccaagagggagctgcaggtcctttatcgaggcttcaaaaatgagtgccccagtggtgtggtcaacgaagacacattcaagcagatctatgctcagtttttccctcatggagatgccagcacgtatgcccattacctcttcaatgccttcgacaccactcagacaggctccgtgaagttcgaggactttgtaaccgctctgtcgattttattgagaggaactgtccacgagaaactaaggtggacatttaatttgtatgacatcaacaaggacggatacataaacaaagaggagatgatggacattgtcaaagccatctatgacatgatggggaaatacacatatcctgtgctcaaagaggacactccaaggcagcatgtggacgtcttcttccagaaaatggacaaaaataaagatggcatcgtaactttagatgaatttcttgaatcatgtcaggaggacgacaacatcatgaggtctctccagctgtttcaaaatgtcatgtaactggtgacactcagccattcagctctcagagacattgtactaaacaaccaccttaacaccctgatctgcccttgttctgattttacacaccaactcttgggacagaaacaccttttacactttggaagaattctctgctgaagactttctatggaacccagcatcatgtggctcagtctctgattgccaactcttcctctttcttcttcttgagagagacaagatgaaatttgagtttgttttggaagcatgctcatctcctcacactgctgccctatggaaggtccctctgcttaagcttaaacagtagtgcacaaaatatgctgcttacgtgcccccagcccactgcctccaagtcaggcagaccttggtgaatctggaagcaagaggacctgagccagatgcacaccatctctgatggcctcccaaaccaatgtgcctgtttctcttcctttggtgggaagaatgagagttatccagaacaattaggatctgtcatgaccagattgggagagccagcacctaacatatgtgggataggactgaattattaagcatgatattgtctgatgacccaaactgcccatgtcatttgtttccagaaacgaggaccaataattctctcacactggcatttgtgctggtagtacaagtcctttaatatgtccaggaagggagccattgcccagtggtccatatctccaccacatcccctgcttgagcccagcgctgcatgtccctcccaagaagtccagaatgcctgcaaattgctgtaattttataccatgttctaaccaataaacagaactatttcttaca

SEQ ID NO: 147100 - DNA, 1448 bp, Homo sapiens
  Payload ID: 9101
  Gene Symbol: KCNIP1
  Gene Name: Kv channel interacting protein 1
  ENST ID: ENST00000616807
  CDS Start-End: 1-624
gacatcgcctggtggtattaccagtatcagagagataagattgaagatgagctggagatgaccatggtttgccatcggcccgagggactggagcagctcgaggcccagaccaacttcaccaagagggagctgcaggtcctttatcgaggcttcaaaaatgagtgccccagtggtgtggtcaacgaagacacattcaagcagatctatgctcagtttttccctcatggagatgccagcacgtatgcccattacctcttcaatgccttcgacaccactcagacaggctccgtgaagttcgaggactttgtaaccgctctgtcgattttattgagaggaactgtccacgagaaactaaggtggacatttaatttgtatgacatcaacaaggacggatacataaacaaagaggagatgatggacattgtcaaagccatctatgacatgatggggaaatacacatatcctgtgctcaaagaggacactccaaggcagcatgtggacgtcttcttccagaaaatggacaaaaataaagatggcatcgtaactttagatgaatttcttgaatcatgtcaggaggacgacaacatcatgaggtctctccagctgtttcaaaatgtcatgtaactggtgacactcagccattcagctctcagagacattgtactaaacaaccaccttaacaccctgatctgcccttgttctgattttacacaccaactcttgggacagaaacaccttttacactttggaagaattctctgctgaagactttctatggaacccagcatcatgtggctcagtctctgattgccaactcttcctctttcttcttcttgagagagacaagatgaaatttgagtttgttttggaagcatgctcatctcctcacactgctgccctatggaaggtccctctgcttaagcttaaacagtagtgcacaaaatatgctgcttacgtgcccccagcccactgcctccaagtcaggcagaccttggtgaatctggaagcaagaggacctgagccagatgcacaccatctctgatggcctcccaaaccaatgtgcctgtttctcttcctttggtgggaagaatgagagttatccagaacaattaggatctgtcatgaccagattgggagagccagcacctaacatatgtgggataggactgaattattaagcatgatattgtctgatgacccaaactgcccatgtcatttgtttccagaaacgaggaccaataattctctcacactggcatttgtgctggtagtacaagtcctttaatatgtccaggaagggagccattgcccagtggtccatatctccaccacatcccctgcttgagcccagcgctgcatgtccctcccaagaagtccagaatgcctgcaaattgctgtaattttataccatgttctaaccaataaacagaactatttcttacactctc

SEQ ID NO: 147101 - DNA, 555 bp, Homo sapiens
  Payload ID: 9102
  Gene Symbol: KCNIP2
  Gene Name: Kv channel interacting protein 2
  Uniprot ID: Q9NS61
  ENST ID: ENST00000239117
  CDS Start-End: 1-555
atgcggggccagggccgcaaggagagtttgtccgattcccgagacctggacggctcctacgaccagctcacggacagcgtggacgatgaatttgaattgtccaccgtgtgtcaccggcctgagggtctggagcagctgcaggagcaaaccaaattcacgcgcaaggagttgcaggtcctgtaccggggcttcaagaacgaatgtcccagcggaattgtcaatgaggagaacttcaagcagatttactcccagttctttcctcaaggagactccagcacctatgccacttttctcttcaatgcctttgacaccaaccatgatggctcggtcagttttgaggaaatgcttgacatcatgaagtccatctatgacatgatgggcaagtacacgtaccctgcactccgggaggaggccccaagggaacacgtggagagcttcttccagaagatggacagaaacaaggatggtgtggtgaccattgaggaattcattgagtcttgtcaaaaggtacagctccctgccctctacattaccctgacctggactcaggcctga

SEQ ID NO: 147102 - DNA, 2089 bp, Homo sapiens
  Payload ID: 9102
  Gene Symbol: KCNIP2
  Gene Name: Kv channel interacting protein 2
  Uniprot ID: Q9NS61
  ENST ID: ENST00000348850
  CDS Start-End: 33-710
tggagcttagacgccgagctcgccgccaaaccatgaaccgatgcccccgcaggtgccggagcccgctggggcaggcagcgcgatccctctaccagctggtgactgggtcgctgtccccagacagcgtggacgatgaatttgaattgtccaccgtgtgtcaccggcctgagggtctggagcagctgcaggagcaaaccaaattcacgcgcaaggagttgcaggtcctgtaccggggcttcaagaacgaatgtcccagcggaattgtcaatgaggagaacttcaagcagatttactcccagttctttcctcaaggagactccagcacctatgccacttttctcttcaatgcctttgacaccaaccatgatggctcggtcagttttgaggactttgtggctggtttgtccgtgattcttcggggaactgtagatgacaggcttaattgggccttcaacctgtatgaccttaacaaggacggctgcatcaccaaggaggaaatgcttgacatcatgaagtccatctatgacatgatgggcaagtacacgtaccctgcactccgggaggaggccccaagggaacacgtggagagcttcttccagaagatggacagaaacaaggatggtgtggtgaccattgaggaattcattgagtcttgtcaaaaggatgagaacatcatgaggtccatgcagctctttgacaatgtcatctagcccccaggagagggggtcagtgtttcctggggggaccatgctctaaccctagtccaggcggacctcacccttctcttcccaggtctatcctcatcctacgcctccctgggggctggagggatccaagagcttggggattcagtagtccagatctctggagctgaaggggccagagagtgggcagagtgcatctcggggggtgttcccaactcccaccagctctcacccccttcctgcctgacacccagtgttgagagtgcccctcctgtaggaattgagcggttccccacctcctacccctactctagaaacacactagacagatgtctcctgctatggtgcttcccccatccctgacctcataaacatttcccctaagactcccctctcagagagaatgctccattcttggcactggctggcttctcagaccagccattgagagccctgtgggagggggacaagaatgtatagggagaaatcttgggcctgagtcaatggataggtcctaggaggtggctggggttgagaatagaagggcctggacagattatgattgctcaggcataccaggttatagctccaagttccacaggtctgctaccacaggccatcaaaatataagtttccaggctttgcagaagaccttgtctccttagaaatgccccagaaattttccacaccctcctcggtatccatggagagcctggggccagatatctggctcatctctggcattgcttcctctccttccttcctgcatgtgttggtggtggttgtggtgggggaatgtggatgggggatgtcctggctgatgcctgccaaaatttcatcccaccctccttgcttatcgtccctgttttgagggctatgacttgagtttttgtttcccatgttctctatagacttgggaccttcctgaacttggggcctatcactccccacagtggatgccttagaagggagagggaaggagggaggcaggcatagcatctgaacccagtgtgggggcattcactagaatcttcaatcaacctgggctctccccaccccaccccagataacctcctcagttccctagggtctcttcttgcttgactcaatctacccagagatgccccttagcacacctagagggcagggaccataggacccaggttccaaccccattgtcagcaccccagccatgcggccaccccttagcacacctgctcgtcccatttagcttaccctcccagttggccagaatctgaggggagagcccccagagagcccccttccccatcagaagactgttgactgctttgcattttgggctcttctatatattttgtaaagtaagaaatataccagatctaataaaacacaatggctatgca

SEQ ID NO: 147103 - DNA, 684 bp, Homo sapiens
  Payload ID: 9102
  Gene Symbol: KCNIP2
  Gene Name: Kv channel interacting protein 2
  Uniprot ID: Q9NS61
  ENST ID: ENST00000353068
  CDS Start-End: 1-684
atgcggggccagggccgcaaggagagtttgtccgattcccgagacctggacggctcctacgaccagctcacggacagcgtggacgatgaatttgaattgtccaccgtgtgtcaccggcctgagggtctggagcagctgcaggagcaaaccaaattcacgcgcaaggagttgcaggtcctgtaccggggcttcaagaaccctggtgccctctccttccaggaatgtcccagcggaattgtcaatgaggagaacttcaagcagatttactcccagttctttcctcaaggagactccagcacctatgccacttttctcttcaatgcctttgacaccaaccatgatggctcggtcagttttgaggactttgtggctggtttgtccgtgattcttcggggaactgtagatgacaggcttaattgggccttcaacctgtatgaccttaacaaggacggctgcatcaccaaggaggaaatgcttgacatcatgaagtccatctatgacatgatgggcaagtacacgtaccctgcactccgggaggaggccccaagggaacacgtggagagcttcttccagaagatggacagaaacaaggatggtgtggtgaccattgaggaattcattgagtcttgtcaaaaggatgagaacatcatgaggtccatgcagctctttgacaatgtcatctag

SEQ ID NO: 147104 - DNA, 663 bp, Homo sapiens
  Payload ID: 9102
  Gene Symbol: KCNIP2
  Gene Name: Kv channel interacting protein 2
  Uniprot ID: Q9NS61
  ENST ID: ENST00000343195
  CDS Start-End: 1-663
atgcggggccagggccgcaaggagagtttgtccgattcccgagacctggacggctcctacgaccagctcacggacagcgtggacgatgaatttgaattgtccaccgtgtgtcaccggcctgagggtctggagcagctgcaggagcaaaccaaattcacgcgcaaggagttgcaggtcctgtaccggggcttcaagaacgaatgtcccagcggaattgtcaatgaggagaacttcaagcagatttactcccagttctttcctcaaggagactccagcacctatgccacttttctcttcaatgcctttgacaccaaccatgatggctcggtcagttttgaggactttgtggctggtttgtccgtgattcttcggggaactgtagatgacaggcttaattgggccttcaacctgtatgaccttaacaaggacggctgcatcaccaaggaggaaatgcttgacatcatgaagtccatctatgacatgatgggcaagtacacgtaccctgcactccgggaggaggccccaagggaacacgtggagagcttcttccagaagatggacagaaacaaggatggtgtggtgaccattgaggaattcattgagtcttgtcaaaaggatgagaacatcatgaggtccatgcagctctttgacaatgtcatctag

SEQ ID NO: 147105 - DNA, 1989 bp, Homo sapiens
  Payload ID: 9102
  Gene Symbol: KCNIP2
  Gene Name: Kv channel interacting protein 2
  Uniprot ID: Q9NS61
  ENST ID: ENST00000356640
  CDS Start-End: 277-1089
gagggggcgggaggagagaggcagctcggctcggctccgcgctcagctccgctctgcctccggctctgcgctcacctgctgcctagtgttccctctcctgctccaggacctccgggtagacctcagaccccgggcccattcccagactcagcctcagcccggacttccccagccccgacagcacagtaggccgccagggggcgccgtgtgagcgccctatcccggccacccggcgccccctcccacggcccgggcgggagcggggcgccgggggccatgcggggccagggccgcaaggagagtttgtccgattcccgagacctggacggctcctacgaccagctcacgggccaccctccagggcccactaaaaaagcgctgaagcagcgattcctcaagctgctgccgtgctgcgggccccaagccctgccctcagtcagtgaaacattagccgccccagcctccctccgcccccacagaccccgcctgctggacccagacagcgtggacgatgaatttgaattgtccaccgtgtgtcaccggcctgagggtctggagcagctgcaggagcaaaccaaattcacgcgcaaggagttgcaggtcctgtaccggggcttcaagaacgaatgtcccagcggaattgtcaatgaggagaacttcaagcagatttactcccagttctttcctcaaggagactccagcacctatgccacttttctcttcaatgcctttgacaccaaccatgatggctcggtcagttttgaggactttgtggctggtttgtccgtgattcttcggggaactgtagatgacaggcttaattgggccttcaacctgtatgaccttaacaaggacggctgcatcaccaaggaggaaatgcttgacatcatgaagtccatctatgacatgatgggcaagtacacgtaccctgcactccgggaggaggccccaagggaacacgtggagagcttcttccagaagatggacagaaacaaggatggtgtggtgaccattgaggaattcattgagtcttgtcaaaaggatgagaacatcatgaggtccatgcagctctttgacaatgtcatctagcccccaggagagggggtcagtgtttcctggggggaccatgctctaaccctagtccaggcggacctcacccttctcttcccaggtctatcctcatcctacgcctccctgggggctggagggatccaagagcttggggattcagtagtccagatctctggagctgaaggggccagagagtgggcagagtgcatctcggggggtgttcccaactcccaccagctctcacccccttcctgcctgacacccagtgttgagagtgcccctcctgtaggaattgagcggttccccacctcctacccctactctagaaacacactagacagatgtctcctgctatggtgcttcccccatccctgacctcataaacatttcccctaagactcccctctcagagagaatgctccattcttggcactggctggcttctcagaccagccattgagagccctgtgggagggggacaagaatgtatagggagaaatcttgggcctgagtcaatggataggtcctaggaggtggctggggttgagaatagaagggcctggacagattatgattgctcaggcataccaggttatagctccaagttccacaggtctgctaccacaggccatcaaaatataagtttccaggctttgcagaagaccttgtctccttagaaatgccccagaaattttccacaccctcctcggtatccatggagagcctggggccagatatctggctcatctctggcattgcttcctctccttccttcctgcatgtgttggtggtggttgtggtgggggaatgtggatgggggatgtcctggctgatgcctgccaaaatttcatcccaccctccttgcttatcgtccctgttttgagggctatgacttgagtttttgtttcccatgttctc

SEQ ID NO: 147106 - DNA, 2489 bp, Homo sapiens
  Payload ID: 9102
  Gene Symbol: KCNIP2
  Gene Name: Kv channel interacting protein 2
  Uniprot ID: Q9NS61
  ENST ID: ENST00000358038
  CDS Start-End: 353-1111
aaagggtggggggcgggggtagggggagccaatcccggcagcgccaaagaggggaggaggcggtgacagccgcggggagggggcgggaggagagaggcagctcggctcggctccgcgctcagctccgctctgcctccggctctgcgctcacctgctgcctagtgttccctctcctgctccaggacctccgggtagacctcagaccccgggcccattcccagactcagcctcagcccggacttccccagccccgacagcacagtaggccgccagggggcgccgtgtgagcgccctatcccggccacccggcgccccctcccacggcccgggcgggagcggggcgccgggggccatgcggggccagggccgcaaggagagtttgtccgattcccgagacctggacggctcctacgaccagctcacgggccaccctccagggcccactaaaaaagcgctgaagcagcgattcctcaagctgctgccgtgctgcgggccccaagccctgccctcagtcagtgaaaacagcgtggacgatgaatttgaattgtccaccgtgtgtcaccggcctgagggtctggagcagctgcaggagcaaaccaaattcacgcgcaaggagttgcaggtcctgtaccggggcttcaagaacgaatgtcccagcggaattgtcaatgaggagaacttcaagcagatttactcccagttctttcctcaaggagactccagcacctatgccacttttctcttcaatgcctttgacaccaaccatgatggctcggtcagttttgaggactttgtggctggtttgtccgtgattcttcggggaactgtagatgacaggcttaattgggccttcaacctgtatgaccttaacaaggacggctgcatcaccaaggaggaaatgcttgacatcatgaagtccatctatgacatgatgggcaagtacacgtaccctgcactccgggaggaggccccaagggaacacgtggagagcttcttccagaagatggacagaaacaaggatggtgtggtgaccattgaggaattcattgagtcttgtcaaaaggatgagaacatcatgaggtccatgcagctctttgacaatgtcatctagcccccaggagagggggtcagtgtttcctggggggaccatgctctaaccctagtccaggcggacctcacccttctcttcccaggtctatcctcatcctacgcctccctgggggctggagggatccaagagcttggggattcagtagtccagatctctggagctgaaggggccagagagtgggcagagtgcatctcggggggtgttcccaactcccaccagctctcacccccttcctgcctgacacccagtgttgagagtgcccctcctgtaggaattgagcggttccccacctcctacccctactctagaaacacactagacagatgtctcctgctatggtgcttcccccatccctgacctcataaacatttcccctaagactcccctctcagagagaatgctccattcttggcactggctggcttctcagaccagccattgagagccctgtgggagggggacaagaatgtatagggagaaatcttgggcctgagtcaatggataggtcctaggaggtggctggggttgagaatagaagggcctggacagattatgattgctcaggcataccaggttatagctccaagttccacaggtctgctaccacaggccatcaaaatataagtttccaggctttgcagaagaccttgtctccttagaaatgccccagaaattttccacaccctcctcggtatccatggagagcctggggccagatatctggctcatctctggcattgcttcctctccttccttcctgcatgtgttggtggtggttgtggtgggggaatgtggatgggggatgtcctggctgatgcctgccaaaatttcatcccaccctccttgcttatcgtccctgttttgagggctatgacttgagtttttgtttcccatgttctctatagacttgggaccttcctgaacttggggcctatcactccccacagtggatgccttagaagggagagggaaggagggaggcaggcatagcatctgaacccagtgtgggggcattcactagaatcttcaatcaacctgggctctccccaccccaccccagataacctcctcagttccctagggtctcttcttgcttgactcaatctacccagagatgccccttagcacacctagagggcagggaccataggacccaggttccaaccccattgtcagcaccccagccatgcggccaccccttagcacacctgctcgtcccatttagcttaccctcccagttggccagaatctgaggggagagcccccagagagcccccttccccatcagaagactgttgactgctttgcattttgggctcttctatatattttgtaaagtaagaaatataccagatctaataaaacacaatggctatgc

SEQ ID NO: 147107 - DNA, 923 bp, Homo sapiens
  Payload ID: 9102
  Gene Symbol: KCNIP2
  Gene Name: Kv channel interacting protein 2
  ENST ID: ENST00000370046
  CDS Start-End: 202-756
ctgctgcctagtgttccctctcctgctccaggacctccgggtagacctcagaccccgggcccattcccagactcagcctcagcccggacttccccagccccgacagcacagtaggccgccagggggcgccgtgtgagcgccctatcccggccacccggcgccccctcccacggcccgggcgggagcggggcgccgggggccatgcggggccagggccgcaaggagagtttgtccgattcccgagacctggacggctcctacgaccagctcacggacagcgtggacgatgaatttgaattgtccaccgtgtgtcaccggcctgagggtctggagcagctgcaggagcaaaccaaattcacgcgcaaggagttgcaggtcctgtaccggggcttcaagaacgaatgtcccagcggaattgtcaatgaggagaacttcaagcagatttactcccagttctttcctcaaggagactccagcacctatgccacttttctcttcaatgcctttgacaccaaccatgatggctcggtcagttttgaggaaatgcttgacatcatgaagtccatctatgacatgatgggcaagtacacgtaccctgcactccgggaggaggccccaagggaacacgtggagagcttcttccagaagatggacagaaacaaggatggtgtggtgaccattgaggaattcattgagtcttgtcaaaaggatgagaacatcatgaggtccatgcagctctttgacaatgtcatctagcccccaggagagggggtcagtgtttcctggggggaccatgctctaaccctagtccaggcggacctcacccttctcttcccaggtctatcctcatcctacgcctccctgggggctggagggatccaagagcttggggattcagtagtccagatctctggagctgaagg

SEQ ID NO: 147108 - DNA, 534 bp, Homo sapiens
  Payload ID: 9102
  Gene Symbol: KCNIP2
  Gene Name: Kv channel interacting protein 2
  Uniprot ID: Q9NS61
  ENST ID: ENST00000434163
  CDS Start-End: 1-534
atgtggcttagctggacagcgtggacgatgaatttgaattgtccaccgtgtgtcaccggcctgagggtctggagcagctgcaggagcaaaccaaattcacgcgcaaggagttgcaggtcctgtaccggggcttcaagaacgaatgtcccagcggaattgtcaatgaggagaacttcaagcagatttactcccagttctttcctcaaggaggactttgtggctggtttgtccgtgattcttcggggaactgtagatgacaggcttaattgggccttcaacctgtatgaccttaacaaggacggctgcatcaccaaggaggaaatgcttgacatcatgaagtccatctatgacatgatgggcaagtacacgtaccctgcactccgggaggaggccccaagggaacacgtggagagcttcttccagaagatggacagaaacaaggatggtgtggtgaccattgaggaattcattgagtcttgtcaaaaggatgagaacatcatgaggtccatgcagctctttgacaatgtcatctag

SEQ ID NO: 147109 - DNA, 858 bp, Homo sapiens
  Payload ID: 9102
  Gene Symbol: KCNIP2
  Gene Name: Kv channel interacting protein 2
  Uniprot ID: Q9NS61
  ENST ID: ENST00000461105
  CDS Start-End: 1-858
atgcggggccagggccgcaaggagagtttgtccgattcccgagacctggacggctcctacgaccagctcacgggccaccctccagggcccactaaaaaagcgctgaagcagcgattcctcaagctgctgccgtgctgcgggccccaagccctgccctcagtcagtgaaattggccgggtcttccgctttctcggtgacagttcgctcccttcagcattagccgccccagcctccctccgcccccacagaccccgcctgctggacccagacagcgtggacgatgaatttgaattgtccaccgtgtgtcaccggcctgagggtctggagcagctgcaggagcaaaccaaattcacgcgcaaggagttgcaggtcctgtaccggggcttcaagaacgaatgtcccagcggaattgtcaatgaggagaacttcaagcagatttactcccagttctttcctcaaggagactccagcacctatgccacttttctcttcaatgcctttgacaccaaccatgatggctcggtcagttttgaggactttgtggctggtttgtccgtgattcttcggggaactgtagatgacaggcttaattgggccttcaacctgtatgaccttaacaaggacggctgcatcaccaaggaggaaatgcttgacatcatgaagtccatctatgacatgatgggcaagtacacgtaccctgcactccgggaggaggccccaagggaacacgtggagagcttcttccagaagatggacagaaacaaggatggtgtggtgaccattgaggaattcattgagtcttgtcaaaaggatgagaacatcatgaggtccatgcagctctttgacaatgtcatctag

SEQ ID NO: 147110 - DNA, 2940 bp, Homo sapiens
  Payload ID: 9103
  Gene Symbol: KCNIP3
  Gene Name: Kv channel interacting protein 3, calsenilin
  Uniprot ID: Q9Y2W7
  ENST ID: ENST00000295225
  CDS Start-End: 136-906
gagggcgagaagccgccgttgacaattacgtctgggtccaagcaaacatgaggcagctgccagccggcctgggcagtcttgtctgcctcggctgtgaagtggggaggctggcaacagttttcttcagcgcccaggatgcagccggctaaggaagtgacaaaggcgtcggacggcagcctcctgggggacctcgggcacacaccacttagcaagaaggagggtatcaagtggcagaggccgaggctcagccgccaggctttgatgagatgctgcctggtcaagtggatcctgtccagcacagccccacagggctcagatagcagcgacagtgagctggagctgtccacggtgcgccaccagccagaggggctggaccagctgcaggcccagaccaagttcaccaagaaggagctgcagtctctctacaggggctttaagaatgagtgtcccacgggcctggtggacgaagacaccttcaaactcatttacgcgcagttcttccctcagggagatgccaccacctatgcacacttcctcttcaacgcctttgatgcggacgggaacggggccatccactttgaggactttgtggttggcctctccatcctgctgcggggcacagtccacgagaagctcaagtgggcctttaatctctacgacattaacaaggatggctacatcaccaaagaggagatgctggccatcatgaagtccatctatgacatgatgggccgccacacctaccccatcctgcgggaggacgcgccggcggagcacgtggagaggttcttcgagaaaatggaccggaaccaggatggggtagtgaccattgaagagttcctggaggcctgtcagaaggatgagaacatcatgagctccatgcagctgtttgagaatgtcatctaggacacgtccaaaggagtgcatggccacagccacctccacccccaagaaacctccatcctgccaggagcagcctccaagaaacttttaaaaaatagatttgcaaaaagtgaacagattgctacacacacacacacacacacacacacacacacacacagccattcatctgggctggcagaggggacagagttcagggaggggctgagtctggctaggggccgagtccaggagccccagccagcccttcccaggccagcgaggcgaggctgcctctgggtgagtggctgacagagcaggtctgcaggccaccagctgctggatgtcaccaagaaggggctcgagtgcccctgcaggggagggtccaatctccggtgtgagcccacctcgtcccgttctccattctgctttcttgccacacagtgggccggccccaggctcccctggtctcctccccgtagccactctctgcccactacctatgcttctagaaagcccctcacctcaggaccccagagggaccagctggggggcaggggggagagggggtaatggaggccaagcctgcagctttctggaaattcttccctgggggtcccaggatcccctgctactccactgacctggaagagctgggtaccaggccacccactgtggggcaagcctgagtggtgaggggccactgggccccattctccctccatggcaggaaggcgggggatttcaagtttagggattgggtcgtggtggagaatctgagggcactctctgccagctccacagggtgggatgagcctctccttgccccagtcctggttcagtgggaatgcagtgggtggggctgtacacaccctccagcacagactgttccctccaaggtcctcttaggtcccgggaggaacgtggttcagagactggcagccagggagcccggggcagagctcagaggagtctgggaaggggcgtgtccctcctcttcctgtagtgcccctcccatggcccagcagcttggctgagccccctctcctgaagcagtgtcgccgtccctctgccttgcacaaaaagcacaagcattccttagcagctcaggcgcagccctagtgggagcccagcacactgcttctcggaggccaggccctcctgctggctgaggcttgggcccagtagccccaatatggtggccctggggaagaggccttgggggtctgctctgtgcctgggatcagtggggccccaaagcccagcccggctgaccaacattcaaaagcacaaaccctggggactctgcttggctgtcccctccatctggggatggagaatgccagcccaaagctggagccaatggtgagggctgagagggctgtggctgggtggtcagcagaaacccccaggaggagagagatgctgctcccgcctgattggggcctcacccagaaggaacccggtcccaggccgcatggcccctccaggaacattcccacataatacattccatcacagccagcccagctccactcagggctggcccggggagtccccgtgtgccccaagaggctagccccagggtgagcagggccctcagaggaaaggcagtatggcggaggccatgggggcccctcggcattcacacacagcctggcctcccctgcggagctgcatggacgcctggctccaggctccaggctgactgggggcctctgcctccaggagggcatcagctttccctggctcagggatcttctccctcccctcacccgctgcccagccctcccagctggtgtcactctgcctctaaggccaaggcctcaggagagcatcaccaccacacccctgccggccttggccttggggccagactggctgcacagcccaaccaggaggggtctgcctcccacgctgggacacagaccggccgcatgtctgcatggcagaagcgtctcccttggccacggcctgggagggtggttcctgttctcagcatccactaatattcagtcctgtatattttaataaaataaacttgacaaaggagaggga

SEQ ID NO: 147111 - DNA, 2798 bp, Homo sapiens
  Payload ID: 9103
  Gene Symbol: KCNIP3
  Gene Name: Kv channel interacting protein 3, calsenilin
  ENST ID: ENST00000360990
  CDS Start-End: 1-771
atgcagccccggaaggaagtgacaaaggcgtcggacggcagcctcctgggggacctcgggcacacaccacttagcaagaaggagggtatcaagtggcagaggccgaggctcagccgccaggctttgatgagatgctgcctggtcaagtggatcctgtccagcacagccccacagggctcagatagcagcgacagtgagctggagctgtccacggtgcgccaccagccagaggggctggaccagctgcaggcccagaccaagttcaccaagaaggagctgcagtctctctacaggggctttaagaatgagtgtcccacgggcctggtggacgaagacaccttcaaactcatttacgcgcagttcttccctcagggagatgccaccacctatgcacacttcctcttcaacgcctttgatgcggacgggaacggggccatccactttgaggactttgtggttggcctctccatcctgctgcggggcacagtccacgagaagctcaagtgggcctttaatctctacgacattaacaaggatggctacatcaccaaagaggagatgctggccatcatgaagtccatctatgacatgatgggccgccacacctaccccatcctgcgggaggacgcgccggcggagcacgtggagaggttcttcgagaaaatggaccggaaccaggatggggtagtgaccattgaagagttcctggaggcctgtcagaaggatgagaacatcatgagctccatgcagctgtttgagaatgtcatctaggacacgtccaaaggagtgcatggccacagccacctccacccccaagaaacctccatcctgccaggagcagcctccaagaaacttttaaaaaatagatttgcaaaaagtgaacagattgctacacacacacacacacacacacacacacacacacacagccattcatctgggctggcagaggggacagagttcagggaggggctgagtctggctaggggccgagtccaggagccccagccagcccttcccaggccagcgaggcgaggctgcctctgggtgagtggctgacagagcaggtctgcaggccaccagctgctggatgtcaccaagaaggggctcgagtgcccctgcaggggagggtccaatctccggtgtgagcccacctcgtcccgttctccattctgctttcttgccacacagtgggccggccccaggctcccctggtctcctccccgtagccactctctgcccactacctatgcttctagaaagcccctcacctcaggaccccagagggaccagctggggggcaggggggagagggggtaatggaggccaagcctgcagctttctggaaattcttccctgggggtcccaggatcccctgctactccactgacctggaagagctgggtaccaggccacccactgtggggcaagcctgagtggtgaggggccactgggccccattctccctccatggcaggaaggcgggggatttcaagtttagggattgggtcgtggtggagaatctgagggcactctctgccagctccacagggtgggatgagcctctccttgccccagtcctggttcagtgggaatgcagtgggtggggctgtacacaccctccagcacagactgttccctccaaggtcctcttaggtcccgggaggaacgtggttcagagactggcagccagggagcccggggcagagctcagaggagtctgggaaggggcgtgtccctcctcttcctgtagtgcccctcccatggcccagcagcttggctgagccccctctcctgaagcagtgtcgccgtccctctgccttgcacaaaaagcacaagcattccttagcagctcaggcgcagccctagtgggagcccagcacactgcttctcggaggccaggccctcctgctggctgaggcttgggcccagtagccccaatatggtggccctggggaagaggccttgggggtctgctctgtgcctgggatcagtggggccccaaagcccagcccggctgaccaacattcaaaagcacaaaccctggggactctgcttggctgtcccctccatctggggatggagaatgccagcccaaagctggagccaatggtgagggctgagagggctgtggctgggtggtcagcagaaacccccaggaggagagagatgctgctcccgcctgattggggcctcacccagaaggaacccggtcccaggccgcatggcccctccaggaacattcccacataatacattccatcacagccagcccagctccactcagggctggcccggggagtccccgtgtgccccaagaggctagccccagggtgagcagggccctcagaggaaaggcagtatggcggaggccatgggggcccctcggcattcacacacagcctggcctcccctgcggagctgcatggacgcctggctccaggctccaggctgactgggggcctctgcctccaggagggcatcagctttccctggctcagggatcttctccctcccctcacccgctgcccagccctcccagctggtgtcactctgcctctaaggccaaggcctcaggagagcatcaccaccacacccctgccggccttggccttggggccagactggctgcacagcccaaccaggaggggtctgcctcccacgctgggacacagaccggccgcatgtctgcatggcagaagcgtctcccttggccacggcctgggagggtggttcctgttctcagcatccactaatattcagtcctgtatattttaataaaataaacttgacaaagg

SEQ ID NO: 147112 - DNA, 985 bp, Homo sapiens
  Payload ID: 9103
  Gene Symbol: KCNIP3
  Gene Name: Kv channel interacting protein 3, calsenilin
  Uniprot ID: Q9Y2W7
  ENST ID: ENST00000468529
  CDS Start-End: 293-985
gccgccgccgccgccgcgcctcgaagtttgccggctgactcggaaagttgcgctcgggctcggccgccgcgtccggtccccgcgtccagcctccggcctgacccgctcgccgccgccgccgccctccacggggccccggcccagccaacccagcagccccgcctgccgggggcatgtgagccgtcgccgcccccgagaggccgtgcgggctgcaggggccccggtgcctccgaggcagcgcgtgggcgaggggtgcgcccgggccccagggccccaggcagcccggcttgccatgggcatccagggcatggagctgtgcgccatggccgtggtggtgctgctgttcatcgccgtcctcaagcagttcggcatcctggagcccatatccatggaagatagcagcgacagtgagctggagctgtccacggtgcgccaccagccagaggggctggaccagctgcaggcccagaccaagttcaccaagaaggagctgcagtctctctacaggggctttaagaatgagtgtcccacgggcctggtggacgaagacaccttcaaactcatttacgcgcagttcttccctcagggagatgccaccacctatgcacacttcctcttcaacgcctttgatgcggacgggaacggggccatccactttgaggactttgtggttggcctctccatcctgctgcggggcacagtccacgagaagctcaagtgggcctttaatctctacgacattaacaaggatggctacatcaccaaagaggagatgctggccatcatgaagtccatctatgacatgatgggccgccacacctaccccatcctgcgggaggacgcgccggcggagcacgtggagaggttcttcgagaaaatggaccggaaccaggatggggtagtgaccattgaagagttcctggaggcctgtcagaaggatgagaacatcatgagctccatgcagctgtttgagaatgtcatctag

SEQ ID NO: 147113 - DNA, 2168 bp, Homo sapiens
  Payload ID: 9104
  Gene Symbol: KCNIP4
  Gene Name: Kv channel interacting protein 4
  Uniprot ID: Q6PIL6
  ENST ID: ENST00000359001
  CDS Start-End: 136-702
gtggacagtcacagacattagcagacatgttcttccgttttcctttgttgctctgtgtaagcatcggtgagcagtggctggtcctaagactctttcttgttttcctccacagacagcgtggaagatgaactggagatggccaccgtcaggcatcggcctgaagcccttgagcttctggaagcccagagcaaatttaccaagaaagagcttcagatcctttacagaggatttaagaatgaatgccccagtggtgttgttaatgaagaaaccttcaaagagatttactcgcagttctttccacagggagactctacaacatatgcacattttctgttcaatgcatttgatacagaccacaatggagctgtgagtttcgaggatttcatcaaaggtctttccattttgctccgggggacagtacaagaaaaactcaattgggcatttaatctgtatgacataaataaagatggctacatcactaaagaggaaatgcttgatataatgaaagcaatatacgatatgatgggtaaatgtacatatcctgtcctcaaagaagatgctcccagacaacacgttgaaacattttttcagaaaatggacaaaaataaagatggggttgttaccatagatgagttcattgaaagctgccaaaaagatgaaaacataatgcgctccatgcagctctttgaaaatgtgatttaacttgtcaaatagatcctgaatccaacagacaaatgtgaactattctaccacccttaaagttggagctaccacttttagcatagattgctcagcttgacactgaagcatattatgcaaacaagctttgttttaatataaagcaatccccaaaagatttgagctttcagttataaatttgcatccttttcataatgccactgagttcaggggatggtctaactcatttcatactctgtgaatattcaaaagtaatagaatctggcatatagttttattggttccttagccatgggattattgaggctttcacatatcagtgattttaaaatatcagtgttttttgctactcatttgtatgtattcagtcctaggattttgaatggttttctaatatagtgacatctgcatttaatttccagaaattaaattaattttcatgtttgaatgctgtaattccatttaaattccatttatatactttaaggaaacaagattacaacaattaaaaaaacacatagttccagtttctatggccttcccaccttctgttagaaattagttttatctggcatttttaaacatttaaaaattattaaacatttaaaaattagtttattatcagatatcagcatatgcctaataaaacttattttaataagcatttaattttccataatatgttacagccaaggcctatataataattttggatttgttcaatctttcttacaggctgttttctattgtatcaatcattagtatcaatcattaagtggaagttgaagaaggcatcaaacaaaacaaggatgtttacagacatatgcaaagggtcaggatatctatcctccagtatatagtaatgcttaataacaagtaatcctaacagcattaaaggccaaatctgtcctctttcccctgacttccttacagcatgtttatttatattacaagccattcagggacaaagaaagaaaccttgactaccccactgtctactaagaacaaacagcaagcaaaattagcaagcaaaattcactttgaaagcaccagtggttccattacattgacaactactaccaagatttagtagaaaataagtgctcaacaactaatccagattacagtatgatttagctcatcataattcagattatttttaatcatcttagccaaaactgtaaagttgccacattactaaagccacacacatcgtccctgttttgtagaaatatcacaaagaccaagaggctacagaaggaggaaatttgcaactgtctttgcaacaataaatcaggtatctattctggtgtagagataggatgttgaaagctgccctgctatcaccagtgtagaaattaagagtagtacaatacatgtacactgaaatttgccatcacgtgtttgtgtaaactcaatgtgcacattttgtatttcaaaaagaaaaaataaaagcaaaataaaatgtt

SEQ ID NO: 147114 - DNA, 2481 bp, Homo sapiens
  Payload ID: 9104
  Gene Symbol: KCNIP4
  Gene Name: Kv channel interacting protein 4
  Uniprot ID: Q6PIL6
  ENST ID: ENST00000382148
  CDS Start-End: 338-1015
aactgcttctggagaggggatgccgagccgaaccagagctgggttactacaagtgtgaaccggcagcctgtctgttgccacagaagaacttggtcaccacactgagaagccgtgttttctcacctccctgttactgttgtagctgtatctggcttctctagcattttaaaggaatttctgattgaggcgctaacagctaattccacaggagttgtaaggcagcctgtgcataaactgagacagaagtttctcctcagagactctctttttattattattattattattattggcaaagacttctggctctcctcagaggaataccttgttgcttaagatgagtggctgtagaaagcggtgtaaacgtgaaatactgaaatttgcccagtaccttctcagactattaacaggttctcttcatacagacagcgtggaagatgaactggagatggccaccgtcaggcatcggcctgaagcccttgagcttctggaagcccagagcaaatttaccaagaaagagcttcagatcctttacagaggatttaagaatgaatgccccagtggtgttgttaatgaagaaaccttcaaagagatttactcgcagttctttccacagggagactctacaacatatgcacattttctgttcaatgcatttgatacagaccacaatggagctgtgagtttcgaggatttcatcaaaggtctttccattttgctccgggggacagtacaagaaaaactcaattgggcatttaatctgtatgacataaataaagatggctacatcactaaagaggaaatgcttgatataatgaaagcaatatacgatatgatgggtaaatgtacatatcctgtcctcaaagaagatgctcccagacaacacgttgaaacattttttcagaaaatggacaaaaataaagatggggttgttaccatagatgagttcattgaaagctgccaaaaagatgaaaacataatgcgctccatgcagctctttgaaaatgtgatttaacttgtcaaatagatcctgaatccaacagacaaatgtgaactattctaccacccttaaagttggagctaccacttttagcatagattgctcagcttgacactgaagcatattatgcaaacaagctttgttttaatataaagcaatccccaaaagatttgagctttcagttataaatttgcatccttttcataatgccactgagttcaggggatggtctaactcatttcatactctgtgaatattcaaaagtaatagaatctggcatatagttttattggttccttagccatgggattattgaggctttcacatatcagtgattttaaaatatcagtgttttttgctactcatttgtatgtattcagtcctaggattttgaatggttttctaatatagtgacatctgcatttaatttccagaaattaaattaattttcatgtttgaatgctgtaattccatttaaattccatttatatactttaaggaaacaagattacaacaattaaaaaaacacatagttccagtttctatggccttcccaccttctgttagaaattagttttatctggcatttttaaacatttaaaaattattaaacatttaaaaattagtttattatcagatatcagcatatgcctaataaaacttattttaataagcatttaattttccataatatgttacagccaaggcctatataataattttggatttgttcaatctttcttacaggctgttttctattgtatcaatcattagtatcaatcattaagtggaagttgaagaaggcatcaaacaaaacaaggatgtttacagacatatgcaaagggtcaggatatctatcctccagtatatagtaatgcttaataacaagtaatcctaacagcattaaaggccaaatctgtcctctttcccctgacttccttacagcatgtttatttatattacaagccattcagggacaaagaaagaaaccttgactaccccactgtctactaagaacaaacagcaagcaaaattagcaagcaaaattcactttgaaagcaccagtggttccattacattgacaactactaccaagatttagtagaaaataagtgctcaacaactaatccagattacagtatgatttagctcatcataattcagattatttttaatcatcttagccaaaactgtaaagttgccacattactaaagccacacacatcgtccctgttttgtagaaatatcacaaagaccaagaggctacagaaggaggaaatttgcaactgtctttgcaacaataaatcaggtatctattctggtgtagagataggatgttgaaagctgccctgctatcaccagtgtagaaattaagagtagtacaatacatgtacactgaaatttgccatcacgtgtttgtgtaaactcaatgtgcacattttgtatttcaaaaagaaaaaataaaagcaaaataaaatgtt

SEQ ID NO: 147115 - DNA, 1645 bp, Homo sapiens
  Payload ID: 9104
  Gene Symbol: KCNIP4
  Gene Name: Kv channel interacting protein 4
  Uniprot ID: Q6PIL6
  ENST ID: ENST00000382150
  CDS Start-End: 84-773
aatgtagtttaatggctttacaaagaaagccaggcagaggagcacttctcagtggctgtggtcggaccatgacctagctgaccatgaacttggaagggcttgaaatgatagcagttctgatcgtcattgtgctttttgttaaattattggaacagtttgggctgattgaagcaggtttagaagacagcgtggaagatgaactggagatggccaccgtcaggcatcggcctgaagcccttgagcttctggaagcccagagcaaatttaccaagaaagagcttcagatcctttacagaggatttaagaatgaatgccccagtggtgttgttaatgaagaaaccttcaaagagatttactcgcagttctttccacagggagactctacaacatatgcacattttctgttcaatgcatttgatacagaccacaatggagctgtgagtttcgaggatttcatcaaaggtctttccattttgctccgggggacagtacaagaaaaactcaattgggcatttaatctgtatgacataaataaagatggctacatcactaaagaggaaatgcttgatataatgaaagcaatatacgatatgatgggtaaatgtacatatcctgtcctcaaagaagatgctcccagacaacacgttgaaacattttttcagaaaatggacaaaaataaagatggggttgttaccatagatgagttcattgaaagctgccaaaaagatgaaaacataatgcgctccatgcagctctttgaaaatgtgatttaacttgtcaaatagatcctgaatccaacagacaaatgtgaactattctaccacccttaaagttggagctaccacttttagcatagattgctcagcttgacactgaagcatattatgcaaacaagctttgttttaatataaagcaatccccaaaagatttgagctttcagttataaatttgcatccttttcataatgccactgagttcaggggatggtctaactcatttcatactctgtgaatattcaaaagtaatagaatctggcatatagttttattggttccttagccatgggattattgaggctttcacatatcagtgattttaaaatatcagtgttttttgctactcatttgtatgtattcagtcctaggattttgaatggttttctaatatagtgacatctgcatttaatttccagaaattaaattaattttcatgtttgaatgctgtaattccatttaaattccatttatatactttaaggaaacaagattacaacaattaaaaaaacacatagttccagtttctatggccttcccaccttctgttagaaattagttttatctggcatttttaaacatttaaaaattattaaacatttaaaaattagtttattatcagatatcagcatatgcctaataaaacttattttaataagcatttaattttccataatatgttacagccaaggcctatataataattttggatttgttcaatctttcttacaggctgttttctattgtatcaatcattagtatcaatcattaagtggaagttgaagaaggcatcaaacaaaacaaggatgtttacagacatatgcaaagggtcaggatatctatcctccagtatatagtaatgcttaataaca

SEQ ID NO: 147116 - DNA, 1767 bp, Homo sapiens
  Payload ID: 9104
  Gene Symbol: KCNIP4
  Gene Name: Kv channel interacting protein 4
  Uniprot ID: Q6PIL6
  ENST ID: ENST00000382152
  CDS Start-End: 169-921
ctgcagcccgctccgcgcgccctgcccgcagccgccgccgaagctctcgctcccagcgccacggacgcccccgggccgagcggcggtgcgctcccgtgcagacccgtggacagacgcccctggccggtggactctcgagtctcgcttctgcaccctgcgtccctagacatgaatgtgaggagggtggaaagcatttcggctcagctggaggaggccagctctacaggcggtttcctgtacgctcagaacagcaccaagcgcagcattaaagagcggctcatgaagctcttgccctgctcagctgccaaaacgtcgtctcctgctattcaaaacagcgtggaagatgaactggagatggccaccgtcaggcatcggcctgaagcccttgagcttctggaagcccagagcaaatttaccaagaaagagcttcagatcctttacagaggatttaagaatgaatgccccagtggtgttgttaatgaagaaaccttcaaagagatttactcgcagttctttccacagggagactctacaacatatgcacattttctgttcaatgcatttgatacagaccacaatggagctgtgagtttcgaggatttcatcaaaggtctttccattttgctccgggggacagtacaagaaaaactcaattgggcatttaatctgtatgacataaataaagatggctacatcactaaagaggaaatgcttgatataatgaaagcaatatacgatatgatgggtaaatgtacatatcctgtcctcaaagaagatgctcccagacaacacgttgaaacattttttcagaaaatggacaaaaataaagatggggttgttaccatagatgagttcattgaaagctgccaaaaagatgaaaacataatgcgctccatgcagctctttgaaaatgtgatttaacttgtcaaatagatcctgaatccaacagacaaatgtgaactattctaccacccttaaagttggagctaccacttttagcatagattgctcagcttgacactgaagcatattatgcaaacaagctttgttttaatataaagcaatccccaaaagatttgagctttcagttataaatttgcatccttttcataatgccactgagttcaggggatggtctaactcatttcatactctgtgaatattcaaaagtaatagaatctggcatatagttttattggttccttagccatgggattattgaggctttcacatatcagtgattttaaaatatcagtgttttttgctactcatttgtatgtattcagtcctaggattttgaatggttttctaatatagtgacatctgcatttaatttccagaaattaaattaattttcatgtttgaatgctgtaattccatttaaattccatttatatactttaaggaaacaagattacaacaattaaaaaaacacatagttccagtttctatggccttcccaccttctgttagaaattagttttatctggcatttttaaacatttaaaaattattaaacatttaaaaattagtttattatcagatatcagcatatgcctaataaaacttattttaataagcatttaattttccataatatgttacagccaaggcctatataataattttggatttgttcaatctttcttacaggctgttttctattgtatcaatcattagtatcaatcattaagtggaagttgaagaaggcatcaaacaaaacaaggatgtttacagacatatgcaaagggtcaggatatctatcct

SEQ ID NO: 147117 - DNA, 1641 bp, Homo sapiens
  Payload ID: 9104
  Gene Symbol: KCNIP4
  Gene Name: Kv channel interacting protein 4
  Uniprot ID: Q6PIL6
  ENST ID: ENST00000447367
  CDS Start-End: 115-765
agcgccacggacgcccccgggccgagcggcggtgcgctcccgtgcagacccgtggacagacgcccctggccggtggactctcgagtctcgcttctgcaccctgcgtccctagacatgaatgtgaggagggtggaaagcatttcggctcagctggaggaggccagctctacaggcgacagcgtggaagatgaactggagatggccaccgtcaggcatcggcctgaagcccttgagcttctggaagcccagagcaaatttaccaagaaagagcttcagatcctttacagaggatttaagaatgaatgccccagtggtgttgttaatgaagaaaccttcaaagagatttactcgcagttctttccacagggagactctacaacatatgcacattttctgttcaatgcatttgatacagaccacaatggagctgtgagtttcgaggatttcatcaaaggtctttccattttgctccgggggacagtacaagaaaaactcaattgggcatttaatctgtatgacataaataaagatggctacatcactaaagaggaaatgcttgatataatgaaagcaatatacgatatgatgggtaaatgtacatatcctgtcctcaaagaagatgctcccagacaacacgttgaaacattttttcagaaaatggacaaaaataaagatggggttgttaccatagatgagttcattgaaagctgccaaaaagatgaaaacataatgcgctccatgcagctctttgaaaatgtgatttaacttgtcaaatagatcctgaatccaacagacaaatgtgaactattctaccacccttaaagttggagctaccacttttagcatagattgctcagcttgacactgaagcatattatgcaaacaagctttgttttaatataaagcaatccccaaaagatttgagctttcagttataaatttgcatccttttcataatgccactgagttcaggggatggtctaactcatttcatactctgtgaatattcaaaagtaatagaatctggcatatagttttattggttccttagccatgggattattgaggctttcacatatcagtgattttaaaatatcagtgttttttgctactcatttgtatgtattcagtcctaggattttgaatggttttctaatatagtgacatctgcatttaatttccagaaattaaattaattttcatgtttgaatgctgtaattccatttaaattccatttatatactttaaggaaacaagattacaacaattaaaaaaacacatagttccagtttctatggccttcccaccttctgttagaaattagttttatctggcatttttaaacatttaaaaattattaaacatttaaaaattagtttattatcagatatcagcatatgcctaataaaacttattttaataagcatttaattttccataatatgttacagccaaggcctatataataattttggatttgttcaatctttcttacaggctgttttctattgtatcaatcattagtatcaatcattaagtggaagttgaagaaggcatcaaacaaaacaaggatgtttacagacatatgcaaagggtcaggatatctatcctccagtatatagtaatgcttaataacaagta

SEQ ID NO: 147118 - DNA, 1301 bp, Homo sapiens
  Payload ID: 9104
  Gene Symbol: KCNIP4
  Gene Name: Kv channel interacting protein 4
  Uniprot ID: Q6PIL6
  ENST ID: ENST00000509207
  CDS Start-End: 291-857
aagatggaggctctgtgtgagaaggaatgcagggcagcctctggttgcagagagcagcacccggtttgacagctagcaatgcaattgtgacctcagacctacaatgtcaaggaattggcttctgccaacaaccagaatgagcatgaaagtggattagtccttggaacttccagataagagcccagccagctatacttggatttcagcctgtgagattctcagcagagaacccagtcaagtgtgtccagacgtccaacctacagaactacagcgtggaagatgaactggagatggccaccgtcaggcatcggcctgaagcccttgagcttctggaagcccagagcaaatttaccaagaaagagcttcagatcctttacagaggatttaagaatgaatgccccagtggtgttgttaatgaagaaaccttcaaagagatttactcgcagttctttccacagggagactctacaacatatgcacattttctgttcaatgcatttgatacagaccacaatggagctgtgagtttcgaggatttcatcaaaggtctttccattttgctccgggggacagtacaagaaaaactcaattgggcatttaatctgtatgacataaataaagatggctacatcactaaagaggaaatgcttgatataatgaaagcaatatacgatatgatgggtaaatgtacatatcctgtcctcaaagaagatgctcccagacaacacgttgaaacattttttcagaaaatggacaaaaataaagatggggttgttaccatagatgagttcattgaaagctgccaaaaagatgaaaacataatgcgctccatgcagctctttgaaaatgtgatttaacttgtcaaatagatcctgaatccaacagacaaatgtgaactattctaccacccttaaagttggagctaccacttttagcatagattgctcagcttgacactgaagcatattatgcaaacaagctttgttttaatataaagcaatccccaaaagatttgagctttcagttataaatttgcatccttttcataatgccactgagttcaggggatggtctaactcatttcatactctgtgaatattcaaaagtaatagaatctggcatatagttttattggttccttagccatgggattattgaggctttcacatatcagtgattttaaaatatcagtgttttttgctactcatttgtatgtattcagtcctaggattttgaatggttttctaatatagtgacatctgcatttaatttccagaaattaaattaattttcatgtttga

SEQ ID NO: 147119 - DNA, 763 bp, Homo sapiens
  Payload ID: 9104
  Gene Symbol: KCNIP4
  Gene Name: Kv channel interacting protein 4
  ENST ID: ENST00000515786
  CDS Start-End: 1-105
atgaatgtgaggagggtggaaagcatttcggctcagctggaggaggccagctctacaggcgaagcggttattgagcattcgctgtgtaccaagtgctgtccttgacaagaagacttacacccagtggtcccagagggagacttcggaagtgggagcacctgtcagatcatcatacagcgtggaagatgaactggagatggccaccgtcaggcatcggcctgaagcccttgagcttctggaagcccagagcaaatttaccaagaaagagcttcagatcctttacagaggatttaagaatgaatgccccagtggtgttgttaatgaagaaaccttcaaagagatttactcgcagttctttccacagggagactctacaacatatgcacattttctgttcaatgcatttgatacagaccacaatggagctgtgagtttcgaggatttcatcaaaggtctttccattttgctccgggggacagtacaagaaaaactcaattgggcatttaatctgtatgacataaataaagatggctacatcactaaagaggaaatgcttgatataatgaaagcaatatacgatatgatgggtaaatgtacatatcctgtcctcaaagaagatgctcccagacaacacgttgaaacattttttcagaaaatggacaaaaataaagatggggttgttaccatagatgagttcattgaaagctgccaaaaagatgaaaacataatgcgctccatgcagctctttgaaaatgtgatttaa

SEQ ID NO: 147120 - DNA, 425 bp, Homo sapiens
  Payload ID: 9104
  Gene Symbol: KCNIP4
  Gene Name: Kv channel interacting protein 4
  ENST ID: ENST00000629040
  CDS Start-End: 338-425
aactgcttctggagaggggatgccgagccgaaccagagctgggttactacaagtgtgaaccggcagcctgtctgttgccacagaagaacttggtcaccacactgagaagccgtgttttctcacctccctgttactgttgtagctgtatctggcttctctagcattttaaaggaatttctgattgaggcgctaacagctaattccacaggagttgtaaggcagcctgtgcataaactgagacagaagtttctcctcagagactctctttttattattattattattattattggcaaagacttctggctctcctcagaggaataccttgttgcttaagatgagtggctgtagaaagcggtgtaaacgtgaaatactgaaatttgcccagtaccttctcagactattaacaggttctcttcatacag

SEQ ID NO: 147121 - DNA, 1426 bp, Homo sapiens
  Payload ID: 9105
  Gene Symbol: KXD1
  Gene Name: KxDL motif containing 1
  Uniprot ID: Q9BQD3
  ENST ID: ENST00000222307
  CDS Start-End: 149-679
gacttaacgcacgcaagcggctccagggtacgtccccgccacgcgcgctcgcaggatcggtgcgtggtgacgtttcgccggcgcgggcgccatcccggaagcgcgagcaaggccgccagatgtgcaggcagcggaggaggagaaagagatggacctcccggactcggcctcgagggtcttctgcggccgcatcctgagcatggtgaacacagatgatgtcaacgccatcatcctggcccagaagaacatgctggaccgctttgagaagaccaatgagatgctgctcaacttcaacaacctgtccagtgcccgcctgcagcagatgagcgaacgcttcctgcaccacacgaggaccctagtagagatgaaacgggacctggacagcatcttccgccgtatcaggacgctgaaagggaaactggccaggcagcacccagaggccttcagccatatcccagaggcatccttcctggaggaagaggatgaagaccccatcccacccagcaccacgaccaccattgccacctcagaacagagcacgggctcatgtgacaccagccccgacaccgtctcgccctccctgagccccggcttcgaggacctgtcccatgtccagcctggctccccagccatcaacggccgcagccagacagatgacgaggagatgacgggcgaatagccctgctgcccggtgccttgagggggtctcagggcagcagcatacaaggtggcagcgggtaaccctgccttgttctgtcatccagggctcctttgctgccccgttctgtcacccagggctcctagggggacaaggctctctcccgaggggtgtggaattcctgggggggtctttaattctggctccttccttcctcagaacatctctattctgcaagacccctctgccatgccagggcacgcccattccagctggagtcgtggggctgggcacaggggaatttttccagagctgagcctgacgtctgctctgaagaatgcttagaaggttcccagacaccagagccagatgtcccccaccaccggtcaggacctccttgaggtgcacaagcacggtctcctctgagttcaccccagcccacccccgcacccactaattctgcttttcctgccccttgctccgtaaaagtatcaaatactttctccttggtatctcaaggaggtttctgagataggtagaagtcttgagacggaggctggccatccattcagccctgagcgtgctgagttctgtgtttctctgaatagaggtgtggaacctgaggggccagcaggcctctctgaaggcctccatggagcaaacggagccacctcgggaaagagtttaatggaatatttttgtacccgatgtttacagatgctgttgggaagttatcaataaaaagacaccattactaaaaagggaaaa

SEQ ID NO: 147122 - DNA, 1496 bp, Homo sapiens
  Payload ID: 9105
  Gene Symbol: KXD1
  Gene Name: KxDL motif containing 1
  Uniprot ID: Q9BQD3
  ENST ID: ENST00000539106
  CDS Start-End: 210-740
gtctaagccccgccctttcctgtcgtgacttaacgcacgcaagcggctccagggtacgtccccgccacgcgcgctcgcaggatcggtgcgtggtgacgtttcgccggcgcgggcgccatcccggaagcgcgagcaaggccgccagatgtgcaggtgccgccgctaccgacgccggggccgagtttggggcagcggaggaggagaaagagatggacctcccggactcggcctcgagggtcttctgcggccgcatcctgagcatggtgaacacagatgatgtcaacgccatcatcctggcccagaagaacatgctggaccgctttgagaagaccaatgagatgctgctcaacttcaacaacctgtccagtgcccgcctgcagcagatgagcgaacgcttcctgcaccacacgaggaccctagtagagatgaaacgggacctggacagcatcttccgccgtatcaggacgctgaaagggaaactggccaggcagcacccagaggccttcagccatatcccagaggcatccttcctggaggaagaggatgaagaccccatcccacccagcaccacgaccaccattgccacctcagaacagagcacgggctcatgtgacaccagccccgacaccgtctcgccctccctgagccccggcttcgaggacctgtcccatgtccagcctggctccccagccatcaacggccgcagccagacagatgacgaggagatgacgggcgaatagccctgctgcccggtgccttgagggggtctcagggcagcagcatacaaggtggcagcgggtaaccctgccttgttctgtcatccagggctcctttgctgccccgttctgtcacccagggctcctagggggacaaggctctctcccgaggggtgtggaattcctgggggggtctttaattctggctccttccttcctcagaacatctctattctgcaagacccctctgccatgccagggcacgcccattccagctggagtcgtggggctgggcacaggggaatttttccagagctgagcctgacgtctgctctgaagaatgcttagaaggttcccagacaccagagccagatgtcccccaccaccggtcaggacctccttgaggtgcacaagcacggtctcctctgagttcaccccagcccacccccgcacccactaattctgcttttcctgccccttgctccgtaaaagtatcaaatactttctccttggtatctcaaggaggtttctgagataggtagaagtcttgagacggaggctggccatccattcagccctgagcgtgctgagttctgtgtttctctgaatagaggtgtggaacctgaggggccagcaggcctctctgaaggcctccatggagcaaacggagccacctcgggaaagagtttaatggaatatttttgtacccgatgtttacagatgctgttgggaagttatcaataaaaagacaccattactaaaaagggaaaagtacaccta

SEQ ID NO: 147123 - DNA, 1592 bp, Homo sapiens
  Payload ID: 9105
  Gene Symbol: KXD1
  Gene Name: KxDL motif containing 1
  Uniprot ID: Q9BQD3
  ENST ID: ENST00000540691
  CDS Start-End: 306-836
gtctaagccccgccctttcctgtcgtgacttaacgcacgcaagcggctccagggtacgtccccgccacgcgcgctcgcaggatcggtgcgtggtgacgtttcgccggcgcgggcgccatcccggaagcgcgagcaaggccgccagatgtgcaggagggtcagtgctgtagcccctcctaccctggctgctccgggaagtccctgcctgccattacggtcatctgtgtgccagcaaaactgggaacctcagaaccatctggattgctggggcccacaggttggctgcagcggaggaggagaaagagatggacctcccggactcggcctcgagggtcttctgcggccgcatcctgagcatggtgaacacagatgatgtcaacgccatcatcctggcccagaagaacatgctggaccgctttgagaagaccaatgagatgctgctcaacttcaacaacctgtccagtgcccgcctgcagcagatgagcgaacgcttcctgcaccacacgaggaccctagtagagatgaaacgggacctggacagcatcttccgccgtatcaggacgctgaaagggaaactggccaggcagcacccagaggccttcagccatatcccagaggcatccttcctggaggaagaggatgaagaccccatcccacccagcaccacgaccaccattgccacctcagaacagagcacgggctcatgtgacaccagccccgacaccgtctcgccctccctgagccccggcttcgaggacctgtcccatgtccagcctggctccccagccatcaacggccgcagccagacagatgacgaggagatgacgggcgaatagccctgctgcccggtgccttgagggggtctcagggcagcagcatacaaggtggcagcgggtaaccctgccttgttctgtcatccagggctcctttgctgccccgttctgtcacccagggctcctagggggacaaggctctctcccgaggggtgtggaattcctgggggggtctttaattctggctccttccttcctcagaacatctctattctgcaagacccctctgccatgccagggcacgcccattccagctggagtcgtggggctgggcacaggggaatttttccagagctgagcctgacgtctgctctgaagaatgcttagaaggttcccagacaccagagccagatgtcccccaccaccggtcaggacctccttgaggtgcacaagcacggtctcctctgagttcaccccagcccacccccgcacccactaattctgcttttcctgccccttgctccgtaaaagtatcaaatactttctccttggtatctcaaggaggtttctgagataggtagaagtcttgagacggaggctggccatccattcagccctgagcgtgctgagttctgtgtttctctgaatagaggtgtggaacctgaggggccagcaggcctctctgaaggcctccatggagcaaacggagccacctcgggaaagagtttaatggaatatttttgtacccgatgtttacagatgctgttgggaagttatcaataaaaagacaccattactaaaaagggaaaagtacaccta

SEQ ID NO: 147124 - DNA, 932 bp, Homo sapiens
  Payload ID: 9105
  Gene Symbol: KXD1
  Gene Name: KxDL motif containing 1
  ENST ID: ENST00000598830
  CDS Start-End: 538-924
ctccagcctgggtgacaggagtgaaactctgtatcaaaaagaaataaaaaaacgaggtcaagtagtaagagaagcggtaagagtgacgggaacaggagtcattgacctcttgggagaggagacattggaggtggtgatgatttgctgaagcagccacacacgttcagcttgtgaggacagcagttgttaggcaggggatgagggaggaagctggcagatctgtgcaggtgagaggtacctgtggccttgggctcatggaagtgggaggtgatgggattctaatgtgcttgggtacagtttacaaatacaacctctcttagtttgcccaatacctccaaattcctggggtggcacacctgaggttcaggtggcatgactgagccacagtcacacatccccactgtaggataccaccacggttgggttaggttccagcacatggcggtcccggcctggcctcttggtcccacctcacctggtgactagtgcagaccactctgttcttgcctgtttcaggcagcggaggaggagaaagagatggacctcccggactcggcctcgagggtcttctgcggccgcatcctgagcatggtgaacacagatgatgtcaacgccatcatcctggcccagaagaacatgctggaccgctttgagaagaccaatgagatgctgctcaacttcaacaacctgtccagtgcccgcctgcagcagatgagcgaacgcttcctgcaccacacgaggaccctagtagagatgaaacgggacctggacagcatcttccgccgtatcaggacgctgaaagggaaactggccaggcagcacccagaggccttcagccgtaagtgtcacgcagggttcctgctcccgagcacgtcagcactctccacccagggcaggcttctggaaggccaccttggggcctgatactgaga

SEQ ID NO: 147125 - DNA, 686 bp, Homo sapiens
  Payload ID: 9105
  Gene Symbol: KXD1
  Gene Name: KxDL motif containing 1
  ENST ID: ENST00000595870
  CDS Start-End: 278-686
gtgggaggtgatgggattctaatgtgcttgggtacagtttacaaatacaacctctcttagtttgcccaatacctccaaattcctggggtggcacacctgaggttcaggtggcatgactgagccacagtcacacatccccactgtaggataccaccacggttgggttaggttccagcacatggcggtcccggcctggcctcttggtcccacctcacctggtgactagtgcagaccactctgttcttgcctgtttcaggcagcggaggaggagaaagagatggacctcccggactcggcctcgagggtcttctgcggccgcatcctgagcatggtgaacacagatgatgtcaacgccatcatcctggcccagaagaacatgctggaccgctttgagaagaccaatgagatgctgctcaacttcaacaacctgtccagtgcccgcctgcagcagatgagcgaacgcttcctgcaccacacgaggaccctagtagagatgaaacgggacctggacagcatcttccgccgtatcaggacgctgaaagggaaactggccaggcagcacccagaggccttcagccatatcccagaggcatccttcctggaggaagaggatgaagaccccatcccacccagcaccacgaccaccattgccacctcagaacagagcacgggctcatgtgacacca

SEQ ID NO: 147126 - DNA, 707 bp, Homo sapiens
  Payload ID: 9105
  Gene Symbol: KXD1
  Gene Name: KxDL motif containing 1
  Uniprot ID: Q9BQD3
  ENST ID: ENST00000599319
  CDS Start-End: 88-618
ggagaaacagcctgtcctgagctccagtcgttatcacctttggtttcagttgccacagacagcactgcagcggaggaggagaaagagatggacctcccggactcggcctcgagggtcttctgcggccgcatcctgagcatggtgaacacagatgatgtcaacgccatcatcctggcccagaagaacatgctggaccgctttgagaagaccaatgagatgctgctcaacttcaacaacctgtccagtgcccgcctgcagcagatgagcgaacgcttcctgcaccacacgaggaccctagtagagatgaaacgggacctggacagcatcttccgccgtatcaggacgctgaaagggaaactggccaggcagcacccagaggccttcagccatatcccagaggcatccttcctggaggaagaggatgaagaccccatcccacccagcaccacgaccaccattgccacctcagaacagagcacgggctcatgtgacaccagccccgacaccgtctcgccctccctgagccccggcttcgaggacctgtcccatgtccagcctggctccccagccatcaacggccgcagccagacagatgacgaggagatgacgggcgaatagccctgctgcccggtgccttgagggggtctcagggcagcagcatacaaggtggcagcgggtaaccctgccttgttctgtcatccagggct

SEQ ID NO: 147127 - DNA, 712 bp, Homo sapiens
  Payload ID: 9105
  Gene Symbol: KXD1
  Gene Name: KxDL motif containing 1
  ENST ID: ENST00000596785
  CDS Start-End: 490-712
ggccgccagatgtgcaggttcaagccattctcctgcctcagccatccaagtagctgcgactacaggtgcccgccaccatgcccggctaattttttttgtatttttagtagagactgagtttcactatgttggccaggctggttttgaactcctgacctcaagcagtctgcccacctcggcctcccaaagtgctaggattacagacgtgagccaccacacccggcctctgaaaccctttctgatccagtagaagttcgtctctgtttcttggctattaaatgtgtgggcctcagagccaaactatatcaagatcctagatttttcctgaactccctaggagggtcagtgctgtagcccctcctaccctggctgctccgggaagtccctgcctgccattacggtcatctgtgtgccagcaaaactgggaacctcagaaccatctggattgctggggcccacaggttggctgcagcggaggaggagaaagagatggacctcccggactcggcctcgagggtcttctgcggccgcatcctgagcatggtgaacacagatgatgtcaacgccatcatcctggcccagaagaacatgctggaccgctttgagaagaccaatgagatgctgctcaacttcaacaacctgtccagtgcccgcctgcagcagatgagcgaacgcttcctgcaccacacgaggaccctagtagagatgaaac

SEQ ID NO: 147128 - DNA, 635 bp, Homo sapiens
  Payload ID: 9105
  Gene Symbol: KXD1
  Gene Name: KxDL motif containing 1
  ENST ID: ENST00000597438
  CDS Start-End: 135-635
ttcagaagggtgaagtggctctcccatggtcaaacagcctacctctctgcgtttcttcaataaatctacatttggagttgggatcagagctcttgctgggtcaatttcactgtgcagcggaggaggagaaagagatggacctcccggactcggcctcgagggtcttctgcggccgcatcctgagcatggtgaacacagatgatgtcaacgccatcatcctggcccagaagaacatgctggaccgctttgagaagaccaatgagatgctgctcaacttcaacaacctgtccagtgcccgcctgcagcagatgagcgaacgcttcctgcaccacacgaggaccctagtagagatgaaacgggacctggacagcatcttccgccgtatcaggacgctgaaagggaaactggccaggcagcacccagaggccttcagccatatcccagaggcatccttcctggaggaagaggatgaagaccccatcccacccagcaccacgaccaccattgccacctcagaacagagcacgggctcatgtgacaccagccccgacaccgtctcgccctccctgagccccggcttcgaggacctgtcccatgtccagcctggctccccagccatcaacggccgcagccag

SEQ ID NO: 147129 - DNA, 1327 bp, Homo sapiens
  Payload ID: 9105
  Gene Symbol: KXD1
  Gene Name: KxDL motif containing 1
  ENST ID: ENST00000601630
  CDS Start-End: 61-648
gccatcccggaagcgcgagcaaggccgccagatgtgcaggcagcggaggaggagaaagagatggacctcccggactcggcctcgagggtcttctgcggccgcatcctgagcatggtgaacacagatgatgtcaacgccatcatcctggcccagaagaacatgctggaccgctttgagaagaccaatgagatgctgctcaacttcaacaacctgtccagtgcccgcctgcagcagatgagcgaacgcttcctgcaccacacgaggaccctagtagagatgaaacgggacctggacagcatcttccgccgtatcaggcttcactgcgcacttaagtgtctgggacaattccaaccctgggataaaatcttgacgacgctgaaagggaaactggccaggcagcacccagaggccttcagccatatcccagaggcatccttcctggaggaagaggatgaagaccccatcccacccagcaccacgaccaccattgccacctcagaacagagcacgggctcatgtgacaccagccccgacaccgtctcgccctccctgagccccggcttcgaggacctgtcccatgtccagcctggctccccagccatcaacggccgcagccagacagatgacgaggagatgacgggcgaatagccctgctgcccggtgccttgagggggtctcagggcagcagcatacaaggtggcagcgggtaaccctgccttgttctgtcatccagggctcctttgctgccccgttctgtcacccagggctcctagggggacaaggctctctcccgaggggtgtggaattcctgggggggtctttaattctggctccttccttcctcagaacatctctattctgcaagacccctctgccatgccagggcacgcccattccagctggagtcgtggggctgggcacaggggaatttttccagagctgagcctgacgtctgctctgaagaatgcttagaaggttcccagacaccagagccagatgtcccccaccaccggtcaggacctccttgaggtgcacaagcacggtctcctctgagttcaccccagcccacccccgcacccactaattctgcttttcctgccccttgctccgtaaaagtatcaaatactttctccttggtatctcaaggaggtttctgagataggtagaagtcttgagacggaggctggccatccattcagccctgagcgtgctgagttctgtgtttctctgaatagaggtgtggaacctgaggggccagcaggcctctctgaaggcctccatggagcaaacggagccacctcgggaaagagtttaatggaatattttt

SEQ ID NO: 147130 - DNA, 517 bp, Homo sapiens
  Payload ID: 9105
  Gene Symbol: KXD1
  Gene Name: KxDL motif containing 1
  ENST ID: ENST00000600099
  CDS Start-End: 1-257
gcggccgcatcctgagcatggtgaacacagatgatgtcaacgccatcatcctggcccagaagaacatgctggaccgctttgagaagaccaatgagatgctgctcaacttcaacaacctgtccagtgcccgcctgcagcagatgagcgaacgcttcctgcaccacacgaggaccctagtagagatgaaacgggacctggacagcatcttccgccgtatcagatatcccagaggcatccttcctggaggaagaggatgaagaccccatcccacccagcaccacgaccaccattgccacctcagaacagagcacgggctcatgtgacaccagccccgacaccgtctcgccctccctgagccccggcttcgaggacctgtcccatgtccagcctggctccccagccatcaacggccgcagccagacagatgacgaggagatgacgggcgaatagccctgctgcccggtgccttgagggggtctcagggcagcagcatacaaggtggcagcgggtaaccctg

SEQ ID NO: 147131 - DNA, 1095 bp, Homo sapiens
  Payload ID: 9105
  Gene Symbol: KXD1
  Gene Name: KxDL motif containing 1
  Uniprot ID: Q9BQD3
  ENST ID: ENST00000595073
  CDS Start-End: 49-579
gcgcgagcaaggccgccagatgtgcaggcagcggaggaggagaaagagatggacctcccggactcggcctcgagggtcttctgcggccgcatcctgagcatggtgaacacagatgatgtcaacgccatcatcctggcccagaagaacatgctggaccgctttgagaagaccaatgagatgctgctcaacttcaacaacctgtccagtgcccgcctgcagcagatgagcgaacgcttcctgcaccacacgaggaccctagtagagatgaaacgggacctggacagcatcttccgccgtatcaggacgctgaaagggaaactggccaggcagcacccagaggccttcagccatatcccagaggcatccttcctggaggaagaggatgaagaccccatcccacccagcaccacgaccaccattgccacctcagaacagagcacgggctcatgtgacaccagccccgacaccgtctcgccctccctgagccccggcttcgaggacctgtcccatgtccagcctggctccccagccatcaacggccgcagccagacagatgacgaggagatgacgggcgaatagccctgctgcccggtgccttgagggggtctcagggcagcagcatacaagaacatctctattctgcaagacccctctgccatgccagggcacgcccattccagctggagtcgtggggctgggcacaggggaatttttccagagctgagcctgacgtctgctctgaagaatgcttagaaggttcccagacaccagagccagatgtcccccaccaccggtcaggacctccttgaggtgcacaagcacggtctcctctgagttcaccccagcccacccccgcacccactaattctgcttttcctgccccttgctccgtaaaagtatcaaatactttctccttggtatctcaaggaggtttctgagataggtagaagtcttgagacggaggctggccatccattcagccctgagcgtgctgagttctgtgtttctctgaatagaggtgtggaacctgaggggccagcaggcctctctgaaggcctccatggagcaaacggagccacctcgggaaagagttta

SEQ ID NO: 147132 - DNA, 656 bp, Homo sapiens
  Payload ID: 9105
  Gene Symbol: KXD1
  Gene Name: KxDL motif containing 1
  ENST ID: ENST00000600372
  CDS Start-End: 262-656
ggctccagggtacgtccccgccacgcgcgctcgcaggatcggtgcgtggtgacgtttcgccggcgcgggcgccatcccggaagcgcgagcaaggccgccagatgtgcaggagggtcagtgctgtagcccctcctaccctggctgctccgggaagtccctgcctgccattacggtcatctgtgtgccagcaaaactgggaacctcagaaccatctggattgctggggcccacaggttggctgcagcggaggaggagaaagagatggacctcccggactcggcctcgagggtcttctgcggccgcatcctgagcatggtgaacacagatgatgtcaacgccatcatcctggcccagaagaacatgctggaccgctttgagaagaccaatgagatgctgctcaacttcaacaacctgtccagtgcccgcctgcagcagatgagcgaacgcttcctgcaccacacgaggaccctagtagagatgaaacgggacctggacagcatcttccgccgtatcaggacgctgaaagggaaactggccaggcagcacccagaggccttcagccatatcccagaggcatccttcctggaggaagaggatgaagaccccatcccacccagcaccacgaccaccattgccacctcagaacagagcacggg

SEQ ID NO: 147133 - DNA, 498 bp, Homo sapiens
  Payload ID: 9105
  Gene Symbol: KXD1
  Gene Name: KxDL motif containing 1
  ENST ID: ENST00000599000
  CDS Start-End: 58-444
atcccggaagcgcgagcaaggccgccagatgtgcaggcagcggaggaggagaaagagatggacctcccggactcggcctcgagggtcttctgcggccgcatcctgagcatggtgaacacagatgatgtcaacgccatcatcctggcccagaagaacatgctggaccgctttgagaagaccaatgagatgctgctcaacttcaacaacctgtccagtgcccgcctgcagcagatgagcgaacgcttcctgcaccacacgaggaccctagtagagatgaaacgggacctggacagcatcttccgccgtatcaggacgctgaaagggaaactggccaggcagcacccagaggccttcagccgtaagtgtcacgcagggttcctgctcccgagcacgtcagcactctccacccagggcaggcttctggaaggccaccttggggcctgatactgagaccaggctgtaatgggcagtgggtctggggaaacctggggtgggggc

SEQ ID NO: 147134 - DNA, 895 bp, Homo sapiens
  Payload ID: 9105
  Gene Symbol: KXD1
  Gene Name: KxDL motif containing 1
  Uniprot ID: Q9BQD3
  ENST ID: ENST00000600654
  CDS Start-End: 45-575
gagcaaggccgccagatgtgcaggcagcggaggaggagaaagagatggacctcccggactcggcctcgagggtcttctgcggccgcatcctgagcatggtgaacacagatgatgtcaacgccatcatcctggcccagaagaacatgctggaccgctttgagaagaccaatgagatgctgctcaacttcaacaacctgtccagtgcccgcctgcagcagatgagcgaacgcttcctgcaccacacgaggaccctagtagagatgaaacgggacctggacagcatcttccgccgtatcaggacgctgaaagggaaactggccaggcagcacccagaggccttcagccatatcccagaggcatccttcctggaggaagaggatgaagaccccatcccacccagcaccacgaccaccattgccacctcagaacagagcacgggctcatgtgacaccagccccgacaccgtctcgccctccctgagccccggcttcgaggacctgtcccatgtccagcctggctccccagccatcaacggccgcagccagacagatgacgaggagatgacgggcgaatagccctgctgcccggtgccttgagggggtctcagggcagcagcatacaaggtggcagcggaacatctctattctgcaagacccctctgccatgccagggcacgcccattccagctggagtcgtggggctgggcacaggggaatttttccagagctgagcctgacgtctgctctgaagaatgcttagaaggttcccagacaccagagccagatgtcccccaccaccggtcaggacctccttgaggtgcacaagcacggtctcctctgagttcaccccagcccacccccgcacccactaattctgcttttcctgccccttgctc

SEQ ID NO: 147135 - DNA, 2738 bp, Homo sapiens
  Payload ID: 9105
  Gene Symbol: KXD1
  Gene Name: KxDL motif containing 1
  Uniprot ID: Q9BQD3
  ENST ID: ENST00000602094
  CDS Start-End: 1461-1991
tgagtagctgggactacaggtgcccgccatcatgcctggctaatttttgtatttttagtagagacgggggtttcaccatgttcaccaggctagtcttgaactcatgacctcaggtgatccaccagccttggcttcccaaagtgctgagattacaggcatgagcacccggtccaggtatcctctttatacaagatcatgcttctttgggaatgtggagactgggtgtctctgcatggcatgtcataggagttcaataaccatagttattattagagggaagggggttttgctgggtgtggcaccttatttctagaaggtgctgcaaaccactgaccagatacagatcacaaatagatgctcttggcctccatgatatcttggaaaaaagtattgattgctgacatttgtcaatgaggcaatttcccagaaaaaaaaaatccctgtttcctttttcctggagaaacatcagaagtcaggcagaaatcagctgctgtaagaagccactgtcctgtcacagctggatattgtgcacctgttcagattcacacctttgtgagacccgtgggctgtggccgtttgttgtgacttaggttcactggctgtgtgacagtggcccagtttctcagtgtccctgagcctcagttttctcatctataaataagaatgataacagtatgtatgagcttgatgctttgtttagcatagagtagctgctgaataaatgggagagtacattaagtgagctctgaaaccctttctttctctttcctttctttctctctttctctgtctctctctctttctctcctctctctttctctctttgtctctctctctttctctccttctctctctctttctctctctcccttccttccttccctccctccctcccttccttccttcttttcgagatggagtctcactctgtcgcccgggctggagtgtagtggcatgatctcggctcattgcaacctctgcctcccaggttcaagccattctcctgcctcagccatccaagtagctgcgactacaggtgcccgccaccatgcccggctaattttttttgtatttttagtagagactgagtttcactatgttggccaggctggttttgaactcctgacctcaagcagtctgcccacctcggcctcccaaagtgctaggattacagacgtgagccaccacacccggcctctgaaaccctttctgatccagtagaagttcgtctctgtttcttggctattaaatgtgtgggcctcagagccaaactatatcaagatcctagatttttcctgaactccctaggagggtcagtgctgtagcccctcctaccctggctgctccgggaagtccctgcctgccattacggtcatctgtgtgccagcaaaactgggaacctcagaaccatctggattgctggggcccacaggttggctgcagcggaggaggagaaagagatggacctcccggactcggcctcgagggtcttctgcggccgcatcctgagcatggtgaacacagatgatgtcaacgccatcatcctggcccagaagaacatgctggaccgctttgagaagaccaatgagatgctgctcaacttcaacaacctgtccagtgcccgcctgcagcagatgagcgaacgcttcctgcaccacacgaggaccctagtagagatgaaacgggacctggacagcatcttccgccgtatcaggacgctgaaagggaaactggccaggcagcacccagaggccttcagccatatcccagaggcatccttcctggaggaagaggatgaagaccccatcccacccagcaccacgaccaccattgccacctcagaacagagcacgggctcatgtgacaccagccccgacaccgtctcgccctccctgagccccggcttcgaggacctgtcccatgtccagcctggctccccagccatcaacggccgcagccagacagatgacgaggagatgacgggcgaatagccctgctgcccggtgccttgagggggtctcagggcagcagcatacaaggtggcagcgggtaaccctgccttgttctgtcatccagggctcctttgctgccccgttctgtcacccagggctcctagggggacaaggctctctcccgaggggtgtggaattcctgggggggtctttaattctggctccttccttcctcagaacatctctattctgcaagacccctctgccatgccagggcacgcccattccagctggagtcgtggggctgggcacaggggaatttttccagagctgagcctgacgtctgctctgaagaatgcttagaaggttcccagacaccagagccagatgtcccccaccaccggtcaggacctccttgaggtgcacaagcacggtctcctctgagttcaccccagcccacccccgcacccactaattctgcttttcctgccccttgctccgtaaaagtatcaaatactttctccttggtatctcaaggaggtttctgagataggtagaagtcttgagacggaggctggccatccattcagccctgagcgtgctgagttctgtgtttctctgaatagaggtgtggaacctgaggggccagcaggcctctctgaaggcctccatggagcaaacggagccacctcgggaaagagtttaatggaatatttttgtacccgatgtttacagatgctgttgggaagttatcaataaaaagacaccattactaaaaagggaaaa

SEQ ID NO: 147136 - DNA, 341 bp, Homo sapiens
  Payload ID: 9105
  Gene Symbol: KXD1
  Gene Name: KxDL motif containing 1
  ENST ID: ENST00000596244
  CDS Start-End: 326-341
gacgggagggaggtgccaggaacccctcagccctcacatctgggagccagagacagaaaagagtcctgttttgaaggaggagtgtatcccagaaggtcccagtactgtgtctcactggtactagctatgggcctccctctccaggtgtctttttttttttttttttttttttttcagttgagatgaagtctccctctgtagcccacactagaatgcagtggcttgattttggctcattgcaacctctgcctcccgggttcaagcgattctcctgcctcagcctcctgagtagctgggactacaggcagcggaggaggagaaagagatggacctcccggact

SEQ ID NO: 147137 - DNA, 15316 bp, Homo sapiens
  Payload ID: 9106
  Gene Symbol: KYNU
  Gene Name: kynureninase
  Uniprot ID: Q16719
  ENST ID: ENST00000264170
  CDS Start-End: 259-1656
tggcatttgaaatggtgggcaggagcacatgttgcttaaatttctgacagtggctggagattaccgattggttaggggagaggaagtaaagtaaaatatttataaattctccactgggtggagtctgagcagttctttgaatttctcaccctaagatctggcctgtacattttcaaggaattcttgagaggttcttggagagattctgggagccaaacactccattgggatcctagctgttttagagaacaacttgtaatggagccttcatctcttgagctgccggctgacacagtgcagcgcattgcggctgaactcaaatgccacccaacggatgagagggtggctctccacctagatgaggaagataagctgaggcacttcagggagtgcttttatattcccaaaatacaggatctgcctccagttgatttatcattagtgaataaagatgaaaatgccatctatttcttgggaaattctcttggccttcaaccaaaaatggttaaaacatatcttgaagaagaactagataagtgggccaaaatagcagcctatggtcatgaagtggggaagcgtccttggattacaggagatgagagtattgtaggccttatgaaggacattgtaggagccaatgagaaagaaatagccctaatgaatgctttgactgtaaatttacatcttctaatgttatcattttttaagcctacgccaaaacgatataaaattcttctagaagccaaagccttcccttctgatcattatgctattgagtcacaactacaacttcacggacttaacattgaagaaagtatgcggatgataaagccaagagagggggaagaaaccttaagaatagaggatatccttgaagtaattgagaaggaaggagactcaattgcagtgatcctgttcagtggggtgcatttttacactggacagcactttaatattcctgccatcacaaaagctggacaagcgaagggttgttatgttggctttgatctagcacatgcagttggaaatgttgaactctacttacatgactggggagttgattttgcctgctggtgttcctacaagtatttaaatgcaggagcaggaggaattgctggtgccttcattcatgaaaagcatgcccatacgattaaacctgcattagtgggatggtttggccatgaactcagcaccagatttaagatggataacaaactgcagttaatccctggggtctgtggattccgaatttcaaatcctcccattttgttggtctgttccttgcatgctagtttagagatctttaagcaagcgacaatgaaggcattgcggaaaaaatctgttttgctaactggctatctggaatacctgatcaagcataactatggcaaagataaagcagcaaccaagaaaccagttgtgaacataattactccgtctcatgtagaggagcgggggtgccagctaacaataacattttctgttccaaacaaagatgttttccaagaactagaaaaaagaggagtggtttgtgacaagcggaatccaaatggcattcgagtggctccagttcctctctataattctttccatgatgtttataaatttaccaatctgctcacttctatacttgactctgcagaaacaaaaaattagcagtgttttctagaacaacttaagcaaattatactgaaagctgctgtggttatttcagtattattcgatttttaattattgaaagtatgtcaccattgaccacatgtaactaacaataaataatataccttacagaaaatctgatataatttttcagagtctgtggcactaaggagtccacagggctgcctaggtgctttgtgtttgggggaccaaaactgtgttggttcaagtattatctatacagtctctataagctgtcacatttcatggtcattgaaatgttttatgttggtttaatttctgatttaactgacaacttcataatgtatgtgcaattattgtgtcaaatttagaaatattactttagcttcaatttaccaaggagtttctttgaagcattgtagtctgatatatatatatatatatatatatatatatatatatatatatatatatgtgtgtgtgtgtgtgtgtatatatatatatatatatcatatatatatgatagtggctttcaaatttttttgggtacaatccacattgctcctgctgatctgtaatatcagaaaccagtatttatgtgaatatatgagaaatattattgattctaagatattttatcatattttaacatctttgaaagaggacccatctttcaattttcgatcaatagtttcttacagtcaccattggccatctttctcgttaccatctatgaaattagcatgcatctcaaataaacagttaccatcttctatttgataaaatagtctaaatagcaaaaataaaagtttttacaattatttgcctgtgctctaataggtactattctattttatctcataagaaatgttggaaactcattatattgatttccttacccactcatgggccctaattcacactttttaagaatgtttctttctttaatgttatcataatctcttactttttaaatgagaacttcccctaatataagagcttagatattatattactatgtttccatagtaaataaataaccccaagatctttttggggattagagatataagaaatatgtgctccatctcttgacatctttatctcaaatctatggacctttcttacccactgtgaaaaacctaaagttacacttagccctgttggacttacctagttttcaattgttgatgccacaatcattatttataagttgacaaaatagtgtagatttgtatacatagtcaacaaaaagagtgacataattattgcctccaattaaacaagtttgaatgaaataaacaaacttagataaacacttcggatggtagacgtaaacaataatatgtggaactccaacatcaacacctaccaataccagtaactactgatatttatcatgtacttaccatgtaccatgtattgtgctacattactcatgttatctcccttaattgagtggctacatactgctttagcaaatcttcctactgtaactaatcctcatagatggaagagttctcaaaaccttaaaactcatgcataagtggattcatatacatatataaaaatatatataaatatatatactttatatatatttatatttatatatttatatatttatattttaatatatttatataaatatatataaagtataatatatataaagtataaatatatatatatttatactttaagttcttggatacacgtgcagaacatgcaggtttgttacataggtatacatgtgccgtggtggattgctgcacccatcaacccgtcatctacatcaggtatttctcctaatgctcaccctcctcttatccccaactacccaaaaggacctggtgtgtgatgttcccctccctgtgttcatatgttctcattgttcaactctcacttatgggtaagaacatgcagtgtttgattttctgttcctctgttagtttgctgagaatgatggtttccagcttcatccatgtccctgcaaaggacatgaactcattcttttttatggctgcatagtattccatggtatatatgtgccacattttctttatccagtctatcattgatggccatttgagttggttccaagtcttcgctattgtgaatagtgctgcaatgaacatatgtgtgcatgtgtctttatagtagaatgatttataatccttagggtatacccagtaatgggattgctgggttaaatggtatttctggttctagatcctcgaggaattgccacactgtcttccacaatggttgaactaatttatactcccaccaacagtgtaaaagcattcctatttctccacatcctctcagcatctgttgtttcttgactttttaatgattagcattctaactggcgtgagatggtatttcattgtggttttgatttgcatttctctaatgaccagtgatgatgagttttttttcatatatttgttggccgcataaatgtcttcttttgagaagtgtctgttcgtatccttcacccactttttgatggggttgtgtttttcttgtaaatttatttaagtcccttgtagattctggatattttccctttgtcagatggatagattgcaaaaattttctcccgttctgtaggttgcccgatcactctgatgatagtttcttttgctgtgtagaagctctttagtttaatcaggttccatttgtcagttttggcttttgttgcaattgcttttggtgttttagtcttaaattctttgcccatgcctatgtcctgaatggtattgcctagatattcttctagggttttttttttggctttaggtcttgcagttaagtctttaatctatcttgagttaatttttgtataagatataagaaaggggtccagtttcagttttctgcatatggctagccagttttcccaacactatttattaaatagggaatcttttccccattgcttgtttttgtcaggtttatcaaagatcagatggttgtaaatgtgtggtgttatttctgaggcctctgttttgttccattggtctatatgtctgtttttgttcagtaccatgctgttttgtttactatagccttgtagtatagtttgaagtcaggtagtgtgatgcctccagctttgttctttttgcttaggattgtcttggcaatacaggttcttttttggttccatatgaaatttaaagtagttttttctaattctgtgaagaaagacaatggtagcttgatggaaatagcattgaatctataaattactctcagcaatatggccattttcaggatattgattcttcctatctatgagcatggaatgtttttccatttgtttgtgtcctctctggtatccttgagcagtggtttgtagttctcattgaagtagtccttcacatcccttgtaagttgtattcctaggtattttattctctttgcagcaattgtgaatgggagttcactcatgatttggttctctgtttgtcctatatacatatgttggtatataggaatgcttttattttaaagatggaagatgatgtctctctatgtaactcaggcaggtctcaaactcctgggctcaaatgatcctcctaccttaacctcctgagtagctgagactttagtcacacaccaccatgcctgaccaggaattgtttttcaacttcatagtggtaaacaaaacatatgtgttttcagttctcatggaacaagcagcttagtaggagaaacatatgttgaacttgtaagcagagaagtaaatctataatgacaaatcataatttctgaagggtattaattagatgtttgagtgaggggaaatattggaaggtgctcataagtttataaatgttctaaaatatttcatgctaatcacattaaaattatatcaaagtatataaacatatcatggaaaacataatcagcaccatgtactcaacacctaggttaaaaaatagcattaaaaattctctttccagctcacattctgctccctccccaaatccacagataaccatcgaattatattttgttttcttcattcccttactttctttaagttttacacccatgtatgtacccataaaaatctattagctaattttggttgtgcatgaatattgtatcaatgcaattatactgtatatattctgcttttgcacatatttttagattcatccatttgtggcatgtagctttccattcattttcactgctgctcagtattgtattacaaattttacatttgttttagggaagagtcataaaccatctttaagttctcctatgttacaagtaattttgtaaatgatgtgaggtggtgattctatttcattttttcccatatagataatttatattattaataattccttctatttcataagccaggtttctatatatctatataaatatagatatgtagatatatgaaagcaatatatatatggatgtctttctgggctatctgtactttcacactggctaatttgcttgttttttcatcaatacttcacttccttaattactacaacatagcagggcctggcatctgctagattaaatctctcagcttctttttattaagattgccctgaattgtcctggttatcctgggccccctactttttttatatttttgaatacatctaaataaatttagaataaatctattgtgttccataaaacccctgttgggatttcaattgaactgcaattaaattttagatcagttttggaagaattgactcaatagtgagccttcctacccaagaccatggcatttattttcatttatttatgatttctttaatgcttctcaaaattttttattttctctattatggaaacgcacatttatagtttgacaaattcctaagtacttctaattttattgtcattccacattatcttttttgttgttgttttaaaagacagggtctccctctgtcacccaggctggagtgtactgatgtgattatagctcactgcagtctcaacctcctgggctcaagtgatcctcccacgtcagcctgtggagtagctaggactacaggcatgtgccacaatgcctggctcatttttaagtgttaagttaaaaaaagttgtagaaacagtgttttgctacatttcccaggctggtctcaaactcctggccccaagcaatcttcctgcctcagcttcccatattcggattatacgcatgaggcattgcaccagccccatgtgttatcttttataaaatttaacatttaactgataattgatactgtatatacatgaattcaattggtatctatttttaatatgggaaattttatgcaaatgagcacatttttctcccttccttccttccttctttccttgttctctttctttctctctctttctctttctctctttctttctttctttctttctcacagggtgtcactctgttgcccaggcggagtgcagtggcacatgatcatagctcactgcaacctccaactcaaacacttgagtgatcctctgtcccccgtttcccaagcagctgggactacaggcacatgccacgatgccaagctaatttttaaaaataattttttttgtagattcagagtcttgctatgttgcccaggctaatctcaaactcctggcctcaagcagtcctccctcctcagcctcccattacaggcataagctgccactcctggacctcttttttttttttttttttttttttttgaggcagtctctctctgtcacccaggctggagtatagtggcacgatctcagctcactgcgggttcaagcaattttcatgcctcagcctcccaagtagctgggattacaggcatgggccactatgcccagctaatttttgtatttttcatagagacaggatttcaccatgttggctaggctggtatcaaactcctgacttcaggtgatccgcccactttgaccttccaaaatgctgggattacgtgtgagccaccaaacccagcccctcattttctttttgatttttatttattttcctctgtttttcttcttttggatttagggatgtgtgtgtggaggtgtattgagtccgttttttctttctatttgtgtggaaattatacacttattctttgttattttagcaattactctggctattttaacatgcaaatataatgaagtttagaattagccattttttataactctccttctgactagttgaagaaatgagaatgctttaacatcaaacagccaactctttacttatacactattgctattcattatagcatttttagtctagcttcctccctcctctttctctctctctctctctgtctctctctctctcactaatgtttgctatttctccctacaattcagaattttatttatggatgaagtacatatataatttattacaattcattttaatgaaaaacttttagtggtaaattgtattagtctttgggaaaaaacatttattgataccattttctcattacttaaaaatagtttcacttcatatagaattctatgtcgacagtaattttctttcaggaagtagaaaatattaagttacagtattttggcttccattactgctgttaagcattcagatcatcagagaaatgcaaatcagaaccacaatgagatgccatctcatgccagtcagaatggcaatcattaaaaagtcaggaaacaatagatgctggtgaggctgtggagaaataagaatgcttttacactgttagtgggaatgtaaattagttcaaccattgctcttaagggctctttgtctttaatgatccgcatttttattatgatgtgtctaggcagttattattgtgtttattctatttctttatttgctgtctatccaagatttgaggattaattttttaatttctagaaaattcagaagtattatttatttattcaattattacctctttctattatttcctttttaaaataaaagggtatatgttagaatttttcactctctcctttatgcctttaacttcatattttctatttctttgaatttctgggctgcattcttaagaattctaaaacatatattttagtttctaaaagtttcattagatttctgttcaaaattccttccatttgtgatctttcgaatgtgcttctgctttaggcattagtagtggacattctggttccccattgagcttccctgcatcagctgttttgcctggtggctgccaccaacgcttttagctacctccctcctcaaactttggggtcaggccacacactataaaggattggaaaaaaaaatgaaaatatgaaaaacttacactttgtatcagtcaggagaaggataatcttcacactacagtttatgcttcagaagccaccccttctctgtggattagaccatgactagaagtttcctgagaccatcccttgcccagctcttttggtgatccccttcacttcctctgttacaggtttccctgatgagcactccttcaataaaacatagtcatccaaatcccaatctcaagcacggtgtcacgggaacctgatctaagtcagcattttctttattcttaatcacaactagttgatagtccatatctaatatataatgaatgtacagttgtttctgttggagttcacatatgatgccttgtttcctttgtagttttgtgattgatagcttcgaactgctcatttaccttgaccttttgaattctttgaaaactgagttaagtctgattttccagagtttttatgtttgcttctgtcagttgcagagaatcaatgagaagaacactttaaattcttgttttcggtttttttccaatcacataagtaggatttacctgaatatatatataatatataaacatatatttatataaaataaaaacatataaaatatgaaatatataatacagtataaaatctattttatgtaaaatctattttatgtaaacatgataattaaatatatatttaaataatataaatataataaatatttgaagcaattgtattttttaaaaatttcttctaaagaaaaccaggatacatgtgcagaacctgcaggtttgttacataggtatacgtgtgccatggtggtttgctgcacctattgacccgtcctctaagttccctcccctcacctcccaccccccagcaggccctggtgtgtgttgttcccctctctgtgtccatgtattctcgcctcccacttatgagtgagaacacgcgatgtttggttttctgttcctgtgttaatttgctgaggatgatagcttccagcttcatccacgtccctgcaaaggacatgatctcattcctcaatactatggctacgtagtattccatggtgtatatataccacattttcttcatccagtcatgcaaatttatatgaatgtcaattcttttatagtgatcttctggggctattacaatatatagggctgtttttttaaaactaattatatttatttcatgttgctttaacttattaaaaaacagactgaagaaagactgggtgtgaagtcagtaaattaatttcaaattaaataaacttttctacagctattttatgctcaataactttctacttattcttgagttcaaaactatatgggttcacatttaaattatatagtgtattttctccataaactgaagttgttagaacattgatttttttaagtaaatggatttttgcaccacttcaagaaagaaaccttcaaacagcctggaaatatcacatcaataaagcacaacctgggaatcaaagtattagggtaccttgttactgagattatggatgtgatgcttctgtgggccattagcatgtgcactgtgtgtatgatatgctctatgttctcttcccactaataattttatttttaatttcagcaagatttagtctcaaataacacaataataatggaggtcattgtgaagtagtggatgtaaatagatctgatgtggttttggtttattgcagtaattgttttgactaattctctagtttttcaacttttgattgtttaagatggttcttgagtccttttgacatgaccctatctatttttgataacttcatagcctttagtataaaaacaggtaggcttatattacatatttccaacttcaaacttgttatttatttatctaagactatacagttcttttcagagaaaaaccttctttataaaccagaatcttaacaggaagagtgctcattttaattgagctgatcatgtttctaggattttttagttaaaagaaaatacatattttaaaaatataaattatatttttatttcatagtggtattttcaattttgtctgggataataagatgttttatttaacttgtttgattttgtagttttatctttgtgggaaggacctggtaagaggtaattgaatcatgggggcaggactttcccatgatgttctcatgataatgaataagtttcatgagatctgttggtttcataatgtggagtttccctgcaaaggctcttgtcctgtctgtgccatttgagacatgcctttcaacttctgccctgattgtgaggcctcccccgccatgtggaattgggtcttacttttgtaaattgcccagtctcaggtatgtctttatcagcagcctgaaaactgactaatatagtaagttggcaccagtagagaggggcactgctgaaaaggtacccgaatatgtggaagcaactttaaactgggtaacaggcagaggttggaatggtttggagggctcataagaagacaggaaagtgtgggaaatttggaactccctagagacttgttgaatggctttaaccaaaatgctgataataatatgaacaatgaagtccaggctgaggtggtctcagacaaagataaggaacttcttgggaactggagcaaaggtgactcttgttatgttttagacataaagcaaagagactggaggcattttgcccctgccctagagatttgtgggacattaaacttgagacagattatttagggtatctggaggaagaaatttttatgcagcaaagcattcaagaggtgacttggttgctattaaaggcattcagttttaaaagggaaatacagcataaaagttcagaaaattttcagcctgacaatgcagtagaaaaggaaaaccaattttctgaggagaaatttaagctggctgcagacatttacataagtaacaagaagctgaatgttaatcactaagacaatgaggaaaatgtctccagggcatgtcagagacctttgtggcagcccctcccatcacagaccaggagctttagaaggaaaaatggcttcgtgggctggtcacagggtccctctgctgtgtgcagtctagggacttggtgccctgtgtcccagcagctccatccatgactaaaaggggccaaggtacagcttgggctgtggcttcagagggtggaagccccaagtcttggcagcttccatatggtgttgagcctgggttcacagaagtcaagaactgaggtttgggaacttacaccaagatttcagaggatgtatggaaatgcctggatgcccaggcagaagtttgctgcaggggcaaggccctcatggagaacctctgctagggcagtgaagaagggaaaagtatggtgggagcccccatacagagtccctactgaggcaccacctagtggagctttgagaagagggccactgtcctccagaactcaggatggtaaatccaccacgcacctggaaaagctgcagacaattccagcctgttaaagcagccaggagggggctataccctgcaaagccacaggggcggacctgctcaaggctgtgggagaccacctcttgcatcagtgtgacctggatgtgagacatggagtcaaaggagatcattttggagctttaagatttgactgccccactggatttcagactttcatggggcctgtagccccttcgttttggccaatgcctcccatttggagtggctgtatttacccaatgcctgtatccccattgtatctaggaagtaactaacttgcttttgattttacaggcccataggtggaagggcgatgtttctttctggaggctccagggagaactctgttttcttaccttttctggattctagaggcttcccacaatccttggcttaaggtccatctttaagctttgtctctgatgagactttggactgcggacttttgagttaatgctgaaatgagttaagactttgggtgactgttgcgaagacatgattggttttgaaatgtgagaacatttaagaggggccaggggcagaatgatatggtttgactttgtccgcagtcaaatctcatcttgaatttctatgtgtttggagaggtacccggtgggaggtaattgaatcatgagggcaggtcttttctgtgctgttctcatgatggtgagtaagtctcatgagatctgatggttttataaaggggagtttccctgcccaagttcttctcttgtctgccatcatgtgcgatgtgcctttcacctctgccatgattatgaggcctccctggccatgtggaactgtgagtccattaaacctctttcttttgtaaattgcccaatcttgggaatgtctttatcagcagtgggaaaacggattaatatactaatttatagctagtaggtaaaaagccagggacttgccattagcgttggaagtggggttgtgggggcagtcttgtggaactgagcccttaacctgtggggttgaatgatatctccaggtatatcatgtcagaattgaattcaattagaggatacctagcttgcgttcaatgcagaattgcttgctggtgaggagaaatccctatacacattttggtgaccagaggtaaagcattttatgttgattcttgagtgagagagtagaaataacactggttttttccctatgtccttacaaccaccaattggatacattgtttcagtattttgaaatttttcatttaatttttataaattttctttttaaattttagattctacaatatctccaattcttcagtttattccctcttactatgtataagtatttccccaagtttcactttatctttctattactttttttacataatagagctataaaggcaattcacaattctctcttttctcatatataatatagagcatattataaatactctactttggaaaattattctttataggaaattacagataatatttgatgaagaaaatcgaatataatcatttttcaatacttaggataacagattcaggcaaagataaaacattaaaggaaaagttagtgaaaactattaatatatagtggaggcatcacgttgttatgaacttcattgatcaatactgataccactaaaaatggaacaacatgtaattatgtgctcaatgtgatgaatatgaagtagactgcaccactctgcagtacagtcaggaaataagaaaccaagtccaatcaaaatagccctaaagctaccttccagtttataaaaagtatgaagaatagaggggcaattaaatgataccataaagagtcaaatacagggcatgcaacatagctgctgattggatttattcaacatgtcagtggcatgaatacaataggaggcaggtagggagaaggcactaccctgaattatgagactgaagagatataataaacaaatgcaatgtgtggacttggttgggatcttcattcaaagaccaactataaaaagacattgttgtgagaattgaggaaatttgaatgagaaatgtatttttatctaatttgttagctgtgataatagtattgtgggagtaagaagctattcatatttctatatatatataccaagtacataggagtgaaataatacaaaatctggaatttgccttaaaattcctctgcaaaattataaaaaagaacgatgacaaactaaaaaggtgtagtattcttctatggctgctataacaaatgaccaaaaaacatagtgactgaaaataacccacatttattatcttacagttccataggttagaagttcaacatgggtctcatgagatcaaaagcaaggccttggcagggtgacgtttctttctggaggttccagggggaactctgttttcttactttttttagattctagaggcttcccacaatccttggcttaaggtccatctttaaagacagcaacgtttcatctctctacctattctttcatccttacatctttctctaactattccttttcttctgtcttccacttttaagagcctttttgagtctattgaggccaactggacaatcaaggattatctccctatgttaaggtcaattgattagtgacctaattccatctacaatcacaattcctctttgccatataatgtaaaatattcatacctctaaggattaggacatggacatctttgagggtcattagtcatcttaccacaggaaggaaggaaggaaggaaggaaggaaggaaggaaggaaggaaggaaggaaagggaggagaggagaggagaggtaggagggaagaagaaaaaaatagtatgaaaaaatcttgataaatttgaaaactgggtgaataatatgtggaattctctctatttttgttaatgttggaaaatttaataaaaacaatgaacagtg

SEQ ID NO: 147138 - DNA, 1772 bp, Homo sapiens
  Payload ID: 9106
  Gene Symbol: KYNU
  Gene Name: kynureninase
  Uniprot ID: Q16719
  ENST ID: ENST00000375773
  CDS Start-End: 100-1023
ggcctgtacattttcaaggaattcttgagaggttcttggagagattctgggagccaaacactccattgggatcctagctgttttagagaacaacttgtaatggagccttcatctcttgagctgccggctgacacagtgcagcgcattgcggctgaactcaaatgccacccaacggatgagagggtggctctccacctagatgaggaagataagctgaggcacttcagggagtgcttttatattcccaaaatacaggatctgcctccagttgatttatcattagtgaataaagatgaaaatgccatctatttcttgggaaattctcttggccttcaaccaaaaatggttaaaacatatcttgaagaagaactagataagtgggccaaaatagcagcctatggtcatgaagtggggaagcgtccttggattacaggagatgagagtattgtaggccttatgaaggacattgtaggagccaatgagaaagaaatagccctaatgaatgctttgactgtaaatttacatcttctaatgttatcattttttaagcctacgccaaaacgatataaaattcttctagaagccaaagccttcccttctgatcattatgctattgagtcacaactacaacttcacggacttaacattgaagaaagtatgcggatgataaagccaagagagggggaagaaaccttaagaatagaggatatccttgaagtaattgagaaggaaggagactcaattgcagtgatcctgttcagtggggtgcatttttacactggacagcactttaatattcctgccatcacaaaagctggacaagcgaagggttgttatgttggctttgatctagcacatgcagttggaaatgttgaactctacttacatgactggggagttgattttgcctgctggtgttcctacaagtatttaaatgcaggagcaggaggaattgctggtgccttcattcatgaaaagcatgcccatacgattaaacctgcgagatcggagttctttaattaggaatggaatgcaacagatttggacaagtcaaggacaagagctttagagagaccaaagagtttttcactgttaaagtgtccagtatgtagccgagaaccatatggagaacatcaaatacagtggaacaaatgtaactgctattgatgtcacactttgtgaagtagtctttgttgcttaaaaagggtgacatctagtggctaaacatgttatttcaaataaataatatcgaaataacatttcttctcatggtccactcattcactctttaacaagtattttgaagtatatatgtttgaattatgtgttcttctttttgacaatttgactatatgttgatagtgcaataattgtgcagtttaagccttcaataaagaggtagaatgtgatgaaaattggaaggaaacctgagggggcattcttagtgcttggttaaacagaaagcttaacagttcatgaaggctggtctaagaaaggaattataagcatgggtgacccacctggtgtagagagtgtatccccagatatataacattgcattttagaagtctaatatttggtatataatttttgaaatagtcctttatgtgatgtttccattagcaaacagcaaattgcatctgtaccaagagatttcacttccttttttgtttaaatatgcattttggacattgttcaaaacctatgacctaaggcttttccaagagccctttgcccataaagagaatgaataaattagaggccagagtcaa

SEQ ID NO: 147139 - DNA, 1576 bp, Homo sapiens
  Payload ID: 9106
  Gene Symbol: KYNU
  Gene Name: kynureninase
  Uniprot ID: Q16719
  ENST ID: ENST00000409512
  CDS Start-End: 179-1576
acattttcaaggaattcttgagaggttcttggagagattctgggagccaaacactccattgggatcctagctggaatataaagaatggcttatcagtggagaccatcgacagttgagaaaagaagaagcccaaaaagtacaagaatgaaaatcgagagtttttagagaacaacttgtaatggagccttcatctcttgagctgccggctgacacagtgcagcgcattgcggctgaactcaaatgccacccaacggatgagagggtggctctccacctagatgaggaagataagctgaggcacttcagggagtgcttttatattcccaaaatacaggatctgcctccagttgatttatcattagtgaataaagatgaaaatgccatctatttcttgggaaattctcttggccttcaaccaaaaatggttaaaacatatcttgaagaagaactagataagtgggccaaaatagcagcctatggtcatgaagtggggaagcgtccttggattacaggagatgagagtattgtaggccttatgaaggacattgtaggagccaatgagaaagaaatagccctaatgaatgctttgactgtaaatttacatcttctaatgttatcattttttaagcctacgccaaaacgatataaaattcttctagaagccaaagccttcccttctgatcattatgctattgagtcacaactacaacttcacggacttaacattgaagaaagtatgcggatgataaagccaagagagggggaagaaaccttaagaatagaggatatccttgaagtaattgagaaggaaggagactcaattgcagtgatcctgttcagtggggtgcatttttacactggacagcactttaatattcctgccatcacaaaagctggacaagcgaagggttgttatgttggctttgatctagcacatgcagttggaaatgttgaactctacttacatgactggggagttgattttgcctgctggtgttcctacaagtatttaaatgcaggagcaggaggaattgctggtgccttcattcatgaaaagcatgcccatacgattaaacctgcattagtgggatggtttggccatgaactcagcaccagatttaagatggataacaaactgcagttaatccctggggtctgtggattccgaatttcaaatcctcccattttgttggtctgttccttgcatgctagtttagagatctttaagcaagcgacaatgaaggcattgcggaaaaaatctgttttgctaactggctatctggaatacctgatcaagcataactatggcaaagataaagcagcaaccaagaaaccagttgtgaacataattactccgtctcatgtagaggagcgggggtgccagctaacaataacattttctgttccaaacaaagatgttttccaagaactagaaaaaagaggagtggtttgtgacaagcggaatccaaatggcattcgagtggctccagttcctctctataattctttccatgatgtttataaatttaccaatctgctcacttctatacttgactctgcagaaacaaaaaattag

SEQ ID NO: 147140 - DNA, 776 bp, Homo sapiens
  Payload ID: 9106
  Gene Symbol: KYNU
  Gene Name: kynureninase
  ENST ID: ENST00000410015
  CDS Start-End: 91-537
attttcaaggaattcttgagaggttcttggagagattctgggagccaaacactccattgggatcctagctgttttagagaacaacttgtaatggagccttcatctcttgagctgccggctgacacagtgcagcgcattgcggctgaactcaaatgccacccaacggatgagagggtggctctccacctagatgaggaagataagctgaggcacttcagggagtgcttttatattcccaaaatacaggatctgcctccagttgatttatcattagtgaataaagatgaaaatgccatctatttcttgggaaattctcttggccttcaaccaaaaatggttaaaacatatcttgaagaagaactagataagtgggccaaaatagcagcctatggtcatgaagtggggaagcgtccttggattacaggagatgagagtattgtaggccttatgaaggacattgtagccacccttacagacccccaacacaatcaacctggaaatgacctcagtatgtgtaatcttaagtcatcttgctaacgcagacacctctgaggttcccaagaaaacttcagtggagttctctaaactgaaaccttgagagaggaagattttcaagtaggaaccagacaaattcacttaaaactcaccactacacacctgtgtcatagaagcattccattttttctattgcagatgggatttcctcttcaagcttactgtactgtgtctttttaaaaaatagttgaagacatcggaataaaagctaatgtcccaaa

SEQ ID NO: 147141 - DNA, 636 bp, Homo sapiens
  Payload ID: 9106
  Gene Symbol: KYNU
  Gene Name: kynureninase
  ENST ID: ENST00000424385
  CDS Start-End: 277-507
agaggttcttggagagattctgggagccaaacactccattgggatcctagctgcttaagtgtaggactgaaaaaagaagccaaagaaaaagggaatgagctgaagaaatacacacacgtacacacacacatcaggaagcaacaggcaaggaaaaataaagtgagaggttcaaggcttcgaggaggaattgagctctgtgcattccattcatgggctttgccaaagaccagcacaatggactcagcatctcaggcatgttttagagaacaacttgtaatggagccttcatctcttgagctgccggctgacacagtgcagcgcattgcggctgaactcaaatgccacccaacggatgagagggtggctctccacctagatgaggaagataagctgaggcacttcagggagtgcttttatattcccaaaatacaggatctgcctccagagcagcctatggtcatgaagtggggaagcgtccttggattacaggagatgagagtattgtaggccttatgaaggacattgtaggtctaattgccttgaagaaacatcataaggactcaaaacatggaaggagccaatgagaaagaaatagccctaatgaatgctttgactgtaaatttacatcttctaatg

SEQ ID NO: 147142 - DNA, 671 bp, Homo sapiens
  Payload ID: 9106
  Gene Symbol: KYNU
  Gene Name: kynureninase
  ENST ID: ENST00000612147
  CDS Start-End: 1-505
aaaaatggttaaaacatatcttgaagaagaactagataagtgggccaaaatagcagcctatggtcatgaagtggggaagcgtccttggattacaggagatgagagtattgtaggccttatgaaggacattgtaggagccaatgagaaagaaatagccctaatgaatgctttgactgtaaatttacatcttctaatgttatcattttttaagcctacgccaaaacgatataaaattcttctagaagccaaagccttcccttctgatcattatgctattgagtcacaactacaacttcacggacttaacattgaagaaagtatgcggatgataaagccaagagagggggaagaaaccttaagaatagaggatatccttgaagtaattgagaaggaaggagactcaattgcagtgatcctgttcagtggggtgcatttttacactggacagcactttaatattcctgccatcacaaaagctggacaagcgaagcttactaaaagttgaatgcaaatggtggttaaaaagaagaccaaattctgcaaactccaacattgttttattagcttctacttctttgtgtgccatatgatgctttgtttgggtgcaaacgtctcacatctcttagactcaatcataagctgtttaaattattaaaaaataataatcacaa

SEQ ID NO: 147143 - DNA, 662 bp, Homo sapiens
  Payload ID: 9106
  Gene Symbol: KYNU
  Gene Name: kynureninase
  ENST ID: ENST00000613664
  CDS Start-End: 1-472
agcagcctatggtcatgaagtggggaagcgtccttggattacaggagatgagagtattgtaggccttatgaaggacattgtaggagccaatgagaaagaaatagccctaatgaatgctttgactgtaaatttacatcttctaatgttatcattttttaagcctacgccaaaacgatataaaattcttctagaagccaaagccttcccttctgatcattatgctattgagtcacaactacaacttcacggacttaacattgaagaaagtatgcggatgataaagccaagagagggggaagaaaccttaagaatagaggatatccttgaagtaattgagaaggaaggagactcaattgcagtgatcctgttcagtggggtgcatttttacactggacagcactttaatattcctgccatcacaaaagctggacaagcgaaggtggcaacactgggtagcagctctgtcccttagatggggcttaagctcttcgacacaacatccatgtttacccactgagcccaccattgaagccaagtcatcgctggtgaatatatctatatgaataccacaacattatgtgtgtgtgtgtgtgtgtgtgtgtattcatgcttatgatattcttacaatgaagtgtaaaataaagtatttcttgcaggcccaa

SEQ ID NO: 147144 - DNA, 802 bp, Homo sapiens
  Payload ID: 9106
  Gene Symbol: KYNU
  Gene Name: kynureninase
  ENST ID: ENST00000621320
  CDS Start-End: 1-711
gctgacacagtgcagcgcattgcggctgaactcaaatgccacccaacggatgagagggtggctctccacctagatgaggaagataagctgaggcacttcagggagtgcttttatattcccaaaatacaggatctgcctccagttgatttatcattagtgaataaagatgaaaatgccatctatttcttgggaaattctcttggccttcaaccaaaaatggttaaaacatatcttgaagaagaactagataagtgggccaaaatagcagcctatggtcatgaagtggggaagcgtccttggattacaggagatgagagtattgtaggccttatgaaggacattgtaggagccaatgagaaagaaatagccctaatgaatgctttgactgtaaatttacatcttctaatgttatcattttttaagcctacgccaaaacgatataaaattcttctagaagccaaagccttcccttctgatcattatgctattgagtcacaactacaacttcacggacttaacattgaagaaagtatgcggatgataaagccaagagagggggaagaaaccttaagaatagaggatatccttgaagtaattgagaaggaaggagactcaattgcagtgatcctgttcagtggggtgcatttttacactggacagcactttaatattcctgccatcacaaaagctggacaagcgaaggtggtatagaaattgattttgaaggagagagaaaatacaagatttcaagtggtcatcaaagaagaaaactaattaataaaaagaacaattgataatatga

SEQ ID NO: 147145 - DNA, 609 bp, Homo sapiens
  Payload ID: 9107
  Gene Symbol: KMO
  Gene Name: kynurenine 3-monooxygenase (kynurenine 3-hydroxylase)
  ENST ID: ENST00000366555
  CDS Start-End: 1-547
aggaatgaatgcgggctttgaagactgcttggtatttgatgagttaatggataaattcagtaacgaccttagtttgtgtcttcctgtgttctcaagattgagaatcccagatgatcacgcgatttcagacctatccatgtacaattacatagagatgcgagcacatgtcaactcaagctggttcatttttcagaagaacatggagagatttcttcatgcgattatgccatcgacctttatccctctctatacaatggtcactttttccagaataagataccatgaggctgtgcagcgttggcattggcaaaaaaaggtgataaacaaaggactctttttcttgggatcactgatagccatcagcagtacctacctacttatacactacatgtcaccacgatctttcctccgcttgagaagaccatggaactggatagctcacttccggaatacaacatgtttccccgcaaaggccgtggactccctagaacaaatttccaatctcattagcaggctgctgagtcactcagaaatccttcaaacatgattaattatgaagatgaaacactagagtcatataagaaataaaaattgggcaataaaataaaa

SEQ ID NO: 147146 - DNA, 4888 bp, Homo sapiens
  Payload ID: 9107
  Gene Symbol: KMO
  Gene Name: kynurenine 3-monooxygenase (kynurenine 3-hydroxylase)
  Uniprot ID: O15229
  ENST ID: ENST00000366557
  CDS Start-End: 41-1399
gacagaagcaacaataattgtgaaaaatacttcagcagttatggactcatctgtcattcaaaggaaaaaagtagctgtcattggtggtggcttggttggctcattacaagcatgctttcttgcaaagaggaatttccagattgatgtatatgaagctagggaagatactcgagtggctaccttcacacgtggaagaagcattaacttagccctttctcatagaggacgacaagccttgaaagctgttggcctggaagatcagattgtatcccaaggtattcccatgagagcaagaatgatccactctctttcaggaaaaaagtctgcaattccctatgggacaaagtctcagtatattctttctgtaagcagagaaaatctaaacaaggatctattgactgctgctgagaaataccccaatgtgaaaatgcactttaaccacaggctgttgaaatgtaatccagaggaaggaatgatcacagtgcttggatctgacaaagttcccaaagatgtcacttgtgacctcattgtaggatgtgatggagcctattcaactgtcagatctcacctgatgaagaaacctcgctttgattacagtcagcagtacattcctcatgggtacatggagttgactattccacctaagaacggagattatgccatggaacctaattatctgcatatttggcctagaaatacctttatgatgattgcacttcctaacatgaacaaatcattcacatgtactttgttcatgccctttgaagagtttgaaaaacttctaaccagtaatgatgtggtagatttcttccagaaatactttccggatgccatccctctaattggagagaaactcctagtgcaagatttcttcctgttgcctgcccagcccatgatatctgtaaagtgctcttcatttcactttaaatctcactgtgtactgctgggagatgcagctcatgctatagtgccgttttttgggcaaggaatgaatgcgggctttgaagactgcttggtatttgatgagttaatggataaattcagtaacgaccttagtttgtgtcttcctgtgttctcaagattgagaatcccagatgatcacgcgatttcagacctatccatgtacaattacatagaggtcactttttccagaataagataccatgaggctgtgcagcgttggcattggcaaaaaaaggtgataaacaaaggactctttttcttgggatcactgatagccatcagcagtacctacctacttatacactacatgtcaccacgatctttcctccgcttgagaagaccatggaactggatagctcacttccggaatacaacatgtttccccgcaaaggccgtggactccctagaacaaatttccaatctcattagcaggtgatagaaaggttttgtggtagcaaatgcatgatttctctgtgaccaaaattaagcatgaaaaaaatgtttccattgccatatttgattcactagtggaagatagtgttctgcttataattaaactgaatgtagagtatctctgtatgttaattgcaattactggttggggggtgcattttaaaagatgaaacatgcagcttccctacattacacacactcaggttgagtcattctaactataaaagtgcaatgactaagatccttcacttctctgaaagtaaggccctagatgcctcagggaagacagtaatcatgccttttctttaaaagacacaataggactcgcaacagcattgactcaacacctaggactaaaaatcacaacttaactagcatgttaactgcacttttcattacgtgaatggaacttacctaaccacagggctcagacttactagataaaaccagaaatggaaataaggaattcaggggagttccagagacttacaaaatgaactcattttattttcccaccttcaaatataagtattatcatctatctgtttatcgtctatctatctatcatctatctatctatctatcatctatctatctatctatctatctatctatctatctatctatctctatttatttatgtatttagagatcaggtctcactctgttgaccaggctggagtgcagtggtgagatctgggttcactgcaacctctgcctcctgggctcaagcaatcctcccacttcagcctcccaaatagctggggctaccatggtatttttcagtagagaccgggtcttgccatgctgcccaggccagtctcaaactcctggcctcatgtgatctgcccacctcagcctcccaaagtacagggattagagttgtgagccaccgctgccagcccagagttaccctctaaagataagaaaaaggctattaatatcatactaagtgaaggacaggaaagggttttattcataaattaaatgtctacatgtgccagaatggaaaggaaacaaggggagacaacttttatagaaatacaaagccattactttattcaatttcagaccctcagaagcaatttactaatttattcttcgactacatactgcagcagaaccagcaatacacttgatttttaaaagcacatttagtgaaatgttttctttggttcatccttctttaacaggctgctgagtcactcagaaatccttcaaacatgattaattatgaagatgaaacactagagtcatataagaaataaaaattgggcaataaaataaaatgattcagtgtttcttttctatattgtcaatgaaaaccttgagttctaataatccatgttcagtttgtagggaaagaaaaaataatttttccttctacccactttaggttccttggctggggcccctataacaaaagacagattgacaagagaaaaacaaacataaatttattagcgggtatatgtaatatatatgtgggaaatacaggggaatgagcaaatctcaaagagctggcgtcttagaactccctggcttatatagcatcgacaaagaacagtaaatttttagagaaacaacaaaacaaagaaaaagagctttgagtctgtaggggcagcaatttgggggaagcaaatatatgggagtttgccttgtagattcctctggtgctggtctccaggctgacaaggattcaaagttgtctctgaaactcctctttgtcatactgcacatataaaacgtcttttgtttccaacaagaggattttctttttcattctagaattatctccttgataacttgatcagatataggacatgacactgaatagagtccaacagtacaaaaaaaattcagtatgttctagctacttcacacatgtgtacgcgacagttatttttacagtaaggtattttcgagaaaaatgcattacgtgttttggaaaatagagtaatttaaaaaatatatttgaaatgaaaatctccaacacattagaagatgatgatgttagatgcccatcgtgtgccacaagtggttttttcattatgtaaagcacccgttgaattaaaagaatttgtttttgttcaacctcttcctgaggcccaagagcatatgggcaattcggatttcctgctggaccacaaggttctgttgatattacatagaacgggtattccagacacttcttatgatgaaagtccaaaagtggcatccaatttaaggccccatctttcgttgccattcttcattcctacaaaggacgaacttggattacatcaactttggacccattggttttgtcgctgtcgtcaactgacagtgattcatcactggtgatgataaaaatgatggaagaagagttgaaagtcacttttttctttggcctgtccccatctttctgtgacatcacaatgggtctgatctgcatttcacttccagctgctggtaggtctttagcaggcctctggcacctcagcagtcggaggcacagaagctgcaaaagggatcttcgaaactgggcagagaaaaaataaagtggaatattaagtaaaagttgggcactaatctggattaacattcgaggaaatcagttgagctgaatttaagttgttttttgtttgttagcaggtgtggatgtggggttatgtggtcatgctcagatctacctaaatcaccccagagctttatgtcttttattcattctaattcttattaaccggaatatgtaggaccatttcaataccttgtaatcctccaagcttcaatctgcacacactttctatgagggcaggtacaactattaagagattttgaacattaagttagtccacaaatattcagtgggcatctactaggtgacagccactgtgctataattagagactttttactataagcatcaaaaacagataaggctcttcctggcagagtttacagcctggtgtacttgctaatgtctctttaattaggtgaagaattttttttttctatcgaaattactaatcagttggggaaaaaaatactatagcagacagcactaatgtcatcaacaaacattgttcttctccgtgtcctgggtacaacatcgaataatatttcttggcctcctttccgcttctcctctctgctgttcctctctacaagaacctgggaggccaacgcctaaagatcataatatcacacaatggaaggaacctagattcctaaatgactgcataggacagatcccatctcctccacccaatacattattagactgaactgtgacctgaaatgagcaataaactctgtattaattcactgaaatgttggggttgcttgttatagtagtcggtccatcatgaccagtaaaacataaatcaaaagttaatgtaattgttatcccattatttagagcgaaataaatgttgaatatatggactttctcagattaggaaataccaattaaaaatataataaatagcta

SEQ ID NO: 147147 - DNA, 1868 bp, Homo sapiens
  Payload ID: 9107
  Gene Symbol: KMO
  Gene Name: kynurenine 3-monooxygenase (kynurenine 3-hydroxylase)
  Uniprot ID: O15229
  ENST ID: ENST00000366558
  CDS Start-End: 312-1733
gcttaaaaatttctgtgtcttacacagaagatagaaaaaatagagtgtctccaattggatggattttttaaaaaatttggttattgtaatggatttattttttcttagagctgagctgattgtactttggccaactaatgggttaatactgtcaagggaaattagccctgactaaacattgccgctggctcatgaatgcactaggcttggggcagtataaaaactcagagaaatcagtgtgtaggagacacagaaatcagtgtcactcagtgacagaagcaacaataattgtgaaaaatacttcagcagttatggactcatctgtcattcaaaggaaaaaagtagctgtcattggtggtggcttggttggctcattacaagcatgctttcttgcaaagaggaatttccagattgatgtatatgaagctagggaagatactcgagtggctaccttcacacgtggaagaagcattaacttagccctttctcatagaggacgacaagccttgaaagctgttggcctggaagatcagattgtatcccaaggtattcccatgagagcaagaatgatccactctctttcaggaaaaaagtctgcaattccctatgggacaaagtctcagtatattctttctgtaagcagagaaaatctaaacaaggatctattgactgctgctgagaaataccccaatgtgaaaatgcactttaaccacaggctgttgaaatgtaatccagaggaaggaatgatcacagtgcttggatctgacaaagttcccaaagatgtcacttgtgacctcattgtaggatgtgatggagcctattcaactgtcagatctcacctgatgaagaaacctcgctttgattacagtcagcagtacattcctcatgggtacatggagttgactattccacctaagaacggagattatgccatggaacctaattatctgcatatttggcctagaaatacctttatgatgattgcacttcctaacatgaacaaatcattcacatgtactttgttcatgccctttgaagagtttgaaaaacttctaaccagtaatgatgtggtagatttcttccagaaatactttccggatgccatccctctaattggagagaaactcctagtgcaagatttcttcctgttgcctgcccagcccatgatatctgtaaagtgctcttcatttcactttaaatctcactgtgtactgctgggagatgcagctcatgctatagtgccgttttttgggcaaggaatgaatgcgggctttgaagactgcttggtatttgatgagttaatggataaattcagtaacgaccttagtttgtgtcttcctgtgttctcaagattgagaatcccagatgatcacgcgatttcagacctatccatgtacaattacatagagaagaacatggagagatttcttcatgcgattatgccatcgacctttatccctctctatacaatggtcactttttccagaataagataccatgaggctgtgcagcgttggcattggcaaaaaaaggtgataaacaaaggactctttttcttgggatcactgatagccatcagcagtacctacctacttatacactacatgtcaccacgatctttcctccgcttgagaagaccatggaactggatagctcacttccggaatacaacatgtttccccgcaaaggccgtggactccctagaacaaatttccaatctcattagcaggtgatagaaaggttttgtggtagcaaatgcatgatttctctgtgaccaaaattaagcatgaaaaaaatgtttccattgccatatttgattcactagtggaagatagtgttctgcttataattaaactgaatgtagagta

SEQ ID NO: 147148 - DNA, 5261 bp, Homo sapiens
  Payload ID: 9107
  Gene Symbol: KMO
  Gene Name: kynurenine 3-monooxygenase (kynurenine 3-hydroxylase)
  Uniprot ID: O15229
  ENST ID: ENST00000366559
  CDS Start-End: 312-1772
gcttaaaaatttctgtgtcttacacagaagatagaaaaaatagagtgtctccaattggatggattttttaaaaaatttggttattgtaatggatttattttttcttagagctgagctgattgtactttggccaactaatgggttaatactgtcaagggaaattagccctgactaaacattgccgctggctcatgaatgcactaggcttggggcagtataaaaactcagagaaatcagtgtgtaggagacacagaaatcagtgtcactcagtgacagaagcaacaataattgtgaaaaatacttcagcagttatggactcatctgtcattcaaaggaaaaaagtagctgtcattggtggtggcttggttggctcattacaagcatgctttcttgcaaagaggaatttccagattgatgtatatgaagctagggaagatactcgagtggctaccttcacacgtggaagaagcattaacttagccctttctcatagaggacgacaagccttgaaagctgttggcctggaagatcagattgtatcccaaggtattcccatgagagcaagaatgatccactctctttcaggaaaaaagtctgcaattccctatgggacaaagtctcagtatattctttctgtaagcagagaaaatctaaacaaggatctattgactgctgctgagaaataccccaatgtgaaaatgcactttaaccacaggctgttgaaatgtaatccagaggaaggaatgatcacagtgcttggatctgacaaagttcccaaagatgtcacttgtgacctcattgtaggatgtgatggagcctattcaactgtcagatctcacctgatgaagaaacctcgctttgattacagtcagcagtacattcctcatgggtacatggagttgactattccacctaagaacggagattatgccatggaacctaattatctgcatatttggcctagaaatacctttatgatgattgcacttcctaacatgaacaaatcattcacatgtactttgttcatgccctttgaagagtttgaaaaacttctaaccagtaatgatgtggtagatttcttccagaaatactttccggatgccatccctctaattggagagaaactcctagtgcaagatttcttcctgttgcctgcccagcccatgatatctgtaaagtgctcttcatttcactttaaatctcactgtgtactgctgggagatgcagctcatgctatagtgccgttttttgggcaaggaatgaatgcgggctttgaagactgcttggtatttgatgagttaatggataaattcagtaacgaccttagtttgtgtcttcctgtgttctcaagattgagaatcccagatgatcacgcgatttcagacctatccatgtacaattacatagagatgcgagcacatgtcaactcaagctggttcatttttcagaagaacatggagagatttcttcatgcgattatgccatcgacctttatccctctctatacaatggtcactttttccagaataagataccatgaggctgtgcagcgttggcattggcaaaaaaaggtgataaacaaaggactctttttcttgggatcactgatagccatcagcagtacctacctacttatacactacatgtcaccacgatctttcctccgcttgagaagaccatggaactggatagctcacttccggaatacaacatgtttccccgcaaaggccgtggactccctagaacaaatttccaatctcattagcaggtgatagaaaggttttgtggtagcaaatgcatgatttctctgtgaccaaaattaagcatgaaaaaaatgtttccattgccatatttgattcactagtggaagatagtgttctgcttataattaaactgaatgtagagtatctctgtatgttaattgcaattactggttggggggtgcattttaaaagatgaaacatgcagcttccctacattacacacactcaggttgagtcattctaactataaaagtgcaatgactaagatccttcacttctctgaaagtaaggccctagatgcctcagggaagacagtaatcatgccttttctttaaaagacacaataggactcgcaacagcattgactcaacacctaggactaaaaatcacaacttaactagcatgttaactgcacttttcattacgtgaatggaacttacctaaccacagggctcagacttactagataaaaccagaaatggaaataaggaattcaggggagttccagagacttacaaaatgaactcattttattttcccaccttcaaatataagtattatcatctatctgtttatcgtctatctatctatcatctatctatctatctatcatctatctatctatctatctatctatctatctatctatctatctctatttatttatgtatttagagatcaggtctcactctgttgaccaggctggagtgcagtggtgagatctgggttcactgcaacctctgcctcctgggctcaagcaatcctcccacttcagcctcccaaatagctggggctaccatggtatttttcagtagagaccgggtcttgccatgctgcccaggccagtctcaaactcctggcctcatgtgatctgcccacctcagcctcccaaagtacagggattagagttgtgagccaccgctgccagcccagagttaccctctaaagataagaaaaaggctattaatatcatactaagtgaaggacaggaaagggttttattcataaattaaatgtctacatgtgccagaatggaaaggaaacaaggggagacaacttttatagaaatacaaagccattactttattcaatttcagaccctcagaagcaatttactaatttattcttcgactacatactgcagcagaaccagcaatacacttgatttttaaaagcacatttagtgaaatgttttctttggttcatccttctttaacaggctgctgagtcactcagaaatccttcaaacatgattaattatgaagatgaaacactagagtcatataagaaataaaaattgggcaataaaataaaatgattcagtgtttcttttctatattgtcaatgaaaaccttgagttctaataatccatgttcagtttgtagggaaagaaaaaataatttttccttctacccactttaggttccttggctggggcccctataacaaaagacagattgacaagagaaaaacaaacataaatttattagcgggtatatgtaatatatatgtgggaaatacaggggaatgagcaaatctcaaagagctggcgtcttagaactccctggcttatatagcatcgacaaagaacagtaaatttttagagaaacaacaaaacaaagaaaaagagctttgagtctgtaggggcagcaatttgggggaagcaaatatatgggagtttgccttgtagattcctctggtgctggtctccaggctgacaaggattcaaagttgtctctgaaactcctctttgtcatactgcacatataaaacgtcttttgtttccaacaagaggattttctttttcattctagaattatctccttgataacttgatcagatataggacatgacactgaatagagtccaacagtacaaaaaaaattcagtatgttctagctacttcacacatgtgtacgcgacagttatttttacagtaaggtattttcgagaaaaatgcattacgtgttttggaaaatagagtaatttaaaaaatatatttgaaatgaaaatctccaacacattagaagatgatgatgttagatgcccatcgtgtgccacaagtggttttttcattatgtaaagcacccgttgaattaaaagaatttgtttttgttcaacctcttcctgaggcccaagagcatatgggcaattcggatttcctgctggaccacaaggttctgttgatattacatagaacgggtattccagacacttcttatgatgaaagtccaaaagtggcatccaatttaaggccccatctttcgttgccattcttcattcctacaaaggacgaacttggattacatcaactttggacccattggttttgtcgctgtcgtcaactgacagtgattcatcactggtgatgataaaaatgatggaagaagagttgaaagtcacttttttctttggcctgtccccatctttctgtgacatcacaatgggtctgatctgcatttcacttccagctgctggtaggtctttagcaggcctctggcacctcagcagtcggaggcacagaagctgcaaaagggatcttcgaaactgggcagagaaaaaataaagtggaatattaagtaaaagttgggcactaatctggattaacattcgaggaaatcagttgagctgaatttaagttgttttttgtttgttagcaggtgtggatgtggggttatgtggtcatgctcagatctacctaaatcaccccagagctttatgtcttttattcattctaattcttattaaccggaatatgtaggaccatttcaataccttgtaatcctccaagcttcaatctgcacacactttctatgagggcaggtacaactattaagagattttgaacattaagttagtccacaaatattcagtgggcatctactaggtgacagccactgtgctataattagagactttttactataagcatcaaaaacagataaggctcttcctggcagagtttacagcctggtgtacttgctaatgtctctttaattaggtgaagaattttttttttctatcgaaattactaatcagttggggaaaaaaatactatagcagacagcactaatgtcatcaacaaacattgttcttctccgtgtcctgggtacaacatcgaataatatttcttggcctcctttccgcttctcctctctgctgttcctctctacaagaacctgggaggccaacgcctaaagatcataatatcacacaatggaaggaacctagattcctaaatgactgcataggacagatcccatctcctccacccaatacattattagactgaactgtgacctgaaatgagcaataaactctgtattaattcactgaaatgttggggttgcttgttatagtagtcggtccatcatgaccagtaaaacataaatcaaaagttaatgtaattgttatcccattatttagagcgaaataaatgttgaatatatggactttctcagattaggaaataccaattaaaaatataataaatagcta

SEQ ID NO: 147149 - DNA, 2345 bp, Homo sapiens
  Payload ID: 9108
  Gene Symbol: KY
  Gene Name: kyphoscoliosis peptidase
  Uniprot ID: Q8NBH2
  ENST ID: ENST00000423778
  CDS Start-End: 63-2048
atttgcagcgcaagcagcctagcgtgcggccgcggcgcccaggtcggaaaggaggcggcatcatggagctgaagaaggacatcaacgctgtatctatcgacatgctgctgatcgtgcactcggagaagcggcgcgccgcacagggtacgctctcagaccagcaggcgaacccgagctcgctgctgcagcgcggaggaggattccaaggtgttggaaatggagtccgaagatggcagaaattagaaggaaatgactttcacgaaaacttggtggagaagcagcaccctcagcagccccaggtcatcacttcctacaacagccaagggacacaactgactgtggaagtccaccctcgagatgccatgccccagctgctcaagaagttctccttggctaaacgtttacaaggtgataaaaatggaaacacaagaccccggcaacctggagggaaagatgcccatgcctacccctgggatcgatctagcctgaaatccatgtccctggacctgcagcagtttgagaaattggatatctacgcctcacaggtgacagccaagagtggcctagacgaactggtgagtgacctgctccaggaggcccacactgacctggaaagggtccgcgccatctggatctggatctgccatcacatagagtatgacattgcagctgctcaggagaaggaccgccaagccttcaaacccactgacatcctgcggacccagaagaccaactgtgatggctatgctggcctcttcgagagaatgtgcaggctcgccggagtgcagtgtatgaccgtgcctggctactccaagggtttcggctaccagacagggcagagcttctcgggggagtttgaccatgcctggaatgctgtgtacctggagggaagatggcacctggtggacagcacctggggcagcggcctggtggacaccatcacctccaaattcaccttcctctacaatgagttctacttcctcacccaccctgcactgttcatcgaggaccacttcccagacaacaagaactggcagctgctaaaacctcctcaatctctgaggcagtttgagaacaacatgtatcacaagagtgaattctacaacaaagggatgctgagtgcccacccagagacttccatgatcagaacagtgaatgggaaggccacggtcaccattgagagctgcgccccgacgctgttcatgttcatgctcaatggcaagcaagagcatgggctgctgagcctaaggaagaatgggatgaagttggaggtgtaccctccaaccatgggcactcacaagctgcagatctttgccaagggcaactccgacatctacagctcagtgctggagtacacgctcaagtgcaattatgtggacatgggtgtccagctgcctgctgagcttcaccagcccgtgggccccagctggttctcggagcagatgggcatcatgaagccctcccaccctgaccctatcatccacaccagcgacgggcgctgctccatcagcttcagcgtggaggagggcattaatgtcctggcttccctccacggggatgatggccccatcactgaggagacacagcggcgctacatcttccagctgcaccgggagaagcagaccgagctgaaagtccagctgccccatgcaggcaagtttgccctcaagatctttgtcaagaagaggcaggaaccaggaaactacatcttcgtctttaattaccttgtatgctgtgccaacaccaaggtgaactggcccatgttccctgagagctttggcaactggggacaggacaatgagctgctggaacctctgtcaggtgtgcttcctgccaaccggaatgtcccattcaaattgaagctgcatggtattgccaaagtcctggtgaaggggcaggacacatggcccctgaccctgaaccacgagggctactgggagggaagctgcagcacagctggctgccaggaagtctatgtcatggtgctggagaatgccaaccacaatttctactcctacatcctgaaatacaaagtgaatgcccagtgagggctgtgccccggtcttaccctcccaaagggccaaggccagacctccccagggagggctcgaaggaagtgcagggagccctggacaccactgagtctgcatgaaatcccttctaggcctctgcctcagtgtcccacctctgccacaggagctgtgatctttgtgttctgaaggcttcactcaggtgtggctgtgactgagggggcagaggcagtggctctttagaaggaaaaggtgctatgtaaatctaaggtattgtaaactgtacacctgcatccagatgccccttctcgtatt

SEQ ID NO: 147150 - DNA, 2422 bp, Homo sapiens
  Payload ID: 9108
  Gene Symbol: KY
  Gene Name: kyphoscoliosis peptidase
  Uniprot ID: Q8NBH2
  ENST ID: ENST00000508956
  CDS Start-End: 59-1981
gcagcgcaagcagcctagcgtgcggccgcggcgcccaggtcggaaaggaggcggcatcatggagctgaagaaggacatcaacgctgtatctatcgacatgctgctgatcgtgcactcggagaagcggcgcgccgcacagggtacgctctcagaccagcaggcgaacccgagctcgctgctgcagcgcggaggaggattccaaggtgttggaaatggagtccgaagatggcagaaattagaaggaaatgactttcacgggacacaactgactgtggaagtccaccctcgagatgccatgccccagctgctcaagaagttctccttggctaaacgtttacaaggtgataaaaatggaaacacaagaccccggcaacctggagggaaagatgcccatgcctacccctgggatcgatctagcctgaaatccatgtccctggacctgcagcagtttgagaaattggatatctacgcctcacaggtgacagccaagagtggcctagacgaactggtgagtgacctgctccaggaggcccacactgacctggaaagggtccgcgccatctggatctggatctgccatcacatagagtatgacattgcagctgctcaggagaaggaccgccaagccttcaaacccactgacatcctgcggacccagaagaccaactgtgatggctatgctggcctcttcgagagaatgtgcaggctcgccggagtgcagtgtatgaccgtgcctggctactccaagggtttcggctaccagacagggcagagcttctcgggggagtttgaccatgcctggaatgctgtgtacctggagggaagatggcacctggtggacagcacctggggcagcggcctggtggacaccatcacctccaaattcaccttcctctacaatgagttctacttcctcacccaccctgcactgttcatcgaggaccacttcccagacaacaagaactggcagctgctaaaacctcctcaatctctgaggcagtttgagaacaacatgtatcacaagagtgaattctacaacaaagggatgctgagtgcccacccagagacttccatgatcagaacagtgaatgggaaggccacggtcaccattgagagctgcgccccgacgctgttcatgttcatgctcaatggcaagcaagagcatgggctgctgagcctaaggaagaatgggatgaagttggaggtgtaccctccaaccatgggcactcacaagctgcagatctttgccaagggcaactccgacatctacagctcagtgctggagtacacgctcaagtgcaattatgtggacatgggtgtccagctgcctgctgagcttcaccagcccgtgggccccagctggttctcggagcagatgggcatcatgaagccctcccaccctgaccctatcatccacaccagcgacgggcgctgctccatcagcttcagcgtggaggagggcattaatgtcctggcttccctccacggggatgatggccccatcactgaggagacacagcggcgctacatcttccagctgcaccgggagaagcagaccgagctgaaagtccagctgccccatgcaggcaagtttgccctcaagatctttgtcaagaagaggcaggaaccaggaaactacatcttcgtctttaattaccttgtatgctgtgccaacaccaaggtgaactggcccatgttccctgagagctttggcaactggggacaggacaatgagctgctggaacctctgtcaggtgtgcttcctgccaaccggaatgtcccattcaaattgaagctgcatggtattgccaaagtcctggtgaaggggcaggacacatggcccctgaccctgaaccacgagggctactgggagggaagctgcagcacagctggctgccaggaagtctatgtcatggtgctggagaatgccaaccacaatttctactcctacatcctgaaatacaaagtgaatgcccagtgagggctgtgccccggtcttaccctcccaaagggccaaggccagacctccccagggagggctcgaaggaagtgcagggagccctggacaccactgagtctgcatgaaatcccttctaggcctctgcctcagtgtcccacctctgccacaggagctgtgatctttgtgttctgaaggcttcactcaggtgtggctgtgactgagggggcagaggcagtggctctttagaaggaaaaggtgctatgtaaatctaaggtattgtaaactgtacacctgcatccagatgccccttctcgtattagtgctgctgctgttgttgttgctgtagggttgatgagggaaagcagggatattgcccaggttgacagcttttcacatgatgcttagagaattctcttccatgcccaaggggacatgatttgcaaggctgggttgtccttgaat

SEQ ID NO: 147151 - DNA, 2003 bp, Homo sapiens
  Payload ID: 9108
  Gene Symbol: KY
  Gene Name: kyphoscoliosis peptidase
  ENST ID: ENST00000503669
  CDS Start-End: 62-988
tttgcagcgcaagcagcctagcgtgcggccgcggcgcccaggtcggaaaggaggcggcatcatggagctgaagaaggacatcaacgctgtatctatcgacatgctgctgatcgtgcactcggagaagcggcgcgccgcacagggtacgctctcagaccagcaggcgaacccgagctcgctgctgcagcgcggaggaggattccaaggtgttggaaatggagtccgaagatggcagaaattagaaggaaatgactttcacgaaaacttggtggagaagcagcaccctcagcagccccaggtcatcacttcctacaacagccaagggacacaactgactgtggaagtccaccctcgagatgccatgccccagctgctcaagaagttctccttggctaaacgtttacaaggtgataaaaatggaaacacaagaccccggcaacctggagggaaagatgcccatgcctacccctgggatcgatctagcctgaaatccatgtccctggacctgcagcagtttgagaaattggatatctacgcctcacaggtgacagccaagagtggcctagacgaactggtgagtgacctgctccaggaggcccacactgacctggaaagggtccgcgccatctggatctggatctgccatcacatagagtatgacattgcagctgctcaggagaaggaccgccaagccttcaaacccactgacatcctgcggacccagaagaccaactgtgatggctatgctggcctcttcgagagaatgtgcaggctcgccggagtgcagtgtatgaccgtgcctggctactccaagggtttcggctaccagacagggcagagcttctcgggggagtttgaccatgcctggaatgctgtgtacctggagggaagatggcacctggtggacagcacctggggcagcggcctggtggacaccatcacctccaaattcaccttccttgaatgggaaggccacggtcaccattgagagctgcgccccgacgctgttcatgttcatgctcaatggcaagcaagagcatgggctgctgagcctaaggaagaatgggatgaagttggaggtgtaccctccaaccatgggcactcacaagctgcagatctttgccaagggcaactccgacatctacagctcagtgctggagtacacgctcaagtgcaattatgtggacatgggtgtccagctgcctgctgagcttcaccagcccgtgggccccagctggttctcggagcagatgggcatcatgaagccctcccaccctgaccctatcatccacaccagcgacgggcgctgctccatcagcttcagcgtggaggagggcattaatgtcctggcttccctccacggggatgatggccccatcactgaggagacacagcggcgctacatcttccagctgcaccgggagaagcagaccgagctgaaagtccagctgccccatgcaggcaagtttgccctcaagatctttgtcaagaagaggcaggaaccaggaaactacatcttcgtctttaattaccttgtatgctgtgccaacaccaaggtgaactggcccatgttccctgagagctttggcaactggggacaggacaatgagctgctggaacctctgtcaggtgtgcttcctgccaaccggaatgtcccattcaaattgaagctgcatggtattgccaaagtcctggtgaaggggcaggacacatggcccctgaccctgaaccacgagggctactgggagggaagctgcagcacagctggctgccaggaagtctatgtcatggtgctggagaatgccaaccacaatttctactcctacatcctgaaatacaaagtgaatgcccagtgagggctgtgccccggtcttaccctcccaaagggccaaggccagacctccccagggagggctcgaaggaagtgcagggagccctggacaccactgagtctgcatgaaatcccttctaggcctctgcctcagtgtcccacctctgccaca

SEQ ID NO: 147152 - DNA, 949 bp, Homo sapiens
  Payload ID: 9109
  Gene Symbol: LAGE3
  Gene Name: L antigen family, member 3
  Uniprot ID: Q14657
  ENST ID: ENST00000357360
  CDS Start-End: 343-774
ggcgaccacggtgtcttcaaaagccccgtcagggttggcttcctggggccggaccgactgtgggtcagtttgcaccagcgctctggaatcgagttacgcgcgaaagggcagagtttctggaggaaaccgcagcctctcaaccgctgaccgggtctcagaaggcccccggcagggccgcttggcgggaactgaccacgcgccagtcaggctctccagggacctgcgcaggcgcgtgtgggcggagtcgtgcgcagggggcggggcttcgggaaggagccacagagagggcggggcgtaggacctgcgcttcgggggtggagtcggagcggcgcggcggcggtcatgcgggacgcggatgcagacgcaggcggaggcgctgacggcggggatggccggggtggccacagctgccgcgggggcgtggacacagccgcagctccggccggtggagctcccccagcgcacgcgccaggtccgggcagagacgccgcgtctgcggccagggggtcacgaatgcggccgcacatattcaccctcagcgtgcctttcccgacccccttggaggcggaaatcgcccatgggtccctggcaccagatgccgagccccaccaaagggtggttgggaaggatctcacagtgagtggcaggatcctggtcgtccgctggaaagctgaagactgtcgcctgctccgaatttccgtcatcaactttcttgaccagctttccctggtggtgcggaccatgcagcgctttgggccccccgtttcccgctaagcctggcctgggcaaatggagcgaggtcccactttgcgtctccttgtaggcagtgcgtccatccttccctagggcaggaattcccacagttgctactttcctgggagggcctcatgttttatctggttcttaaatgtttgttactacagaaaataaaactgcgctactattccaa

SEQ ID NO: 147153 - DNA, 599 bp, Homo sapiens
  Payload ID: 9109
  Gene Symbol: LAGE3
  Gene Name: L antigen family, member 3
  ENST ID: ENST00000621786
  CDS Start-End: 11-328
cgggacgcggatgcagacgcaggcggaggcgctgacggcggggatggccggggtggccacagctgccgcgggggcgtggacacagccgcagctccggccggtggagctcccccagcgcacgcgccaggtccgggcagagacgccgcgtctgcggcagggggtcacgaatgcggccgcacatattcaccctcagcgtgcctttcccgacccccttggaggcggaaatcgcccatgggtccctggcaccagatgccgagccccaccaaagggtggttgggaaggatctcacagtgagtggcaggatcctggtcgtccgctggaaagctgaagactgtcgcctgctccgaatttccgtcatcaactttcttgaccagctttccctggtggtgcggaccatgcagcgctttgggccccccgtttcccgctaagcctggcctgggcaaatggagcgaggtcccactttgcgtctccttgtaggcagtgcgtccatccttccctagggcaggaattcccacagttgctactttcctgggagggcctcatgttttatctggttcttaaatgtttgttactacagaaaataaaactgcgctactatt

SEQ ID NO: 147154 - DNA, 2532 bp, Homo sapiens
  Payload ID: 9110
  Gene Symbol: L3MBTL1
  Gene Name: l(3)mbt-like 1 (Drosophila)
  ENST ID: ENST00000373134
  CDS Start-End: 20-2251
gctgagggcgtgagctggcatgaggcgaagagagggccatggcaccgactccgagatgggtcaaggacccgtacgggagtcgcaatcctcagaccctcccgcgctccagttccggataagcgagtataagccgctgaacatggcgggagtggagcagcccccgagccccgagctgcggcaggaaggcgtgaccgaatacgaagatggcggggccccggcgggagatggcgaggcgggcccccaacaggcggaggaccacccccagaatcctccagaagatcccaatcaggaccccccagaggatgatagcacctgtcagtgccaggcgtgcgggcctcaccaagccgcgggtccagatcttggttcctctaatgatggctgccctcagctgttccaggagcggtcagtcatagtggagaactcctcaggctctaccagcgcttctgagctcctcaaacccatgaagaagaggaagcgcagggaataccagagcccatcagaggaggagtcggagccagaggccatggagaagcaagaagaaggaaaggacccagagggacaacccactgctagcaccccagagagtgaggagtggagcagcagccagcctgcaacaggtgagaagaaggaatgctggtcgtgggagtcctacctagaggagcagaaggccattactgctccagtcagcctcttccaggactcccaggcagtcactcacaacaagaatggcttcaaactgggcatgaagttggaaggcattgaccctcaacacccgtccatgtacttcatcctcaccgtggctgaggtatgtggctatcgcctacgcctgcactttgatgggtattctgagtgccatgacttctgggtcaatgccaactcccctgacattcaccctgctggctggttcgagaagacgggccacaagctgcagcctcccaaaggttacaaggaggaggagttcagctggagccagtacctgcgcagcacaagagctcaggctgcccccaagcacctgtttgtgagccagagccacagtcccccacccctgggcttccaggtgggcatgaagctggaggctgttgaccgcatgaacccgtcccttgtctgcgtggccagtgtgaccgatgtggtggacagccgcttcctggtgcactttgacaactgggatgatacttatgactactggtgtgatcccagcagcccctacatccacccagtgggctggtgccagaagcaaggaaagcccctcacccctccacaagactacccagaccctgataacttctgttgggagaaatatctggaagaaactggggcctctgctgtccccacctgggccttcaaggtgcgaccccctcacagcttcctggtcaatatgaagctggaggctgtggaccgcaggaacccagccctgattcgcgtggccagcgtggaggatgtggaggaccatcggataaagatccactttgatggctggagtcatggctatgatttctggatcgacgctgaccacccagacatccaccctgccggctggtgctccaagacaggacatcccctgcagcctcctctcggacccagagagcccagctctgcctcccctgggggctgtccccctctcagctataggagcctgccccacactaggacctccaaatacagctttcaccaccgtctcttcttccccaggaagtgccccactcctggttgcgacggctctggccatgtcacaggcaagttcacagctcaccattgcctctcaggctgcccactggctgagaggaaccagagccggctgaaagcggagctgtctgactcggaggcctcagcccgcaagaagaacctctcaggcttctccccaaggaagaagcctcgccatcacggccgaattggacgccctccgaagtatcgaaagattccgcaggaagatttccagaccctcacgcccgatgtcgtgcaccagtccctcttcatgtcagccctgtcggcccaccctgaccgctcactctcagtgtgctgggagcagcactgcaagctcctgccaggagtagcgggcatctcagcctcgacagtcgccaagtggaccatcgatgaggtcttcggctttgttcagaccctgacaggttgtgaggaccaagcacgcctcttcaaagacgaggtaaggtgcaagtgcagagtgggagacagagccggggtcactgtccttaagacggcaggaagcaggtgccctccccagcgtcacttctgctaaggagggacccgtgttgccccaccaggcaagaatagtcagagtgacccatgtatctgggaagactctagtctggactgtggcccagcttggggaccttgtgtgctcagatcatcttcaggaaggaaaaggcatcctggagacaggagtccattcactcctctgctctctacccactcatttgcttgccaaacttagctttgccagtgatagtcaatattaaagtgtacttttttcccctttaatccaatatagttgataattaaagtgtattttgaatgaca

SEQ ID NO: 147155 - DNA, 3218 bp, Homo sapiens
  Payload ID: 9110
  Gene Symbol: L3MBTL1
  Gene Name: l(3)mbt-like 1 (Drosophila)
  Uniprot ID: Q9Y468
  ENST ID: ENST00000373135
  CDS Start-End: 133-2451
agagtggggcaccctgggactggaccccgcaggtgcttgggggcgtagcctggagtgagggtttggctggtgtagcttggagtgaggccccctggcgtggagtcttgaggcctgctgagggcgtgagctggcatgaggcgaagagagggccatggcaccgactccgagatgggtcaaggacccgtacgggagtcgcaatcctcagaccctcccgcgctccagttccggataagcgagtataagccgctgaacatggcgggagtggagcagcccccgagccccgagctgcggcaggaaggcgtgaccgaatacgaagatggcggggccccggcgggagatggcgaggcgggcccccaacaggcggaggaccacccccagaatcctccagaagatcccaatcaggaccccccagaggatgatagcacctgtcagtgccaggcgtgcgggcctcaccaagccgcgggtccagatcttggttcctctaatgatggctgccctcagctgttccaggagcggtcagtcatagtggagaactcctcaggctctaccagcgcttctgagctcctcaaacccatgaagaagaggaagcgcagggaataccagagcccatcagaggaggagtcggagccagaggccatggagaagcaagaagaaggaaaggacccagagggacaacccactgctagcaccccagagagtgaggagtggagcagcagccagcctgcaacaggtgagaagaaggaatgctggtcgtgggagtcctacctagaggagcagaaggccattactgctccagtcagcctcttccaggactcccaggcagtcactcacaacaagaatggcttcaaactgggcatgaagttggaaggcattgaccctcaacacccgtccatgtacttcatcctcaccgtggctgaggtatgtggctatcgcctacgcctgcactttgatgggtattctgagtgccatgacttctgggtcaatgccaactcccctgacattcaccctgctggctggttcgagaagacgggccacaagctgcagcctcccaaaggttacaaggaggaggagttcagctggagccagtacctgcgcagcacaagagctcaggctgcccccaagcacctgtttgtgagccagagccacagtcccccacccctgggcttccaggtgggcatgaagctggaggctgttgaccgcatgaacccgtcccttgtctgcgtggccagtgtgaccgatgtggtggacagccgcttcctggtgcactttgacaactgggatgatacttatgactactggtgtgatcccagcagcccctacatccacccagtgggctggtgccagaagcaaggaaagcccctcacccctccacaagactacccagaccctgataacttctgttgggagaaatatctggaagaaactggggcctctgctgtccccacctgggccttcaaggtgcgaccccctcacagcttcctggtcaatatgaagctggaggctgtggaccgcaggaacccagccctgattcgcgtggccagcgtggaggatgtggaggaccatcggataaagatccactttgatggctggagtcatggctatgatttctggatcgacgctgaccacccagacatccaccctgccggctggtgctccaagacaggacatcccctgcagcctcctctcggacccagagagcccagctctgcctcccctgggggctgtccccctctcagctataggagcctgccccacactaggacctccaaatacagctttcaccaccggaagtgccccactcctggttgcgacggctctggccatgtcacaggcaagttcacagctcaccattgcctctcaggctgcccactggctgagaggaaccagagccggctgaaagcggagctgtctgactcggaggcctcagcccgcaagaagaacctctcaggcttctccccaaggaagaagcctcgccatcacggccgaattggacgccctccgaagtatcgaaagattccgcaggaagatttccagaccctcacgcccgatgtcgtgcaccagtccctcttcatgtcagccctgtcggcccaccctgaccgctcactctcagtgtgctgggagcagcactgcaagctcctgccaggagtagcgggcatctcagcctcgacagtcgccaagtggaccatcgatgaggtcttcggctttgttcagaccctgacaggttgtgaggaccaagcacgcctcttcaaagacgaggcaagaatagtcagagtgacccatgtatctgggaagactctagtctggactgtggcccagcttggggaccttgtgtgctcagatcatcttcaggaaggaaaaggcatcctggagacaggagtccattcactcctctgctctctacccactcatttgcttgccaaacttagctttgccagtgatagtcaatattaaagtgtacttttttcccctttaatccaatatagttgataattaaagtgtattttgaatgacacagatattgtgatttactgcaaggatcctaacacacacttaaaatcaagagccaaggagtagtgagttgtagataaaaaaagaatgtcagctttggagacagtctgggtttaaatcccagttctgtcaatttgagctgtttactgtctctgagcctacatcttcttgtctgtaaaatggagataaaatgggtttaatgaggtctaccttgcagagccattgtgagcattggaaatgatgaatgaatcataccagaacgtctagtataattacagtcatgcattgcttaacgatggggatacattcttagaaatgtgtcactaggcaattctgtcattgtgtaaacattatagaatgtacttacacaaacctagatgttatatgtatttttatttacatgtatattttcacatgaaataccaaatgtcacagcattattactgaatgtcagtcatttcccctacttgatctgcaatgccaatatcaagggccatgtatcaggtttctgtatatgttccactataatcttatgggaccatggttttaaatgtggaatcattgacagaaatgtctttatgtagcatatggctgtgtatcactagtatataatagagcaatattatggaggaatatgtagatccaatcactttacctatacaaaatgactgctatggtgggaacacaataaacaccagttttgactttta

SEQ ID NO: 147156 - DNA, 460 bp, Homo sapiens
  Payload ID: 9110
  Gene Symbol: L3MBTL1
  Gene Name: l(3)mbt-like 1 (Drosophila)
  ENST ID: ENST00000439769
  CDS Start-End: 47-460
gctaggcgctgggcggccaccggctggccaggcaggggaggtcagcatgcacttggtggccggagacagccccggttctggtcctcacctgcccgcaactgccttcatcattccagccagttcggccaccctcggcctgcccagcagtgccctggatgtgtcttgctttccccgggagccaatccatgtgggtgccccggagcaagtggccggctgcgaaccagtttctgccaccgtcctgccgcagcttagcgccgggccggccagctccagcaccagcacagtgcggcttctggaatggacagaggccgcggccccgcccccagggggcggcctgcggttccggataagcgagtataagccgctgaacatggcgggagtggagcagcccccgagccccgagctgcggcaggaaggcgtgaccgaatacgaagatggcggggccccggcgggagatggc

SEQ ID NO: 147157 - DNA, 3365 bp, Homo sapiens
  Payload ID: 9110
  Gene Symbol: L3MBTL1
  Gene Name: l(3)mbt-like 1 (Drosophila)
  Uniprot ID: Q9Y468
  ENST ID: ENST00000418998
  CDS Start-End: 77-2599
gcaggcgcgcggcgcccggctcggaccgtagctaggcgctgggcggccaccggctggccaggcaggggaggtcagcatgcacttggtggccggagacagccccggttctggtcctcacctgcccgcaactgccttcatcattccagccagttcggccaccctcggcctgcccagcagtgccctggatgtgtcttgctttccccgggagccaatccatgtgggtgccccggagcaagtggccggctgcgaaccagtttctgccaccgtcctgccgcagcttagcgccgggccggccagctccagcaccagcacagtgcggcttctggaatggacagaggccgcggccccgcccccagggggcggcctgcggttccggataagcgagtataagccgctgaacatggcgggagtggagcagcccccgagccccgagctgcggcaggaaggcgtgaccgaatacgaagatggcggggccccggcgggagatggcgaggcgggcccccaacaggcggaggaccacccccagaatcctccagaagatcccaatcaggaccccccagaggatgatagcacctgtcagtgccaggcgtgcgggcctcaccaagccgcgggtccagatcttggttcctctaatgatggctgccctcagctgttccaggagcggtcagtcatagtggagaactcctcaggctctaccagcgcttctgagctcctcaaacccatgaagaagaggaagcgcagggaataccagagcccatcagaggaggagtcggagccagaggccatggagaagcaagaagaaggaaaggacccagagggacaacccactgctagcaccccagagagtgaggagtggagcagcagccagcctgcaacaggtgagaagaaggaatgctggtcgtgggagtcctacctagaggagcagaaggccattactgctccagtcagcctcttccaggactcccaggcagtcactcacaacaagaatggcttcaaactgggcatgaagttggaaggcattgaccctcaacacccgtccatgtacttcatcctcaccgtggctgaggtatgtggctatcgcctacgcctgcactttgatgggtattctgagtgccatgacttctgggtcaatgccaactcccctgacattcaccctgctggctggttcgagaagacgggccacaagctgcagcctcccaaaggttacaaggaggaggagttcagctggagccagtacctgcgcagcacaagagctcaggctgcccccaagcacctgtttgtgagccagagccacagtcccccacccctgggcttccaggtgggcatgaagctggaggctgttgaccgcatgaacccgtcccttgtctgcgtggccagtgtgaccgatgtggtggacagccgcttcctggtgcactttgacaactgggatgatacttatgactactggtgtgatcccagcagcccctacatccacccagtgggctggtgccagaagcaaggaaagcccctcacccctccacaagactacccagaccctgataacttctgttgggagaaatatctggaagaaactggggcctctgctgtccccacctgggccttcaaggtgcgaccccctcacagcttcctggtcaatatgaagctggaggctgtggaccgcaggaacccagccctgattcgcgtggccagcgtggaggatgtggaggaccatcggataaagatccactttgatggctggagtcatggctatgatttctggatcgacgctgaccacccagacatccaccctgccggctggtgctccaagacaggacatcccctgcagcctcctctcggacccagagagcccagctctgcctcccctgggggctgtccccctctcagctataggagcctgccccacactaggacctccaaatacagctttcaccaccggaagtgccccactcctggttgcgacggctctggccatgtcacaggcaagttcacagctcaccattgcctctcaggctgcccactggctgagaggaaccagagccggctgaaagcggagctgtctgactcggaggcctcagcccgcaagaagaacctctcaggcttctccccaaggaagaagcctcgccatcacggccgaattggacgccctccgaagtatcgaaagattccgcaggaagatttccagaccctcacgcccgatgtcgtgcaccagtccctcttcatgtcagccctgtcggcccaccctgaccgctcactctcagtgtgctgggagcagcactgcaagctcctgccaggagtagcgggcatctcagcctcgacagtcgccaagtggaccatcgatgaggtcttcggctttgttcagaccctgacaggttgtgaggaccaagcacgcctcttcaaagacgaggcaagaatagtcagagtgacccatgtatctgggaagactctagtctggactgtggcccagcttggggaccttgtgtgctcagatcatcttcaggaaggaaaaggcatcctggagacaggagtccattcactcctctgctctctacccactcatttgcttgccaaacttagctttgccagtgatagtcaatattaaagtgtacttttttcccctttaatccaatatagttgataattaaagtgtattttgaatgacacagatattgtgatttactgcaaggatcctaacacacacttaaaatcaagagccaaggagtagtgagttgtagataaaaaaagaatgtcagctttggagacagtctgggtttaaatcccagttctgtcaatttgagctgtttactgtctctgagcctacatcttcttgtctgtaaaatggagataaaatgggtttaatgaggtctaccttgcagagccattgtgagcattggaaatgatgaatgaatcataccagaacgtctagtataattacagtcatgcattgcttaacgatggggatacattcttagaaatgtgtcactaggcaattctgtcattgtgtaaacattatagaatgtacttacacaaacctagatgttatatgtatttttatttacatgtatattttcacatgaaataccaaatgtcacagcattattactgaatgtcagtcatttcccctacttgatctgcaatgccaatatcaagggccatgtatcaggtttctgtatatgttccactataatcttatgggaccatggttttaaatgtggaatcattgacagaaatgtctttatgtagcatatggctgtgtatcactagtatataatagagcaatattatggaggaatatgtagatccaatcactttacctatacaaaatgactgctatggtgggaacacaataaacaccagttttgactttt

SEQ ID NO: 147158 - DNA, 3157 bp, Homo sapiens
  Payload ID: 9110
  Gene Symbol: L3MBTL1
  Gene Name: l(3)mbt-like 1 (Drosophila)
  Uniprot ID: Q9Y468
  ENST ID: ENST00000427442
  CDS Start-End: 160-2682
gcaggcgcgcggcgcccggctcggaccgtagctaggcgctgggcggccaccggctggccaggcaggcctgccaggatggaggggcatgctgggatggaggggcatgctgaaatggagatgctgaggacactgaaggggccttccacaggggaggtcagcatgcacttggtggccggagacagccccggttctggtcctcacctgcccgcaactgccttcatcattccagccagttcggccaccctcggcctgcccagcagtgccctggatgtgtcttgctttccccgggagccaatccatgtgggtgccccggagcaagtggccggctgcgaaccagtttctgccaccgtcctgccgcagcttagcgccgggccggccagctccagcaccagcacagtgcggcttctggaatggacagaggccgcggccccgcccccagggggcggcctgcggttccggataagcgagtataagccgctgaacatggcgggagtggagcagcccccgagccccgagctgcggcaggaaggcgtgaccgaatacgaagatggcggggccccggcgggagatggcgaggcgggcccccaacaggcggaggaccacccccagaatcctccagaagatcccaatcaggaccccccagaggatgatagcacctgtcagtgccaggcgtgcgggcctcaccaagccgcgggtccagatcttggttcctctaatgatggctgccctcagctgttccaggagcggtcagtcatagtggagaactcctcaggctctaccagcgcttctgagctcctcaaacccatgaagaagaggaagcgcagggaataccagagcccatcagaggaggagtcggagccagaggccatggagaagcaagaagaaggaaaggacccagagggacaacccactgctagcaccccagagagtgaggagtggagcagcagccagcctgcaacaggtgagaagaaggaatgctggtcgtgggagtcctacctagaggagcagaaggccattactgctccagtcagcctcttccaggactcccaggcagtcactcacaacaagaatggcttcaaactgggcatgaagttggaaggcattgaccctcaacacccgtccatgtacttcatcctcaccgtggctgaggtatgtggctatcgcctacgcctgcactttgatgggtattctgagtgccatgacttctgggtcaatgccaactcccctgacattcaccctgctggctggttcgagaagacgggccacaagctgcagcctcccaaaggttacaaggaggaggagttcagctggagccagtacctgcgcagcacaagagctcaggctgcccccaagcacctgtttgtgagccagagccacagtcccccacccctgggcttccaggtgggcatgaagctggaggctgttgaccgcatgaacccgtcccttgtctgcgtggccagtgtgaccgatgtggtggacagccgcttcctggtgcactttgacaactgggatgatacttatgactactggtgtgatcccagcagcccctacatccacccagtgggctggtgccagaagcaaggaaagcccctcacccctccacaagactacccagaccctgataacttctgttgggagaaatatctggaagaaactggggcctctgctgtccccacctgggccttcaaggtgcgaccccctcacagcttcctggtcaatatgaagctggaggctgtggaccgcaggaacccagccctgattcgcgtggccagcgtggaggatgtggaggaccatcggataaagatccactttgatggctggagtcatggctatgatttctggatcgacgctgaccacccagacatccaccctgccggctggtgctccaagacaggacatcccctgcagcctcctctcggacccagagagcccagctctgcctcccctgggggctgtccccctctcagctataggagcctgccccacactaggacctccaaatacagctttcaccaccggaagtgccccactcctggttgcgacggctctggccatgtcacaggcaagttcacagctcaccattgcctctcaggctgcccactggctgagaggaaccagagccggctgaaagcggagctgtctgactcggaggcctcagcccgcaagaagaacctctcaggcttctccccaaggaagaagcctcgccatcacggccgaattggacgccctccgaagtatcgaaagattccgcaggaagatttccagaccctcacgcccgatgtcgtgcaccagtccctcttcatgtcagccctgtcggcccaccctgaccgctcactctcagtgtgctgggagcagcactgcaagctcctgccaggagtagcgggcatctcagcctcgacagtcgccaagtggaccatcgatgaggtcttcggctttgttcagaccctgacaggttgtgaggaccaagcacgcctcttcaaagacgaggcaagaatagtcagagtgacccatgtatctgggaagactctagtctggactgtggcccagcttggggaccttgtgtgctcagatcatcttcaggaaggaaaaggcatcctggagacaggagtccattcactcctctgctctctacccactcatttgcttgccaaacttagctttgccagtgatagtcaatattaaagtgtacttttttcccctttaatccaatatagttgataattaaagtgtattttgaatgacacagatattgtgatttactgcaaggatcctaacacacacttaaaatcaagagccaaggagtagtgagttgtagataaaaaaagaatgtcagctttggagacagtctgggtttaaatcccagttctgtcaatttgagctgtttactgtctctgagcctacatcttcttgtctgtaaaatggagataaaatgggtttaatgaggtctaccttgcagagccattgtgagcattggaaatgatgaatgaatcataccagaacgtctagtataattacagtcatgcattgcttaacgatggggatacattcttagaaatgtgtcactaggcaattctgtcattgtgtaaacattatagaatgtacttacacaaacctagatgttatatgtatttttatttacatgtatattttcacatga

SEQ ID NO: 147159 - DNA, 4322 bp, Homo sapiens
  Payload ID: 9110
  Gene Symbol: L3MBTL1
  Gene Name: l(3)mbt-like 1 (Drosophila)
  ENST ID: ENST00000422861
  CDS Start-End: 1-1617
cagaaggccattactgctccagtcagcctcttccaggactcccaggcagtcactcacaacaagaatggcttcaaactgggcatgaagttggaaggcattgaccctcaacacccgtccatgtacttcatcctcaccgtggctgaggtatgtggctatcgcctacgcctgcactttgatgggtattctgagtgccatgacttctgggtcaatgccaactcccctgacattcaccctgctggctggttcgagaagacgggccacaagctgcagcctcccaaaggttacaaggaggaggagttcagctggagccagtacctgcgcagcacaagagctcaggctgcccccaagcacctgtttgtgagccagagccacagtcccccacccctgggcttccaggtgggcatgaagctggaggctgttgaccgcatgaacccgtcccttgtctgcgtggccagtgtgaccgatgtggtggacagccgcttcctggtgcactttgacaactgggatgatacttatgactactggtgtgatcccagcagcccctacatccacccagtgggctggtgccagaagcaaggaaagcccctcacccctccacaagactacccagaccctgataacttctgttgggagaaatatctggaagaaactggggcctctgctgtccccacctgggccttcaaggtgcgaccccctcacagcttcctggtcaatatgaagctggaggctgtggaccgcaggaacccagccctgattcgcgtggccagcgtggaggatgtggaggaccatcggataaagatccactttgatggctggagtcatggctatgatttctggatcgacgctgaccacccagacatccaccctgccggctggtgctccaagacaggacatcccctgcagcctcctctcggacccagagagcccagctctgcctcccctgggggctgtccccctctcagctataggagcctgccccacactaggacctccaaatacagctttcaccaccggaagtgccccactcctggttgcgacggctctggccatgtcacaggcaagttcacagctcaccattgcctctcaggctgcccactggctgagaggaaccagagccggctgaaagcggagctgtctgactcggaggcctcagcccgcaagaagaacctctcaggcttctccccaaggaagaagcctcgccatcacggccgaattggacgccctccgaagtatcgaaagattccgcaggaagatttccagaccctcacgcccgatgtcgtgcaccagtccctcttcatgtcagccctgtcggcccaccctgaccgctcactctcagtgtgctgggagcagcactgcaagctcctgccaggagtagcgggcatctcagcctcgacagtcgccaagtggaccatcgatgaggtcttcggctttgttcagaccctgacaggttgtgaggaccaagcacgcctcttcaaagacgagatgattgacggcgaggccttccttttgctgacacaggcggacattgtgaagatcatgagcgtcaagctgggcccagccttgaagatctataacgccattctcatgttcaaaaacgctgatgacaccttaaagtgactggcccagggctgggccctcctgcagcccctgcttggcctccctctccagctgatgctttcttcctgacctgaattcctcataccccacacgtccccatgctccacctatatctgaccaggctggtccttcttagagggtgcatgggagctgaggagccctggggagggtaggcacccagccccaagtcctagagctcattcgtcaccaggcatgttggtgagggcgtgactggcaggggcattactcatggagtcagttggactgtggcagcccccacagccccagtggacttttattgtattaccaaagggtctttttcttggcagtggaggagagactagtagagcagcagtccttcaatctgaggcccctttcccttttttggtatctctgtgtacttttctctccttggctcctttcctcctgccaagaagtgaccccaccacaaatgtatttactcctggaggtacctcctctctttctgtctgctggttttgctgccctcattctgctgcttcgtttcctgggcagtgcccccagccagaccccactggctcttccccctgagatatgtgaacctcggaaacatgttttcctaagatcccttggaagtctctagctgcctttctctcttttgcccagaattgagagattttgagccaagatgccttcctgaacttacccagttctggaccagttggcattttagtgtcccacgccaagtccaagtttcagcagaatgagcaggtggtttgagcctgttttatagatggcagaggttgaggttccactgctgttttccatacacccttcatgtgttgagtctgggaaggagtaagcctagcctgccagtagcctaggttaggagaccagcataaggatttgttagacaatctcgggtctttggccagaggggcagctccagcaggcatagtggtgcctgaagttaggaatactgtactctctgtagctttggacctcagccaaggtattgcccatggggtgatggctccaggcctgccaggccttctgccatgagaatgtagcactctgtgtagcacacacccccatgacatcatttaacctgtcccttaaatgttgaccattagctcttgcagcgtcttacaaagacgacttgaagttgggagttaggaaggtgaacttttctatctgaattctccgggtccctgaagccctccttgccgctctccatctgtcttgcactgccagctgggtccctgctggggctctgggacttccacttctcagtccacataggaacccagcttccactgagtcactgccaaacctgcctcccagcctgggtgggaagggggagagccactggtaggagccagccccacatggaggtgaggagccactgccaacctcccgtgtccaggtgctgatgtgggcctgcggagtgtggggctggtgccttcacccagaccccttcaatcatgtgatgtgtgtgtgtgtgcatgtgtgtgtgtgtgtgtgtgtgtggcactctcagaagtgtttgacagggtgcagatgtgaggcttagtgttgggaaaatgccaagggctattatcattaaaatttgaagctttatttttcccttagaagtgggaaacccagagctctgttgatttcctaccacaacccagtaggggcctctctctgccatgggctggacagctttttgaggaagccattcagctcccacagttgagctcccacagggctttaggtgtccattccctctcaactgcttagaggcagctttgagcacagccttcctggaaggaagctaggcaagacctgccacacagcgaaggttgggtttacaagggtgacattggtacccccttggccaagagtaaagaagaacaagtctaagccttgcttttatcttagttgtctgggtggtagcagaactcatcagctccttatcctcagtctgttcctctataaaagatgagagatgttcactgactttgtgcagtgagaaggcagcaagtactcacggctggtgctgtgggacctcacagcttctaaggagaggggctgggagggcctttgccatcagatctgccaagcacctaatgcttgcctgtggtgaaggcaagatggaccaagggccttggagaaaagggctcccaggcttctgaactttgaggcctcagcactttctgcattatcgtcaaactctttggaaagaaaccaaatcattaaaaagtagaaagaaatctgcctcttgtctgccctactgcccctttacccccactctgtccccaaatgatattattgcaccttgacctgggagcgcagagaggggagggagttggcagagacttctggtgccctctgccctcctagcaacagatgccacttatattttggcccctggcagcctcgcccagcccctgatcagcccaggcctagggcagttaggacctttctgtttattttctgaagcagagagaatgatctcagagtttgcaaatgaagccttttttgcactttcattcacatgcactttggtggggttacatttttgtacttgcctcttgtgtgtgcacatgtgtgtatgtgttctttaagagaatcttctggcttaagctaaggtgactcttgaaggagaaaaagttacaaacaaaatgtggtgtgatctgtcagtgtatcaaaacaacataaataaacttgaacaactgata

SEQ ID NO: 147160 - DNA, 865 bp, Homo sapiens
  Payload ID: 9110
  Gene Symbol: L3MBTL1
  Gene Name: l(3)mbt-like 1 (Drosophila)
  ENST ID: ENST00000445228
  CDS Start-End: 1-136
tgacttctgggtcaatgccaactcccctgacattcaccctgctggctggttcgagaagacgggccacaagctgcagcctcccaaagagtcccccacccctgggcttccaggtgggcatgaagctggaggctgttgaccgcatgaacccgtcccttgtctgcgtggccagtgtgaccgatgtggtggacagccgcttcctggtgcactttgacaactgggatgatacttatgactactggtgtgatcccagcagcccctacatccacccagtgggctggtgccagaagcaaggaaagcccctcacccctccacaagactacccagaccctgataacttctgttgggagaaatatctggaagaaactggggcctctgctgtccccacctgggccttcaaggtgcgaccccctcacagcttcctggtcaatatgaagctggaggctgtggaccgcaggaacccagccctgattcgcgtggccagcgtggaggatgtggaggaccatcggataaagatccactttgatggctggagtcatggctatgatttctggatcgacgctgaccacccagacatccaccctgccggctggtgctccaagacaggacatcccctgcagcctcctctcggacccagagagcccagctctgcctcccctgggggctgtccccctctcagctataggagcctgccccacactaggacctccaaatacagctttcaccaccggaagtgccccactcctggttgcgacggctctggccatgtcacaggcaagttcacagctcaccattgcctctcaggctgcccactggctgagaggaaccagagccggctgaaagcggagctgtctgactcggaggcctc

SEQ ID NO: 147161 - DNA, 573 bp, Homo sapiens
  Payload ID: 9110
  Gene Symbol: L3MBTL1
  Gene Name: l(3)mbt-like 1 (Drosophila)
  ENST ID: ENST00000434666
  CDS Start-End: 320-573
gcaggcgcgcggcgcccggctcggaccgtagctaggcgctgggcggccaccggctggccaggcagccagttcggccaccctcggcctgcccagcagtgccctggatgtgtcttgctttccccgggagccaatccatgtgggtgccccggagcaagtggccggctgcgaaccagtttctgccaccgtcctgccgcagcttagcgccgggccggccagctccagcaccagcacagtgcggcttctggaatggacagaggccgcggccccgcccccagggggcggcctgcggttccggataagcgagtataagccgctgaacatggcgggagtggagcagcccccgagccccgagctgcggcaggaaggcgtgaccgaatacgaagatggcggggccccggcgggagatggcgaggcgggcccccaacaggcggaggaccacccccagaatcctccagaagatcccaatcaggaccccccagaggatgatagcacctgtcagtgccaggcgtgcgggcctcaccaagccgcgggtccagatcttggttcctctaatgatggctgccctcagctgtt

SEQ ID NO: 147162 - DNA, 3296 bp, Homo sapiens
  Payload ID: 9111
  Gene Symbol: L3MBTL2
  Gene Name: l(3)mbt-like 2 (Drosophila)
  Uniprot ID: Q969R5
  ENST ID: ENST00000216237
  CDS Start-End: 159-2276
gaatggcgggagcaggcacggaaccggcttttcctccttcctgcagcgtgattggcccgcggctcagggaggcgaccaatgagtgctctcgcggagagcgacggggcaggccaatatggcttcctgcacctggtgacgcttggcgaaactgaggtctcatggagaagccccggagtattgaggagaccccatcttcagaaccaatggaggaagaggaagatgacgacttggagctgtttggtggctatgatagtttccggagttataacagcagtgtgggcagtgagagcagctcctatctggaggagtcaagtgaagcagaaaatgaggatcgggaagcaggggaactgccgacctccccgctgcatttgctcagccctgggactcctcgctccttggatggcagtggttctgagccagctgtctgtgagatgtgtggtatcgtgggtacaagggaagccttcttctccaagaccaagaggttctgcagcgtctcctgctccaggagctactcctccaactccaagaaagccagtatcttggctaggttacagggaaaaccaccgaccaaaaaagccaaagtcctgcacaaggctgcctggtctgccaaaattggagccttcctccactctcaagggacaggacagctggcagatgggacaccaacaggacaagacgctctggtcttgggcttcgactgggggaagttcctgaaggatcacagttacaaggctgctcccgtcagctgtttcaagcacgtcccactctatgaccagtgggaggatgtgatgaaagggatgaaggtggaggtgctcaacagtgatgctgtgctccccagccgggtgtactggatcgcctctgtcatccagacagcagggtatcgggtgctgcttcggtatgaaggctttgaaaatgacgccagccatgacttctggtgcaacctgggaacagtggatgtccaccccattggctggtgtgccatcaacagcaagatcctagtgcccccacggaccatccatgccaagttcaccgactggaagggctacctcatgaaacggctggtgggctccaggacgcttcccgtggatttccacatcaagatggtggagagcatgaagtacccctttaggcagggcatgcggctggaagtggtggacaagtcccaggtgtcacgcactcgcatggctgtggtggacacagtaatcgggggtcgcctacggctcctctacgaggatggtgacagtgacgacgacttctggtgccacatgtggagccccctgatccacccagtgggttggtcacgacgtgtgggccacggcatcaagatgtcagagaggcgaagtgacatggcccatcaccccaccttccggaagatctactgtgatgccgttccttacctcttcaagaaggtacgagcagtctacacagaaggcggttggtttgaggaagggatgaagctggaggccattgaccccctgaatctgggcaacatctgcgtggcaactgtctgtaaggttctcctggatggatacctgatgatctgtgtggacggggggccctccacagatggcttggactggttctgctaccatgcctcttcccacgccatcttcccggccaccttctgtcagaagaatgacattgagctcacaccgccaaaaggttatgaggcacagactttcaactgggagaactacttggagaagaccaagtcgaaagccgctccatcgagactctttaacatggattgcccaaaccatggcttcaaggtgggcatgaagctggaggccgtggacctgatggagccccggctcatctgtgtggccacggtgaaacgagtggtgcatcggctcctcagcatccactttgacggctgggacagcgagtacgaccagtgggtggactgcgagtccccagacatctaccccgtcggctggtgtgagctcaccggctaccagctccagcctcctgtggccgcagaaccggccacaccgctgaaggccaaagaggccacaaagaagaaaaagaaacagtttgggaagaaaaggaaaagaatcccgcccactaagacgcgacccctcagacaggggtccaagaagcccctgctggaggacgaccctcagggtgccaggaagatctcgtcggagcctgttcctggcgagatcattgctgtgcgtgtgaaggaagagcatctagacgtggcctcgcccgacaaggcttcaagtccagagctgcctgtctccgtcgagaacatcaagcaggaaacagacgactgagccttcctgcctccagcctggcttctagctggaagccagcccagcgtttctctaccaccaccaccatgcctccacctgactttggcttggagactgatcctctctgtgtaaattctgcccggtgctgtgaaggctggacggtggaggacctgctggggtctcctgggacccgcctgttgcttctgccctcccctgtggaaaggtctatatgacgggccgcctgaggccccagaactcgtctgtgaaccaccttttccagccagagttcccaaagctggaacgctagctgcctgctcttccttaagatggcctccccccgacccgccacggccctcagttgccagggatggggccaccactgtcacactgtggaatacaagacagtgaactctgtctgcctgaacgagccatgtaaattaagttctagagcagctctctgagcaggataaggtcccctgacagtgagttgtgtggtgggggcagcctctgcctcaaaaattcaccaagcagaatgcctctcagcctcatgtgttggtcctctgctcctcctagctccccagggatgttggggacccagcttgtctcggcagctaagaagcagtgaccaggatgtggattttggcgacctgtgtggtggccttgagctgctttctgtgtttgtgaggactgactcccatttcctaaaggaaatgcccccggggaggacattgggaggaagatggcctgagtgtgcactttggctctgctacctgctcctgaagccccgctaaaaataattcatccaagattcctttgtagttaaagggtccagttctgactggagcctctagagagctgggcttgtatgttcttttggccttttgttcctacctaaatgaagaaaccatgcctggaggggccgtgaacacagaaccctcaagacaaggatgacagagctggaggacacatctagctgccattgcaacctcactgggctccccagactctgtgtgtgagaaattaaaccccctgcttgcttga

SEQ ID NO: 147163 - DNA, 864 bp, Homo sapiens
  Payload ID: 9111
  Gene Symbol: L3MBTL2
  Gene Name: l(3)mbt-like 2 (Drosophila)
  ENST ID: ENST00000449635
  CDS Start-End: 1-864
gagaccccatcttcagaaccaatggaggaagaggaagatgacgacttggagctgtttggtggctatgatagtttccggagttataacagcagtgtgggcagtgagagcagctcctatctggaggagtcaagtgaagcagaaaatgaggatcgggaagcaggggaactgccgacctccccgctgcatttgctcagccctgggactcctcgctccttggatggcagtggttctgagccagggaaaaccaccgaccaaaaaagccaaagtcctgcacaaggctgcctggtctgccaaaattggagccttcctccactctcaagggacaggacagctggcagatgggacaccaacaggacaagacgctctggtcttgggcttcgactgggggaagttcctgaaggatcacagttacaaggctgctcccgtcagctgtttcaagcacgtcccactctatgaccagtgggaggatgtgatgaaagggatgaaggtggaggtgctcaacagtgatgctgtgctccccagccgggtgtactggatcgcctctgtcatccagacagcagggtatcgggtgctgcttcggtatgaaggctttgaaaatgacgccagccatgacttctggtgcaacctgggaacagtggatgtccaccccattggctggtgtgccatcaacagcaagatcctagtgcccccacggaccatccatgccaagttcaccgactggaagggctacctcatgaaacggctggtgggctccaggacgcttcccgtggatttccacatcaaggtcggcagtgagcccttaactgatgtgcctccttccgctcttccatttttctgcatcctgcatgccactcactggagcat

SEQ ID NO: 147164 - DNA, 946 bp, Homo sapiens
  Payload ID: 9111
  Gene Symbol: L3MBTL2
  Gene Name: l(3)mbt-like 2 (Drosophila)
  ENST ID: ENST00000450939
  CDS Start-End: 1-699
gagaccccatcttcagaaccaatggaggaagaggaagatgacgacttggagctgtttggtggctatgatagtttccggagttataacagcagtgtgggcagtgagagcagctcctatctggaggagtcaagtgaagcagaaaatgaggatcgggaagcaggggaactgccgacctccccgctgcatttgctcagccctgggactcctcgctccttggatggcagtggttctgagccagctgtctgtgagatgtgtggtatcgtgggtacaagggaagccttcttctccaagaccaagaggttctgcagcgtctcctgctccaggagctactcctccaactccaagaaagccagtatcttggctaggttacagggaaaaccaccgaccaaaaaagccaaagtcctgcacaaggctgcctggtctgccaaaattggagccttcctccactctcaagggacaggacagctggcagatgggacaccaacaggacaagacgctctggtcttgggcttcgactgggggaagttcctgaaggatcacagttacaaggctgctcccgtcagctgtttcaagcacggtatcgggtgctgcttcggtatgaaggctttgaaaatgacgccagccatgacttctggtgcaacctgggaacagtggatgtccaccccattggctggtgtgccatcaacagcaagatcctagtgcccccacggaccatccatgccaagttcaccgactggaagggctacctcatgaaacggctggtgggctccaggacgcttcccgtggatttccacatcaagatggtggagagcatgaagtacccctttaggcagggcatgcggctggaagtggtggacaagtcccaggtgtcacgcactcgcatggctgtggtggacacagtaatcgggggtcgcctacggctcctctacgaggatggtgacagtga

SEQ ID NO: 147165 - DNA, 531 bp, Homo sapiens
  Payload ID: 9111
  Gene Symbol: L3MBTL2
  Gene Name: l(3)mbt-like 2 (Drosophila)
  ENST ID: ENST00000453659
  CDS Start-End: 52-174
aggccaatatggcttcctgcacctggtgacgcttggcgaaactgaggtctcatggagaagccccggagtattgagagatggggtgtggctgtgttgccaaggctggtctcaaactcctgggttcaagcaatccacctgcctcagcctcccaaagtgctgggattacagatgtgaaccaccgtacccaggctcttcacacgttttctgttacatgctgggagaccccatcttcagaaccaatggaggaagaggaagatgacgacttggagctgtttggtggctatgatagtttccggagttataacagcagtgtgggcagtgagagcagctcctatctggaggagtcaagtgaagcagaaaatgaggatcgggaagcaggggaactgccgacctccccgctgcatttgctcagccctgggactcctcgctccttggatggcagtggttctgagccaggtgccttcagagtgtcccctgaggatggagaggagatagaagattatagaggaagaggggggtggatataggcta

SEQ ID NO: 147166 - DNA, 3282 bp, Homo sapiens
  Payload ID: 9111
  Gene Symbol: L3MBTL2
  Gene Name: l(3)mbt-like 2 (Drosophila)
  Uniprot ID: Q969R5
  ENST ID: ENST00000452106
  CDS Start-End: 40-1884
cttcctgcacctggtgacgcttggcgaaactgaggtctcatggagaagccccggagtattgaggagaccccatcttcagaaccaatggaggaagaggaagatgacgacttggagctgtttggtggctatgatagtttccggagttataacagcagtgtgggcagtgagagcagctcctatctggaggagtcaagtgaagcagaaaatgaggatcgggaagcaggggaactgccgacctccccgctgcatttgctcagccctgggactcctcgctccttggatggcagtggttctgagccagctgtctgtgagatgtgtggtatcgtgggtacaagggaagccttcttctccaagaccaagaggttctgcagcgtctcctgctccaggagctactcctccaactccaagaaagccagtatcttggctaggttacagggaaaaccaccgaccaaaaaagccaaagtcctgcacaaggctgcctggtctgccaaaattggagccttcctccactctcaagggacaggacagctggcagatgggacaccaacaggacaagacgctctggtcttgggcttcgactgggggaagttcctgaaggatcacagttacaaggctgctcccgtcagctgtttcaagcacgtcccactctatgaccagtgggaggatgtgatgaaagggatgaaggtggaggtgctcaacagtgatgctgtgctccccagccgggtgtactggatcgcctctgtcatccagacagcagggtatcgggtgctgcttcggtatgaaggctttgaaaatgacgccagccatgacttctggtgcaacctgggaacagtggatgtccaccccattggctggtgtgccatcaacagcaagatcctagtgcccccacggaccatccatgccaagttcaccgactggaagggctacctcatgaaacggctggtgggctccaggacgcttcccgtggatttccacatcaagatggtggagagcatgaagtacccctttaggcagggcatgcggctggaagtggtggacaagtcccaggtgtcacgcactcgcatggctgtggtggacacagtaatcgggggtcgcctacggctcctctacgaggatggtgacagtgacgacgacttctggtgccacatgtggagccccctgatccacccagtgggttggtcacgacgtgtgggccacggcatcaagatgtcagagaggcgaagtgacatggcccatcaccccaccttccggaagatctactgtgatgccgttccttacctcttcaagaaggtacgagcagtctacacagaaggcggttggtttgaggaagggatgaagctggaggccattgaccccctgaatctgggcaacatctgcgtggcaactgtctgtaaggttctcctggatggatacctgatgatctgtgtggacggggggccctccacagatggcttggactggttctgctaccatgcctcttcccacgccatcttcccggccaccttctgtcagaagaatgacattgagctcacaccgccaaaaggttatgaggcacagactttcaactgggagaactacttggagaagaccaagtcgaaagccgctccatcgagactctttaacatggattgcccaaaccatggcttcaaggtgggcatgaagctggaggccgtggacctgatggagccccggctcatctgtgtggccacggtgaaacgagtggtgcatcggctcctcagcatccactttgacggctgggacagcgagtacgaccagtgggtggactgcgagtccccagacatctaccccgtcggctggtgtgagctcaccggctaccagctccagcctcctgtggccgcaggtaaactacccaggtccctctgagcagccctggtaacaagggtgggaagaagggacagctgttctccggcccctcctccagccccgccctctcctcattgcccagaaccggccacaccgctgaaggccaaagaggccacaaagaagaaaaagaaacagtttgggaagaaaaggaaaagaatcccgcccactaagacgcgacccctcagacaggggtccaagaagcccctgctggaggacgaccctcagggtgccaggaagatctcgtcggagcctgttcctggcgagatcattgctgtgcgtgtgaaggaagagcatctagacgtggcctcgcccgacaaggcttcaagtccagagctgcctgtctccgtcgagaacatcaagcaggaaacagacgactgagccttcctgcctccagcctggcttctagctggaagccagcccagcgtttctctaccaccaccaccatgcctccacctgactttggcttggagactgatcctctctgtgtaaattctgcccggtgctgtgaaggctggacggtggaggacctgctggggtctcctgggacccgcctgttgcttctgccctcccctgtggaaaggtctatatgacgggccgcctgaggccccagaactcgtctgtgaaccaccttttccagccagagttcccaaagctggaacgctagctgcctgctcttccttaagatggcctccccccgacccgccacggccctcagttgccagggatggggccaccactgtcacactgtggaatacaagacagtgaactctgtctgcctgaacgagccatgtaaattaagttctagagcagctctctgagcaggataaggtcccctgacagtgagttgtgtggtgggggcagcctctgcctcaaaaattcaccaagcagaatgcctctcagcctcatgtgttggtcctctgctcctcctagctccccagggatgttggggacccagcttgtctcggcagctaagaagcagtgaccaggatgtggattttggcgacctgtgtggtggccttgagctgctttctgtgtttgtgaggactgactcccatttcctaaaggaaatgcccccggggaggacattgggaggaagatggcctgagtgtgcactttggctctgctacctgctcctgaagccccgctaaaaataattcatccaagattcctttgtagttaaagggtccagttctgactggagcctctagagagctgggcttgtatgttcttttggccttttgttcctacctaaatgaagaaaccatgcctggaggggccgtgaacacagaaccctcaagacaaggatgacagagctggaggacacatctagctgccattgcaacctcactgggctccccagactctgtgtgtgagaaattaaaccccctgcttgcttga

SEQ ID NO: 147167 - DNA, 4217 bp, Homo sapiens
  Payload ID: 9112
  Gene Symbol: L3MBTL3
  Gene Name: l(3)mbt-like 3 (Drosophila)
  Uniprot ID: Q96JM7
  ENST ID: ENST00000361794
  CDS Start-End: 177-2519
acatgcgcattgcgcccgcagccctggaccatttgtcaggactactcgtgagacggagaaaaaaaaaagagaaaatttggggaacccttaggagaaatcttgagagtggacagcaattgtgaagatcgccagagagttctgtgtttcatcaccgccgaaaggttaaaaaataaatcatgactgaatctgcctctagcacaagtggtcaagagtttgatgtgttcagtgttatggactggaaagatggagtgggcacgttaccaggaagtgacttaaagtttcgggtaaatgagtttggagccctggaagttattacagatgagaatgagatggaaaatgttaaaaaagcaactgctaccaccacttggatggtaccaactgctcaagaagccccgacctctcccccgagctccaggcccgtatttccacctgcctactggacatctccacctggatgtcccacagtcttttcagagaagactgggatgcctttcaggttgaaggatccagtgaaagtagaagggcttcagttctgtgagaactgttgtcagtatggcaacgtagatgagtgtctttctggaggaaactattgcagccagaattgtgctcggcacatcaaagataaagatcagaaggaagaaagggacgtagaagaagacaatgaggaagaagatcctaagtgtagtcggaagaaaaaaccaaaattatctctgaaagctgacaccaaggaggatggagaagagagagatgatgaaatggagaacaaacaagatgtaagaatcctgaggggttcgcagagagcacggaggaaaagacgaggggattcggctgtactaaagcagggtttgcctcctaaaggaaagaaagcgtggtgctgggcatcctacctggaagaggagaaagcggtggcagtgccggcgaagctgttcaaggagcatcaatcctttccatataacaaaaatggattcaaagttggcatgaaattagaaggcgtggatcctgagcatcagtctgtgtactgtgtcctcaccgtcgcggaggtttgtggataccggataaagcttcactttgatgggtattctgattgctatgacttctgggtgaatgcagacgctctggatatccacccagttgggtggtgtgagaaaaccggccacaaactccatcctccaaaagggtataaagaagaagaattcaattggcagacctatcttaagacatgtaaagctcaagctgctcctaagtcattatttgaaaatcagaatataacagtgatcccatcgggctttcgagttggtatgaagcttgaggcagtagacaaaaagaatccctcattcatctgtgttgctacggtaacagatatggtggacaatcgtttcctggtacattttgacaactgggatgagagctatgactattggtgtgaagcatcaagtccacatattcatccagttggttggtgtaaggaacatagaagaacccttattactccaccaggttatccaaatgtgaaacatttttcttgggataaatacttagaagaaaccaattctttacctgctcctgcaagagctttcaaagtgaaacctcctcatggattccagaaaaaaatgaagcttgaggttgtagacaaaaggaaccctatgtttattagagtagcaactgtggcagacacagatgatcaccgggtaaaagttcactttgatggctggaacaattgctatgattactggatagatgcagattctcctgatattcaccctgtaggctggtgttcaaaaacaggacatccccttcagcctcctttgagccccttagaattaatggaagcttcagaacatggtggatgctcaaccccgggatgtaaagggattggccatttcaagagagcgagacatctgggccctcacagtgctgccaactgtccctattcagaaatcaatttgaataaagaccgtatttttccagaccgcttaagtggtgagatgcctccggctagtccgtcatttccaagaaataaaaggacagatgcaaatgaaagctcttcttcccctgaaatcagagaccagcatgctgatgatgtcaaagaagactttgaagagagaacagaaagtgaaatgagaacatcacatgaagccagaggtgcccgggaagaacccaccgtccagcaggcacagcgtcggtcagctgtctttctgtcctttaagtccccaattccatgtctgcccttgcgctgggagcagcaaagcaaacttcttccaactgtcgcaggaatccctgccagtaaagtttccaaatggagcacagacgaggtgtcagaatttatacagagcttacctgggtgtgaagaacatggaaaggtatttaaagatgaacaaattgatggagaagcatttctacttatgactcaaacagacattgttaaaattatgagcattaaactgggccctgctctcaaaattttcaattccatcctgatgttcaaagctgcagagaagaattctcacaatgaactttgaagatggtgaattctgaataccatcagcattctgctttaaagctcatgttttattcaaagcacaaggacggttataactcctaagtgagaagtctccaaaactcaaaagagcaacactatcggattatttatattactcaagagacaatatatatgaattcttatgaaagtgcttgagcttttaaccaggtactgtctaacaacagtcatcttttggttctgttcactgagctaaatttatctttgtaaatctttttgagtctggggggtggggggaaggggggcttcattaattatttatggtaatggggggcagagtaagaacttttggcattttgtaaacattgttgaattctctttcatgtacactgtttctttttcaatactttcagaaacctttttatataatcaaatttcaatttaaaccaaattagtcgaaacctggctaagtttagccagtaggactgttatctgtattgttaattttgtgccatattttgaattgcaacattatgctaagtataactttgcaagtcatgatattgcctaactgcttgtcataattgtcagggctgaatagttgtaagaatgacttttctttgaatcagtatttttccttttgcacgcattatgaaatgttaaacaaattacttttcaccagcatctttactataattaccaaaaacatgtatataaaagaatgaaattgaaaaataaaatatataaacataaataaattaggtagtgtattttgagtggcatcagtctcactcatcttggtgccccggtgtttacaagagccagatggtgtcagaggagtacgcagttgtatgcagttatggttggggggaatgtttgtgagggtcttgaactatttatgagatgatcttgagcttctaattttcattgatgaaattgtggtggtttacagagactaagagctcattctgtcaacagaaacactaatctgtacagagcgctgtctcaggtcatgcattgtcctccaaacccaaaggtttttttcagggttggctagagagcgagtattgtgattttgctgaaaagacaaggtgtgaaggagcaacttcagttgacacaaaatttgaaatgctcacagatcagggaggtgatttcccaaagtaattgcccaagaacctccgttttggaaggattcctttttctgtagaatactttgcctcgatatataagcatacagatgcactttaaatgaaaacccttgattataaattgatagctggtagtgtttcttttgcaagaatgcatttctaaggcaaaaggtaaattattttgtccgtcttttgatgtactttctgattccaggattggatatttattcaaggactattttaaaaatagaaagtaagtttgtagcatgctgtctgaattctggggtaagttccacctcttctttagttgctttcgttttttatgatgtaggacttcctttgatatccctgttggaagtccattagcagtcctttgcatttgccaattcaaggtaaaacagggtcagtgacatctgcagtgtcccagtcatttatttgcatgaatctgcttaaataagttttttgttgctgttttttcttttttatgttttgttcagaatttgtacattcaagttgtacttgttatatctgacatgaatgaaataaaatcttaattacagatgctttttaca

SEQ ID NO: 147168 - DNA, 4235 bp, Homo sapiens
  Payload ID: 9112
  Gene Symbol: L3MBTL3
  Gene Name: l(3)mbt-like 3 (Drosophila)
  Uniprot ID: Q96JM7
  ENST ID: ENST00000368136
  CDS Start-End: 207-2549
agggctgggggcgtcggtctgtccgtcgcgctcagagggaggtgggggtaactagccgctttccagggcgcggggaccgcggctctaccccacccttccacgggagacggagaacccttaggagaaatcttgagagtggacagcaattgtgaagatcgccagagagttctgtgtttcatcaccgccgaaaggttaaaaaataaatcatgactgaatctgcctctagcacaagtggtcaagagtttgatgtgttcagtgttatggactggaaagatggagtgggcacgttaccaggaagtgacttaaagtttcgggtaaatgagtttggagccctggaagttattacagatgagaatgagatggaaaatgttaaaaaagcaactgctaccaccacttggatggtaccaactgctcaagaagccccgacctctcccccgagctccaggcccgtatttccacctgcctactggacatctccacctggatgtcccacagtcttttcagagaagactgggatgcctttcaggttgaaggatccagtgaaagtagaagggcttcagttctgtgagaactgttgtcagtatggcaacgtagatgagtgtctttctggaggaaactattgcagccagaattgtgctcggcacatcaaagataaagatcagaaggaagaaagggacgtagaagaagacaatgaggaagaagatcctaagtgtagtcggaagaaaaaaccaaaattatctctgaaagctgacaccaaggaggatggagaagagagagatgatgaaatggagaacaaacaagatgtaagaatcctgaggggttcgcagagagcacggaggaaaagacgaggggattcggctgtactaaagcagggtttgcctcctaaaggaaagaaagcgtggtgctgggcatcctacctggaagaggagaaagcggtggcagtgccggcgaagctgttcaaggagcatcaatcctttccatataacaaaaatggattcaaagttggcatgaaattagaaggcgtggatcctgagcatcagtctgtgtactgtgtcctcaccgtcgcggaggtttgtggataccggataaagcttcactttgatgggtattctgattgctatgacttctgggtgaatgcagacgctctggatatccacccagttgggtggtgtgagaaaaccggccacaaactccatcctccaaaagggtataaagaagaagaattcaattggcagacctatcttaagacatgtaaagctcaagctgctcctaagtcattatttgaaaatcagaatataacagtgatcccatcgggctttcgagttggtatgaagcttgaggcagtagacaaaaagaatccctcattcatctgtgttgctacggtaacagatatggtggacaatcgtttcctggtacattttgacaactgggatgagagctatgactattggtgtgaagcatcaagtccacatattcatccagttggttggtgtaaggaacatagaagaacccttattactccaccaggttatccaaatgtgaaacatttttcttgggataaatacttagaagaaaccaattctttacctgctcctgcaagagctttcaaagtgaaacctcctcatggattccagaaaaaaatgaagcttgaggttgtagacaaaaggaaccctatgtttattagagtagcaactgtggcagacacagatgatcaccgggtaaaagttcactttgatggctggaacaattgctatgattactggatagatgcagattctcctgatattcaccctgtaggctggtgttcaaaaacaggacatccccttcagcctcctttgagccccttagaattaatggaagcttcagaacatggtggatgctcaaccccgggatgtaaagggattggccatttcaagagagcgagacatctgggccctcacagtgctgccaactgtccctattcagaaatcaatttgaataaagaccgtatttttccagaccgcttaagtggtgagatgcctccggctagtccgtcatttccaagaaataaaaggacagatgcaaatgaaagctcttcttcccctgaaatcagagaccagcatgctgatgatgtcaaagaagactttgaagagagaacagaaagtgaaatgagaacatcacatgaagccagaggtgcccgggaagaacccaccgtccagcaggcacagcgtcggtcagctgtctttctgtcctttaagtccccaattccatgtctgcccttgcgctgggagcagcaaagcaaacttcttccaactgtcgcaggaatccctgccagtaaagtttccaaatggagcacagacgaggtgtcagaatttatacagagcttacctgggtgtgaagaacatggaaaggtatttaaagatgaacaaattgatggagaagcatttctacttatgactcaaacagacattgttaaaattatgagcattaaactgggccctgctctcaaaattttcaattccatcctgatgttcaaagctgcagagaagaattctcacaatgaactttgaagatggtgaattctgaataccatcagcattctgctttaaagctcatgttttattcaaagcacaaggacggttataactcctaagtgagaagtctccaaaactcaaaagagcaacactatcggattatttatattactcaagagacaatatatatgaattcttatgaaagtgcttgagcttttaaccaggtactgtctaacaacagtcatcttttggttctgttcactgagctaaatttatctttgtaaatctttttgagtctggggggtggggggaaggggggcttcattaattatttatggtaatggggggcagagtaagaacttttggcattttgtaaacattgttgaattctctttcatgtacactgtttctttttcaatactttcagaaacctttttatataatcaaatttcaatttaaaccaaattagtcgaaacctggctaagtttagccagtaggactgttatctgtattgttaattttgtgccatattttgaattgcaacattatgctaagtataactttgcaagtcatgatattgcctaactgcttgtcataattgtcagggctgaatagttgtaagaatgacttttctttgaatcagtatttttccttttgcacgcattatgaaatgttaaacaaattacttttcaccagcatctttactataattaccaaaaacatgtatataaaagaatgaaattgaaaaataaaatatataaacataaataaattaggtagtgtattttgagtggcatcagtctcactcatcttggtgccccggtgtttacaagagccagatggtgtcagaggagtacgcagttgtatgcagttatggttggggggaatgtttgtgagggtcttgaactatttatgagatgatcttgagcttctaattttcattgatgaaattgtggtggtttacagagactaagagctcattctgtcaacagaaacactaatctgtacagagcgctgtctcaggtcatgcattgtcctccaaacccaaaggtttttttcagggttggctagagagcgagtattgtgattttgctgaaaagacaaggtgtgaaggagcaacttcagttgacacaaaatttgaaatgctcacagatcagggaggtgatttcccaaagtaattgcccaagaacctccgttttggaaggattcctttttctgtagaatactttgcctcgatatataagcatacagatgcactttaaatgaaaacccttgattataaattgatagctggtagtgtttcttttgcaagaatgcatttctaaggcaaaaggtaaattattttgtccgtcttttgatgtactttctgattccaggattggatatttattcaaggactattttaaaaatagaaagtaagtttgtagcatgctgtctgaattctggggtaagttccacctcttctttagttgctttcgttttttatgatgtaggacttcctttgatatccctgttggaagtccattagcagtcctttgcatttgccaattcaaggtaaaacagggtcagtgacatctgcagtgtcccagtcatttatttgcatgaatctgcttaaataagttttttgttgctgttttttcttttttatgttttgttcagaatttgtacattcaagttgtacttgttatatctgacatgaatgaaataaaatcttaattacag

SEQ ID NO: 147169 - DNA, 4148 bp, Homo sapiens
  Payload ID: 9112
  Gene Symbol: L3MBTL3
  Gene Name: l(3)mbt-like 3 (Drosophila)
  Uniprot ID: Q96JM7
  ENST ID: ENST00000368139
  CDS Start-End: 194-2461
cacagcccgcagcgcgaccgtgagagaaagtttaaaagcgggcgtgttcctcccgggtccccgcggagggctgggggcgtcggtctgtccgtcgcgctcagagggaggtgggggtaactagccgctttccagggcgcggggaccgcggctctaccccacccttccacgggagacggaggttaaaaaataaatcatgactgaatctgcctctagcacaagtggtcaagagtttgatgtgttcagtgttatggactggaaagatggagtgggcacgttaccaggaagtgacttaaagtttcgggtaaatgagtttggagccctggaagttattacagatgagaatgagatggaaaatgttaaaaaagcaactgctaccaccacttggatggtaccaactgctcaagaagtcttttcagagaagactgggatgcctttcaggttgaaggatccagtgaaagtagaagggcttcagttctgtgagaactgttgtcagtatggcaacgtagatgagtgtctttctggaggaaactattgcagccagaattgtgctcggcacatcaaagataaagatcagaaggaagaaagggacgtagaagaagacaatgaggaagaagatcctaagtgtagtcggaagaaaaaaccaaaattatctctgaaagctgacaccaaggaggatggagaagagagagatgatgaaatggagaacaaacaagatgtaagaatcctgaggggttcgcagagagcacggaggaaaagacgaggggattcggctgtactaaagcagggtttgcctcctaaaggaaagaaagcgtggtgctgggcatcctacctggaagaggagaaagcggtggcagtgccggcgaagctgttcaaggagcatcaatcctttccatataacaaaaatggattcaaagttggcatgaaattagaaggcgtggatcctgagcatcagtctgtgtactgtgtcctcaccgtcgcggaggtttgtggataccggataaagcttcactttgatgggtattctgattgctatgacttctgggtgaatgcagacgctctggatatccacccagttgggtggtgtgagaaaaccggccacaaactccatcctccaaaagggtataaagaagaagaattcaattggcagacctatcttaagacatgtaaagctcaagctgctcctaagtcattatttgaaaatcagaatataacagtgatcccatcgggctttcgagttggtatgaagcttgaggcagtagacaaaaagaatccctcattcatctgtgttgctacggtaacagatatggtggacaatcgtttcctggtacattttgacaactgggatgagagctatgactattggtgtgaagcatcaagtccacatattcatccagttggttggtgtaaggaacatagaagaacccttattactccaccaggttatccaaatgtgaaacatttttcttgggataaatacttagaagaaaccaattctttacctgctcctgcaagagctttcaaagtgaaacctcctcatggattccagaaaaaaatgaagcttgaggttgtagacaaaaggaaccctatgtttattagagtagcaactgtggcagacacagatgatcaccgggtaaaagttcactttgatggctggaacaattgctatgattactggatagatgcagattctcctgatattcaccctgtaggctggtgttcaaaaacaggacatccccttcagcctcctttgagccccttagaattaatggaagcttcagaacatggtggatgctcaaccccgggatgtaaagggattggccatttcaagagagcgagacatctgggccctcacagtgctgccaactgtccctattcagaaatcaatttgaataaagaccgtatttttccagaccgcttaagtggtgagatgcctccggctagtccgtcatttccaagaaataaaaggacagatgcaaatgaaagctcttcttcccctgaaatcagagaccagcatgctgatgatgtcaaagaagactttgaagagagaacagaaagtgaaatgagaacatcacatgaagccagaggtgcccgggaagaacccaccgtccagcaggcacagcgtcggtcagctgtctttctgtcctttaagtccccaattccatgtctgcccttgcgctgggagcagcaaagcaaacttcttccaactgtcgcaggaatccctgccagtaaagtttccaaatggagcacagacgaggtgtcagaatttatacagagcttacctgggtgtgaagaacatggaaaggtatttaaagatgaacaaattgatggagaagcatttctacttatgactcaaacagacattgttaaaattatgagcattaaactgggccctgctctcaaaattttcaattccatcctgatgttcaaagctgcagagaagaattctcacaatgaactttgaagatggtgaattctgaataccatcagcattctgctttaaagctcatgttttattcaaagcacaaggacggttataactcctaagtgagaagtctccaaaactcaaaagagcaacactatcggattatttatattactcaagagacaatatatatgaattcttatgaaagtgcttgagcttttaaccaggtactgtctaacaacagtcatcttttggttctgttcactgagctaaatttatctttgtaaatctttttgagtctggggggtggggggaaggggggcttcattaattatttatggtaatggggggcagagtaagaacttttggcattttgtaaacattgttgaattctctttcatgtacactgtttctttttcaatactttcagaaacctttttatataatcaaatttcaatttaaaccaaattagtcgaaacctggctaagtttagccagtaggactgttatctgtattgttaattttgtgccatattttgaattgcaacattatgctaagtataactttgcaagtcatgatattgcctaactgcttgtcataattgtcagggctgaatagttgtaagaatgacttttctttgaatcagtatttttccttttgcacgcattatgaaatgttaaacaaattacttttcaccagcatctttactataattaccaaaaacatgtatataaaagaatgaaattgaaaaataaaatatataaacataaataaattaggtagtgtattttgagtggcatcagtctcactcatcttggtgccccggtgtttacaagagccagatggtgtcagaggagtacgcagttgtatgcagttatggttggggggaatgtttgtgagggtcttgaactatttatgagatgatcttgagcttctaattttcattgatgaaattgtggtggtttacagagactaagagctcattctgtcaacagaaacactaatctgtacagagcgctgtctcaggtcatgcattgtcctccaaacccaaaggtttttttcagggttggctagagagcgagtattgtgattttgctgaaaagacaaggtgtgaaggagcaacttcagttgacacaaaatttgaaatgctcacagatcagggaggtgatttcccaaagtaattgcccaagaacctccgttttggaaggattcctttttctgtagaatactttgcctcgatatataagcatacagatgcactttaaatgaaaacccttgattataaattgatagctggtagtgtttcttttgcaagaatgcatttctaaggcaaaaggtaaattattttgtccgtcttttgatgtactttctgattccaggattggatatttattcaaggactattttaaaaatagaaagtaagtttgtagcatgctgtctgaattctggggtaagttccacctcttctttagttgctttcgttttttatgatgtaggacttcctttgatatccctgttggaagtccattagcagtcctttgcatttgccaattcaaggtaaaacagggtcagtgacatctgcagtgtcccagtcatttatttgcatgaatctgcttaaataagttttttgttgctgttttttcttttttatgttttgttcagaatttgtacattcaagttgtacttgttatatctgacatgaatgaaataaaatcttaattacaga

SEQ ID NO: 147170 - DNA, 4518 bp, Homo sapiens
  Payload ID: 9112
  Gene Symbol: L3MBTL3
  Gene Name: l(3)mbt-like 3 (Drosophila)
  Uniprot ID: Q96JM7
  ENST ID: ENST00000529410
  CDS Start-End: 480-2822
gtactggcggctgttgtcacagatagtggcaccaaaggattctttgtagaaaactttgacagcagcctttaaagtcattattcctacaactctgaggcggtgaccgggctattgaaaagatgcacctgaaacaggatctgcgggcagctgcatttgccacccggctttattgctgctttccagcggcgaaggcgcagcagcagtaacagggaagccagagcgagcctccccggcagcggcggcggcggcggcggcaccggcaccagcgcagtttcccctctccccagccctgactctacgcgcacatgcgcattgcgcccgcagccctggaccatttgtcaggactactcgtgagacggagaaaaaaaaaagagaaaatttggggaacccttaggagaaatcttgagagtggacagcaattgtgaagatcgccagagagttctgtgtttcatcaccgccgaaaggttaaaaaataaatcatgactgaatctgcctctagcacaagtggtcaagagtttgatgtgttcagtgttatggactggaaagatggagtgggcacgttaccaggaagtgacttaaagtttcgggtaaatgagtttggagccctggaagttattacagatgagaatgagatggaaaatgttaaaaaagcaactgctaccaccacttggatggtaccaactgctcaagaagccccgacctctcccccgagctccaggcccgtatttccacctgcctactggacatctccacctggatgtcccacagtcttttcagagaagactgggatgcctttcaggttgaaggatccagtgaaagtagaagggcttcagttctgtgagaactgttgtcagtatggcaacgtagatgagtgtctttctggaggaaactattgcagccagaattgtgctcggcacatcaaagataaagatcagaaggaagaaagggacgtagaagaagacaatgaggaagaagatcctaagtgtagtcggaagaaaaaaccaaaattatctctgaaagctgacaccaaggaggatggagaagagagagatgatgaaatggagaacaaacaagatgtaagaatcctgaggggttcgcagagagcacggaggaaaagacgaggggattcggctgtactaaagcagggtttgcctcctaaaggaaagaaagcgtggtgctgggcatcctacctggaagaggagaaagcggtggcagtgccggcgaagctgttcaaggagcatcaatcctttccatataacaaaaatggattcaaagttggcatgaaattagaaggcgtggatcctgagcatcagtctgtgtactgtgtcctcaccgtcgcggaggtttgtggataccggataaagcttcactttgatgggtattctgattgctatgacttctgggtgaatgcagacgctctggatatccacccagttgggtggtgtgagaaaaccggccacaaactccatcctccaaaagggtataaagaagaagaattcaattggcagacctatcttaagacatgtaaagctcaagctgctcctaagtcattatttgaaaatcagaatataacagtgatcccatcgggctttcgagttggtatgaagcttgaggcagtagacaaaaagaatccctcattcatctgtgttgctacggtaacagatatggtggacaatcgtttcctggtacattttgacaactgggatgagagctatgactattggtgtgaagcatcaagtccacatattcatccagttggttggtgtaaggaacatagaagaacccttattactccaccaggttatccaaatgtgaaacatttttcttgggataaatacttagaagaaaccaattctttacctgctcctgcaagagctttcaaagtgaaacctcctcatggattccagaaaaaaatgaagcttgaggttgtagacaaaaggaaccctatgtttattagagtagcaactgtggcagacacagatgatcaccgggtaaaagttcactttgatggctggaacaattgctatgattactggatagatgcagattctcctgatattcaccctgtaggctggtgttcaaaaacaggacatccccttcagcctcctttgagccccttagaattaatggaagcttcagaacatggtggatgctcaaccccgggatgtaaagggattggccatttcaagagagcgagacatctgggccctcacagtgctgccaactgtccctattcagaaatcaatttgaataaagaccgtatttttccagaccgcttaagtggtgagatgcctccggctagtccgtcatttccaagaaataaaaggacagatgcaaatgaaagctcttcttcccctgaaatcagagaccagcatgctgatgatgtcaaagaagactttgaagagagaacagaaagtgaaatgagaacatcacatgaagccagaggtgcccgggaagaacccaccgtccagcaggcacagcgtcggtcagctgtctttctgtcctttaagtccccaattccatgtctgcccttgcgctgggagcagcaaagcaaacttcttccaactgtcgcaggaatccctgccagtaaagtttccaaatggagcacagacgaggtgtcagaatttatacagagcttacctgggtgtgaagaacatggaaaggtatttaaagatgaacaaattgatggagaagcatttctacttatgactcaaacagacattgttaaaattatgagcattaaactgggccctgctctcaaaattttcaattccatcctgatgttcaaagctgcagagaagaattctcacaatgaactttgaagatggtgaattctgaataccatcagcattctgctttaaagctcatgttttattcaaagcacaaggacggttataactcctaagtgagaagtctccaaaactcaaaagagcaacactatcggattatttatattactcaagagacaatatatatgaattcttatgaaagtgcttgagcttttaaccaggtactgtctaacaacagtcatcttttggttctgttcactgagctaaatttatctttgtaaatctttttgagtctggggggtggggggaaggggggcttcattaattatttatggtaatggggggcagagtaagaacttttggcattttgtaaacattgttgaattctctttcatgtacactgtttctttttcaatactttcagaaacctttttatataatcaaatttcaatttaaaccaaattagtcgaaacctggctaagtttagccagtaggactgttatctgtattgttaattttgtgccatattttgaattgcaacattatgctaagtataactttgcaagtcatgatattgcctaactgcttgtcataattgtcagggctgaatagttgtaagaatgacttttctttgaatcagtatttttccttttgcacgcattatgaaatgttaaacaaattacttttcaccagcatctttactataattaccaaaaacatgtatataaaagaatgaaattgaaaaataaaatatataaacataaataaattaggtagtgtattttgagtggcatcagtctcactcatcttggtgccccggtgtttacaagagccagatggtgtcagaggagtacgcagttgtatgcagttatggttggggggaatgtttgtgagggtcttgaactatttatgagatgatcttgagcttctaattttcattgatgaaattgtggtggtttacagagactaagagctcattctgtcaacagaaacactaatctgtacagagcgctgtctcaggtcatgcattgtcctccaaacccaaaggtttttttcagggttggctagagagcgagtattgtgattttgctgaaaagacaaggtgtgaaggagcaacttcagttgacacaaaatttgaaatgctcacagatcagggaggtgatttcccaaagtaattgcccaagaacctccgttttggaaggattcctttttctgtagaatactttgcctcgatatataagcatacagatgcactttaaatgaaaacccttgattataaattgatagctggtagtgtttcttttgcaagaatgcatttctaaggcaaaaggtaaattattttgtccgtcttttgatgtactttctgattccaggattggatatttattcaaggactattttaaaaatagaaagtaagtttgtagcatgctgtctgaattctggggtaagttccacctcttctttagttgctttcgttttttatgatgtaggacttcctttgatatccctgttggaagtccattagcagtcctttgcatttgccaattcaaggtaaaacagggtcagtgacatctgcagtgtcccagtcatttatttgcatgaatctgcttaaataagttttttgttgctgttttttcttttttatgttttgttcagaatttgtacattcaagttgtacttgttatatctgacatgaatgaaataaaatcttaattacagatgcttttta

SEQ ID NO: 147171 - DNA, 762 bp, Homo sapiens
  Payload ID: 9112
  Gene Symbol: L3MBTL3
  Gene Name: l(3)mbt-like 3 (Drosophila)
  ENST ID: ENST00000528385
  CDS Start-End: 192-762
cgcgcgccgcccctgcggccccctccgcccgtgtggcctttgtgccgggcgcgcaccggagagcgagcgagcgggcgggcgagcgcgagaagtacaaaacccttaggagaaatcttgagagtggacagcaattgtgaagatcgccagagagttctgtgtttcatcaccgccgaaaggttaaaaaataaatcatgactgaatctgcctctagcacaagtggtcaagagtttgatgtgttcagtgttatggactggaaagatggagtgggcacgttaccaggaagtgacttaaagtttcgggtaaatgagtttggagccctggaagttattacagatgagaatgagatggaaaatgttaaaaaagcaactgctaccaccacttggatggtaccaactgctcaagaagccccgacctctcccccgagctccaggcccgtatttccacctgcctactggacatctccacctggatgtcccacagtcttttcagagaagactgggatgcctttcaggttgaaggatccagtgaaagtagaagggcttcagttctgtgagaactgttgtcagtatggcaacgtagatgagtgtctttctggaggaaactattgcagccagaattgtgctcggcacatcaaagataaagatcagaaggaagaaagggacgtagaagaagacaatgaggaagaagatcctaagtgtagtcggaagaaaaaaccaaaattatctctgaaagctgacaccaaggaggatggagaagagagag

SEQ ID NO: 147172 - DNA, 665 bp, Homo sapiens
  Payload ID: 9112
  Gene Symbol: L3MBTL3
  Gene Name: l(3)mbt-like 3 (Drosophila)
  ENST ID: ENST00000526087
  CDS Start-End: 177-665
acatgcgcattgcgcccgcagccctggaccatttgtcaggactactcgtgagacggagaaaaaaaaaagagaaaatttggggaacccttaggagaaatcttgagagtggacagcaattgtgaagatcgccagagagttctgtgtttcatcaccgccgaaaggttaaaaaataaatcatgactgaatctgcctctagcacaagtggtcaagagtttgatgtgttcagtgttatggactggaaagatggagtgggcacgttaccaggaagtgacttaaagtttcgggtaaatgagtttggagccctggaagttattacagatgagaatgagatggaaaatgttaaaaaagcaactgctaccaccacttggatggtaccaactgctcaagaagcctacacaggtgatttagccaaaagcctgccactttttttctcatctactccgatggttgtaactaacacctatatgctgatgactcctaaatctacatctccagccccgacctctcccccgagctccaggcccgtatttccacctgcctactggacatctccacctggatgtcccacagtcttttcagagaagactgggatgcctttcaggttgaaggatccagtgaaagtagaagggcttcagttctgtgagaactgttgtcagtatggcaac

SEQ ID NO: 147173 - DNA, 3243 bp, Homo sapiens
  Payload ID: 9112
  Gene Symbol: L3MBTL3
  Gene Name: l(3)mbt-like 3 (Drosophila)
  Uniprot ID: Q96JM7
  ENST ID: ENST00000526019
  CDS Start-End: 244-2511
gtttaaaagcgggcgtgttcctcccgggtccccgcggagggctgggggcgtcggtctgtccgtcgcgctcagagggaggtgggggtaactagccgctttccagggcgcggggaccgcggctctaccccacccttccacgggagacggagaacccttaggagaaatcttgagagtggacagcaattgtgaagatcgccagagagttctgtgtttcatcaccgccgaaaggttaaaaaataaatcatgactgaatctgcctctagcacaagtggtcaagagtttgatgtgttcagtgttatggactggaaagatggagtgggcacgttaccaggaagtgacttaaagtttcgggtaaatgagtttggagccctggaagttattacagatgagaatgagatggaaaatgttaaaaaagcaactgctaccaccacttggatggtaccaactgctcaagaagtcttttcagagaagactgggatgcctttcaggttgaaggatccagtgaaagtagaagggcttcagttctgtgagaactgttgtcagtatggcaacgtagatgagtgtctttctggaggaaactattgcagccagaattgtgctcggcacatcaaagataaagatcagaaggaagaaagggacgtagaagaagacaatgaggaagaagatcctaagtgtagtcggaagaaaaaaccaaaattatctctgaaagctgacaccaaggaggatggagaagagagagatgatgaaatggagaacaaacaagatgtaagaatcctgaggggttcgcagagagcacggaggaaaagacgaggggattcggctgtactaaagcagggtttgcctcctaaaggaaagaaagcgtggtgctgggcatcctacctggaagaggagaaagcggtggcagtgccggcgaagctgttcaaggagcatcaatcctttccatataacaaaaatggattcaaagttggcatgaaattagaaggcgtggatcctgagcatcagtctgtgtactgtgtcctcaccgtcgcggaggtttgtggataccggataaagcttcactttgatgggtattctgattgctatgacttctgggtgaatgcagacgctctggatatccacccagttgggtggtgtgagaaaaccggccacaaactccatcctccaaaagggtataaagaagaagaattcaattggcagacctatcttaagacatgtaaagctcaagctgctcctaagtcattatttgaaaatcagaatataacagtgatcccatcgggctttcgagttggtatgaagcttgaggcagtagacaaaaagaatccctcattcatctgtgttgctacggtaacagatatggtggacaatcgtttcctggtacattttgacaactgggatgagagctatgactattggtgtgaagcatcaagtccacatattcatccagttggttggtgtaaggaacatagaagaacccttattactccaccaggttatccaaatgtgaaacatttttcttgggataaatacttagaagaaaccaattctttacctgctcctgcaagagctttcaaagtgaaacctcctcatggattccagaaaaaaatgaagcttgaggttgtagacaaaaggaaccctatgtttattagagtagcaactgtggcagacacagatgatcaccgggtaaaagttcactttgatggctggaacaattgctatgattactggatagatgcagattctcctgatattcaccctgtaggctggtgttcaaaaacaggacatccccttcagcctcctttgagccccttagaattaatggaagcttcagaacatggtggatgctcaaccccgggatgtaaagggattggccatttcaagagagcgagacatctgggccctcacagtgctgccaactgtccctattcagaaatcaatttgaataaagaccgtatttttccagaccgcttaagtggtgagatgcctccggctagtccgtcatttccaagaaataaaaggacagatgcaaatgaaagctcttcttcccctgaaatcagagaccagcatgctgatgatgtcaaagaagactttgaagagagaacagaaagtgaaatgagaacatcacatgaagccagaggtgcccgggaagaacccaccgtccagcaggcacagcgtcggtcagctgtctttctgtcctttaagtccccaattccatgtctgcccttgcgctgggagcagcaaagcaaacttcttccaactgtcgcaggaatccctgccagtaaagtttccaaatggagcacagacgaggtgtcagaatttatacagagcttacctgggtgtgaagaacatggaaaggtatttaaagatgaacaaattgatggagaagcatttctacttatgactcaaacagacattgttaaaattatgagcattaaactgggccctgctctcaaaattttcaattccatcctgatgttcaaagctgcagagaagaattctcacaatgaactttgaagatggtgaattctgaataccatcagcattctgctttaaagctcatgttttattcaaagcacaaggacggttataactcctaagtgagaagtctccaaaactcaaaagagcaacactatcggattatttatattactcaagagacaatatatatgaattcttatgaaagtgcttgagcttttaaccaggtactgtctaacaacagtcatcttttggttctgttcactgagctaaatttatctttgtaaatctttttgagtctggggggtggggggaaggggggcttcattaattatttatggtaatggggggcagagtaagaacttttggcattttgtaaacattgttgaattctctttcatgtacactgtttctttttcaatactttcagaaacctttttatataatcaaatttcaatttaaaccaaattagtcgaaacctggctaagtttagccagtaggactgttatctgtattgttaattttgtgccatattttgaattgcaacattatgctaagtataactttgcaagtcatgatattgcctaactgcttgtcataattgtcagggctgaatagttgtaagaatgacttttctttgaatcagtatttttccttttgcacgcattatgaaatgttaaacaaattacttttcaccagcatctttactataattaccaaaaacatgtatataaaagaatgaaattgaaaaataaaatatataaacataaa

SEQ ID NO: 147174 - DNA, 3165 bp, Homo sapiens
  Payload ID: 9112
  Gene Symbol: L3MBTL3
  Gene Name: l(3)mbt-like 3 (Drosophila)
  Uniprot ID: Q96JM7
  ENST ID: ENST00000533560
  CDS Start-End: 171-2438
gcattgcgcccgcagccctggaccatttgtcaggactactcgtgagacggagaaaaaaaaaagagaaaatttggggaacccttaggagaaatcttgagagtggacagcaattgtgaagatcgccagagagttctgtgtttcatcaccgccgaaaggttaaaaaataaatcatgactgaatctgcctctagcacaagtggtcaagagtttgatgtgttcagtgttatggactggaaagatggagtgggcacgttaccaggaagtgacttaaagtttcgggtaaatgagtttggagccctggaagttattacagatgagaatgagatggaaaatgttaaaaaagcaactgctaccaccacttggatggtaccaactgctcaagaagtcttttcagagaagactgggatgcctttcaggttgaaggatccagtgaaagtagaagggcttcagttctgtgagaactgttgtcagtatggcaacgtagatgagtgtctttctggaggaaactattgcagccagaattgtgctcggcacatcaaagataaagatcagaaggaagaaagggacgtagaagaagacaatgaggaagaagatcctaagtgtagtcggaagaaaaaaccaaaattatctctgaaagctgacaccaaggaggatggagaagagagagatgatgaaatggagaacaaacaagatgtaagaatcctgaggggttcgcagagagcacggaggaaaagacgaggggattcggctgtactaaagcagggtttgcctcctaaaggaaagaaagcgtggtgctgggcatcctacctggaagaggagaaagcggtggcagtgccggcgaagctgttcaaggagcatcaatcctttccatataacaaaaatggattcaaagttggcatgaaattagaaggcgtggatcctgagcatcagtctgtgtactgtgtcctcaccgtcgcggaggtttgtggataccggataaagcttcactttgatgggtattctgattgctatgacttctgggtgaatgcagacgctctggatatccacccagttgggtggtgtgagaaaaccggccacaaactccatcctccaaaagggtataaagaagaagaattcaattggcagacctatcttaagacatgtaaagctcaagctgctcctaagtcattatttgaaaatcagaatataacagtgatcccatcgggctttcgagttggtatgaagcttgaggcagtagacaaaaagaatccctcattcatctgtgttgctacggtaacagatatggtggacaatcgtttcctggtacattttgacaactgggatgagagctatgactattggtgtgaagcatcaagtccacatattcatccagttggttggtgtaaggaacatagaagaacccttattactccaccaggttatccaaatgtgaaacatttttcttgggataaatacttagaagaaaccaattctttacctgctcctgcaagagctttcaaagtgaaacctcctcatggattccagaaaaaaatgaagcttgaggttgtagacaaaaggaaccctatgtttattagagtagcaactgtggcagacacagatgatcaccgggtaaaagttcactttgatggctggaacaattgctatgattactggatagatgcagattctcctgatattcaccctgtaggctggtgttcaaaaacaggacatccccttcagcctcctttgagccccttagaattaatggaagcttcagaacatggtggatgctcaaccccgggatgtaaagggattggccatttcaagagagcgagacatctgggccctcacagtgctgccaactgtccctattcagaaatcaatttgaataaagaccgtatttttccagaccgcttaagtggtgagatgcctccggctagtccgtcatttccaagaaataaaaggacagatgcaaatgaaagctcttcttcccctgaaatcagagaccagcatgctgatgatgtcaaagaagactttgaagagagaacagaaagtgaaatgagaacatcacatgaagccagaggtgcccgggaagaacccaccgtccagcaggcacagcgtcggtcagctgtctttctgtcctttaagtccccaattccatgtctgcccttgcgctgggagcagcaaagcaaacttcttccaactgtcgcaggaatccctgccagtaaagtttccaaatggagcacagacgaggtgtcagaatttatacagagcttacctgggtgtgaagaacatggaaaggtatttaaagatgaacaaattgatggagaagcatttctacttatgactcaaacagacattgttaaaattatgagcattaaactgggccctgctctcaaaattttcaattccatcctgatgttcaaagctgcagagaagaattctcacaatgaactttgaagatggtgaattctgaataccatcagcattctgctttaaagctcatgttttattcaaagcacaaggacggttataactcctaagtgagaagtctccaaaactcaaaagagcaacactatcggattatttatattactcaagagacaatatatatgaattcttatgaaagtgcttgagcttttaaccaggtactgtctaacaacagtcatcttttggttctgttcactgagctaaatttatctttgtaaatctttttgagtctggggggtggggggaaggggggcttcattaattatttatggtaatggggggcagagtaagaacttttggcattttgtaaacattgttgaattctctttcatgtacactgtttctttttcaatactttcagaaacctttttatataatcaaatttcaatttaaaccaaattagtcgaaacctggctaagtttagccagtaggactgttatctgtattgttaattttgtgccatattttgaattgcaacattatgctaagtataactttgcaagtcatgatattgcctaactgcttgtcataattgtcagggctgaatagttgtaagaatgacttttctttgaatcagtatttttccttttgcacgcattatgaaatgttaaacaaattacttttcaccagcatctttactataattaccaaaaacatgtatataaaagaatgaaattgaaaaataaaatatataaac

SEQ ID NO: 147175 - DNA, 1872 bp, Homo sapiens
  Payload ID: 9113
  Gene Symbol: L3MBTL4
  Gene Name: l(3)mbt-like 4 (Drosophila)
  Uniprot ID: Q8NA19
  ENST ID: ENST00000284898
  CDS Start-End: 1-1872
atgaaacagcccaacaggaaaaggaagcttaatatggattccaaagagcgtttggatcaggacggacgcttggagcaagctgaagaggaaaagaagcccaaggatagcacaacccctttgagtcacgtcccttcagcggctgcacagggagcatggtcttgggagtggtacttgaaagaacagaaggctgtcgcagcacctgttgagctgttttccaaggatcagtcctttccagagcatgaaaatggttttcagattggaatgagattagaaggcattgatccccgacatccatcggtattctgtgtgctttctgtagcggaggtttgtggttaccgtctaagacttcattttgatggttatttaagttgctatgatttttggaccaatgctggttcccctgacattcatccagtaggatggtgtgaaaagaccaaacatgaactgcacatccctaagggttatagaaaagataaatttgtttggatggattacttgaaggcctgcaaattgcaaaatgctccaaagaaattattcagaaacagaagtcctaatgggccaatgtctaaagaatttcaggttggaatgaagctggaggccgtggacaggaagaacccttccttggtgtgtgtggcgaccatagcagatattgttgaagatcgcttactagtgcattttgacaactgggatgatagttacgattactggtgcgatgttaatagcccttatgtccagccagttggttggtgtcaggagaatggaagaactctgatagcaccccaaggttatcccaatccagaaaatttttcctggacagaatacctggaagctactcaaaccaatgcagttcctgccaaagtttttaaaatgaggttgcctcatggttttctgccaaatatgaaacttgaagttgtggataaacggaaccccaggttaattcgtgttgctacgattgtagatgttgatgaccaaagagtaaaggttcattttgatggttgggaccataagtatgactactgggtggaggcagacagccctgatatccacccgatcggatggtgtgatgtcacagggcatccactggaagtgccacagcgaacgaatgacctgaagatccttccaggtcaagctgtctgtcctactcccgggtgccgaggaataggccatatccgtggtccacgttattcgggacatcacagtgcttttggctgcccgtattcagacatgaacttgaaaaaggaggcaacacttcacgatcgtttgagagaacaaacacaggcaaatttggaatcagactcttcacattcaaaatcaaaaagcctctgtagtttgaacttcaatggaaaacatgaaaaggtgaacagtcagcccagacttgtacagcaggcaaagtgtttgaaaatcaaaggaaaagaagatattgacttggataatctcttcagagtgcttgtgctgcatcccagaggtttggaatactcggtggagcaggcgcagcaggtgcttcaccagtcagtgtccatgtccacggtgtcagcccacccttttcgggaccttcccctcggcagggagcaacactgcaagttgcttccaggcgtggctgacatccgggccagccaagtggcacgttggactgtggatgaggtggctgagtttgtacagtctcttctgggctgtgaagagcatgccaagtgctttaagaaagagcagatcgatggcaaagccttcctgcttctgacacagacggacattgtcaaagtgatgaagatcaaactgggcccagcactgaagatttacaactctatcctgatgttcaggcattcccaggaactccctgaagaagatattgcctcaggccaagaagtcaggggatga

SEQ ID NO: 147176 - DNA, 3560 bp, Homo sapiens
  Payload ID: 9113
  Gene Symbol: L3MBTL4
  Gene Name: l(3)mbt-like 4 (Drosophila)
  ENST ID: ENST00000317931
  CDS Start-End: 202-2046
gggcaccgcggggcagcggcgccgcagcctgggctggcggaacctcgcgctccgactcgccccccgcctgtagctcggtcggcgttgcgggcaggcgccgctccgctggggattgctatgctatgccttgtatgactaagacctcttaccaagaatacgtgtcagaccataaaaccactgccaaggagtgcgggggtggcaatgaaacagcccaacaggaaaaggaagcttaatatggattccaaagagcgtttggatcaggacggacgcttggagcaagctgaagaggaaaagaagcccaaggatagcacaacccctttgagtcacgtcccttcagcggctgcacagggagcatggtcttgggagtggtacttgaaagaacagaaggctgtcgcagcacctgttgagctgttttccaaggatcagtcctttccagagcatgaaaatggttttcagattggaatgagattagaaggcattgatccccgacatccatcggtattctgtgtgctttctgtagcggaggtttgtggttaccgtctaagacttcattttgatggttatttaagttgctatgatttttggaccaatgctggttcccctgacattcatccagtaggatggtgtgaaaagaccaaacatgaactgcacatccctaagggttatagaaaagataaatttgtttggatggattacttgaaggcctgcaaattgcaaaatgctccaaagaaattattcagaaacagaagtcctaatgggccaatgtctaaagaatttcaggttggaatgaagctggaggccgtggacaggaagaacccttccttggtgtgtgtggcgaccatagcagatattgttgaagatcgcttactagtgcattttgacaactgggatgatagttacgattactggtgcgatgttaatagcccttatgtccagccagttggttggtgtcaggagaatggaagaactctgatagcaccccaaggttatcccaatccagaaaatttttcctggacagaatacctggaagctactcaaaccaatgcagttcctgccaaagtttttaaaatgaggttgcctcatggttttctgccaaatatgaaacttgaagttgtggataaacggaaccccaggttaattcgtgttgctacgattgtagatgttgatgaccaaagagtaaaggttcattttgatggttgggaccataagtatgactactgggtggaggcagacagccctgatatccacccgatcggatggtgtgatgtcacagggcatccactggaagtgccacagcgaacgaatgacctgaagatccttccaggtcaagctgtctgtcctactcccgggtgccgaggaataggccatatccgtggtccacgttattcgggacatcacagtgcttttggctgcccgtattcagacatgaacttgaaaaaggaggcaacacttcacgatcgtttgagagaacaaacacaggcaaatttggaatcagactcttcacattcaaaatcaaaaagcctctgtagtttgaacttcaatggaaaacatgaaaaggtgaacagtcagcccagacttgtacagcaggcaaagtgtttgaaaatcaaaggaaaagaagatattgacttggataatctcttcagagaatactcggtggagcaggcgcagcaggtgcttcaccagtcagtgtccatgtccacggtgtcagcccacccttttcgggaccttcccctcggcagggagcaacactgcaagttgcttccaggcgtggctgacatccgggccagccaagtggcacgttggactgtggatgaggtggctgagtttgtacagtctcttctgggctgtgaagagcatgccaagtgctttaagaaagagcagatcgatggcaaagccttcctgcttctgacacagacggacattgtcaaagtgatgaagatcaaactgggcccagcactgaagatttacaactctatcctgatgttcaggcattcccaggaactccctgaagaagatattgcctcaggccaagaagtcaggggatgaatgggctccctgaacttcctctggcaccaagacctgcgctctttcagcaataaaagtggagcacattaatttgatgtgaatgtccccatggccgtatccacactgaatctggactttttaaagtgtctgtgatttgtttacatgtttagaggattttgatgactggtccagtgccaatgactcagaggcttaggcccatctgtgggtttggtttacgaacattgttatctttggtgggatccgctcagctctgatttgtttgcaagacagaccaaagaagcccacacatccacctttattcttctccgtcaccagaaaagaaaccattttccatcttacaagcataacactctcaagtggtgaaatattagaaaagcagtgttcatgaatacatcgttaatgtttttaccagagcaacatcgagcttggctcagatctgccatggagcacagctagtctaagagctagaggcctggtgctttcaaaagacttcatgtgagatttttgtgtactttactcaggaaagtgtgaatctctaaaaaataataataataagcacatgttttcatgattcattaattctcctttttgttccattaaccatttcttggttgtgctcccaagctttcctggagcctccacaaaggagagtagccaggagtaatgagaggacggtcaggtgggcacttccaaaagctggagagacccttctgaggaccctccaccatcagcggggcctcaggggaccctgtcctaacactggtgtggctgctgggccagacgctcacctgcacagaactcctccctgctcccactctgaagggcgtttcagaattgactcatttccactgcagtctgccagaacccctgtaataaggagctgtgttatattacatctggggctgtgtgcatctttacaaatggagacacactattcaaagggaagatctctaaagtagggagcgtggtacttattctttgtttgaaacattccgatttgttgtcaggccttatttgttttttgtaagtgattgtatcggaggcttaagttgtgtggaatcagtcccacagtgttgaaagacaagtacctcttttctgacacttcttactacttttacaggtagtaacagctacaaatactctcccagaagtggagggacaccatttgtgggtggggagaaagagggagaggttctatgtccacttgcttcattaagaatgttaaggtttaagaaagttgattctgcttggagaatttctcaagctttacatttttttttcactgaagaaaataaacaaactctaagaggtgtgcatatataacatttctttagatctttacctaaaaggaattttaatatattattggttgatgtaaattttgtttctgtggagttttgtttgttttgctttttgtagactgccatgtgcaagtaaaattcctgcttctgccatgttaaaattttaatatattttaaatgataataaacagagaaaacaaaatttatacctca

SEQ ID NO: 147177 - DNA, 4534 bp, Homo sapiens
  Payload ID: 9113
  Gene Symbol: L3MBTL4
  Gene Name: l(3)mbt-like 4 (Drosophila)
  Uniprot ID: Q8NA19
  ENST ID: ENST00000400104
  CDS Start-End: 202-1806
gggcaccgcggggcagcggcgccgcagcctgggctggcggaacctcgcgctccgactcgccccccgcctgtagctcggtcggcgttgcgggcaggcgccgctccgctggggattgctatgctatgccttgtatgactaagacctcttaccaagaatacgtgtcagaccataaaaccactgccaaggagtgcgggggtggcaatgaaacagcccaacaggaaaaggaagcttaatatggattccaaagagcgtttggatcaggacggacgcttggagcaagctgaagaggaaaagaagcccaaggatagcacaacccctttgagtcacgtcccttcagcggctgcacagggagcatggtcttgggagtggtacttgaaagaacagaaggctgtcgcagcacctgttgagctgttttccaaggatcagtcctttccagagcatgaaaatggttttcagattggaatgagattagaaggcattgatccccgacatccatcggtattctgtgtgctttctgtagcggaggtttgtggttaccgtctaagacttcattttgatggttatttaagttgctatgatttttggaccaatgctggttcccctgacattcatccagtaggatggtgtgaaaagaccaaacatgaactgcacatccctaagggttatagaaaagataaatttgtttggatggattacttgaaggcctgcaaattgcaaaatgctccaaagaaattattcagaaacagaagtcctaatgggccaatgtctaaagaatttcaggttggaatgaagctggaggccgtggacaggaagaacccttccttggtgtgtgtggcgaccatagcagatattgttgaagatcgcttactagtgcattttgacaactgggatgatagttacgattactggtgcgatgttaatagcccttatgtccagccagttggttggtgtcaggagaatggaagaactctgatagcaccccaaggttatcccaatccagaaaatttttcctggacagaatacctggaagctactcaaaccaatgcagttcctgccaaagtttttaaaatgaggttgcctcatggttttctgccaaatatgaaacttgaagttgtggataaacggaaccccaggttaattcgtgttgctacgattgtagatgttgatgaccaaagagtaaaggttcattttgatggttgggaccataagtatgactactgggtggaggcagacagccctgatatccacccgatcggatggtgtgatgtcacagggcatccactggaagtgccacagcgaacgaatgacctgaagatccttccaggtcaagctgtctgtcctactcccgggtgccgaggaataggccatatccgtggtccacgttattcgggacatcacagtgcttttggctgcccgtattcagacatgaacttgaaaaaggaggcaacacttcacgatcgtttgagagaacaaacacaggcaaatttggaatcagactcttcacattcaaaatcaaaaagcctctgtagtttgaacttcaatggaaaacatgaaaaggtgaacagtcagcccagacttgtacagcaggcaaagtgtttgaaaatcaaaggaaaagaagatattgacttggataatctcttcagaggccgagtgcggtggctcatgcctgtaatcccagcactttgggaggccgaggcaggcagatcacgagatcaggagatcaagaccatcctggccaacgcagtgaaaccccgtctctaccaaaaatacaaaaaattagccaggcgtggtggcgggtgcctatagtcccacctactggggaagctgaggcaggagaattgcttgaacctgggaggcagagattacactgacctgagattgcaccactgcactccagcctgggcaacagagcaagactccgtctcaaaaaaaaaaagaaagaaagaaaaaatggtggaaagggtggagaaattccttttaatgggtacaaaccacacaatgcaggtgaccattactctaaaagcccaggcttcatcactatgcaatatatctgtgtaacaaaactgtacttgtgcctgctaaatctgtgaaattaaaaaaaaaaaaaaaccatgaatctgatttgcctttagtcaccagatgactgcagataggcacacagaggtgtgagacagcactttccatttgcccttcatctcttgttcctctgccattccccatgaagccgtgctggggctgacctgctggaggatgagacctgtgaagctgagtcagctgccctggtcatcccagccaaggccatgtcctctctgctcagccaacaactgtccaacaaacatgtgaatgagccctgctgaaatcagaactgaccggcccacctgagcctaaattcctgacaaacagatgtgtgaactaagtaaatacttaaaaaaatgagatgctgatggtccctgaatttctcaagaggcaaagaatggtcccacctcgcaacttataaatgttcagaagttagacggccacaaagaagtagcacctcatatacattctcttgctatctacaataaggtgaaggaaggcatttatcttctctgcaaccagaaaacctataacccaaatgcccaggaacacaagaacactgttcaccattctgctgtgcttattagcagaagatatatcagctcacaaaatcccctttgaaacagaaactaaaataatgctcaatgatcattctactcccacgggggaggagggagaggagcataaatcaggacaagagctgggtttagaacttggatcacgtgtggcttttctccatgatcacaaaccccagcttcctataattaataattggatgtattaagtgttttatggagcagtccagccagagagcaactataaaatggaaacatggaccagcttggtaaagggaaagatgaaattgtagaattaatttgtttgttcgttcattgagtatttcataacaataaacttattgtatttataaagggaaaaacctctgggtgtaatttggctgcctggttgtttatatcctacagtgcagtttcagtatgtttcatgttagtgtgcctgttttaaaatgttttacttcattatcgtaagacgtttttaatgcaatgaaacttcaagccagaaaaatcttagaaaattaacgaaatagggagtagagagaaatggagatagcattaaactaaatacaaagaaaaaattgaaacaaatttttttatttgacaaaaattagccgggtgtggtggcaggcacctgtaatcccagctactcaggaagctgaggcgagagaatcgcttgaacctgggaggtggaggcagtgagctgagatcgtgccactgtacatcaccagcctgggcgacagagtgagactccttctccaaaaaaaaaaaaaagagtctcttcattaaaataaacctaatacttcacttgtttagtaaagcaatgcaaattaatacctgatgataaagtcagaagatgtatatatgtttgtgttcctgctttctttcatttcacagtctaattctcccagactaggatttttgctagctatttgttctatcacccagaattttgagaaggcttaaaagcatattattgatttgtgcatttggtgcaaaattcaacaggtataagggggtatctctccctgaacctgatcctcagccttcagtttcctcccttggaataatcactgtatacttctcttgtgtgtctttctaaaaatatgttctgtttatttaaatatatgtgtgtatgtgtatttacacaagtgatggcataccacatacattgttaaacagtttcctcgtgtcctttagcaataaaatctgacgagcagttcttaacacatggagcggcacactataagtgaccagtccctgcccatggccatctggatggttttcatgttgctgtgtaaaggaggcttcaaagtgtcttctgtaggtgtcagcttgactggaaaataaaaagtgtcttctgtactcatcactcatgcttgtgagaatctacaggatagattctgtgtgtgaatctatcctattctaatccttttcggcatttcctcagctacccttactcgttcatttttccaaatgaactttaatatcagtttttctggtacaacttttttccattccagttggttaatttttggattgcaataaatttatgatttaacttttaattttaccctttgtgaacttgaccatagtaagctgttcccatactcaaatatttcctgtcctgtaattgcattttaagttttcctttatgtagaacttgcgtccttcttacgaagtttattcctaagcagtttatcgtttttgttgctgcaataaatggacgtatttcttccttgatgtcctccacctaagattgtctgtatggaaagattgtatatttctgtgtattacatttaatcctgccactgtaatctcttctaatttgtaatttttttcatgtaattattttgggtttctaggtaaataaacatgtcacctacaaa

SEQ ID NO: 147178 - DNA, 3546 bp, Homo sapiens
  Payload ID: 9113
  Gene Symbol: L3MBTL4
  Gene Name: l(3)mbt-like 4 (Drosophila)
  Uniprot ID: Q8NA19
  ENST ID: ENST00000400105
  CDS Start-End: 161-2032
gtgctctgactttaggtcgggtggcttctggggccttctgaggaacatgcacaagctgctacagctactgattgctatgctatgccttgtatgactaagacctcttaccaagaatacgtgtcagaccataaaaccactgccaaggagtgcgggggtggcaatgaaacagcccaacaggaaaaggaagcttaatatggattccaaagagcgtttggatcaggacggacgcttggagcaagctgaagaggaaaagaagcccaaggatagcacaacccctttgagtcacgtcccttcagcggctgcacagggagcatggtcttgggagtggtacttgaaagaacagaaggctgtcgcagcacctgttgagctgttttccaaggatcagtcctttccagagcatgaaaatggttttcagattggaatgagattagaaggcattgatccccgacatccatcggtattctgtgtgctttctgtagcggaggtttgtggttaccgtctaagacttcattttgatggttatttaagttgctatgatttttggaccaatgctggttcccctgacattcatccagtaggatggtgtgaaaagaccaaacatgaactgcacatccctaagggttatagaaaagataaatttgtttggatggattacttgaaggcctgcaaattgcaaaatgctccaaagaaattattcagaaacagaagtcctaatgggccaatgtctaaagaatttcaggttggaatgaagctggaggccgtggacaggaagaacccttccttggtgtgtgtggcgaccatagcagatattgttgaagatcgcttactagtgcattttgacaactgggatgatagttacgattactggtgcgatgttaatagcccttatgtccagccagttggttggtgtcaggagaatggaagaactctgatagcaccccaaggttatcccaatccagaaaatttttcctggacagaatacctggaagctactcaaaccaatgcagttcctgccaaagtttttaaaatgaggttgcctcatggttttctgccaaatatgaaacttgaagttgtggataaacggaaccccaggttaattcgtgttgctacgattgtagatgttgatgaccaaagagtaaaggttcattttgatggttgggaccataagtatgactactgggtggaggcagacagccctgatatccacccgatcggatggtgtgatgtcacagggcatccactggaagtgccacagcgaacgaatgacctgaagatccttccaggtcaagctgtctgtcctactcccgggtgccgaggaataggccatatccgtggtccacgttattcgggacatcacagtgcttttggctgcccgtattcagacatgaacttgaaaaaggaggcaacacttcacgatcgtttgagagaacaaacacaggcaaatttggaatcagactcttcacattcaaaatcaaaaagcctctgtagtttgaacttcaatggaaaacatgaaaaggtgaacagtcagcccagacttgtacagcaggcaaagtgtttgaaaatcaaaggaaaagaagatattgacttggataatctcttcagagtgcttgtgctgcatcccagaggtttggaatactcggtggagcaggcgcagcaggtgcttcaccagtcagtgtccatgtccacggtgtcagcccacccttttcgggaccttcccctcggcagggagcaacactgcaagttgcttccaggcgtggctgacatccgggccagccaagtggcacgttggactgtggatgaggtggctgagtttgtacagtctcttctgggctgtgaagagcatgccaagtgctttaagaaagagcagatcgatggcaaagccttcctgcttctgacacagacggacattgtcaaagtgatgaagatcaaactgggcccagcactgaagatttacaactctatcctgatgttcaggcattcccaggaactccctgaagaagatattgcctcaggccaagaagtcaggggatgaatgggctccctgaacttcctctggcaccaagacctgcgctctttcagcaataaaagtggagcacattaatttgatgtgaatgtccccatggccgtatccacactgaatctggactttttaaagtgtctgtgatttgtttacatgtttagaggattttgatgactggtccagtgccaatgactcagaggcttaggcccatctgtgggtttggtttacgaacattgttatctttggtgggatccgctcagctctgatttgtttgcaagacagaccaaagaagcccacacatccacctttattcttctccgtcaccagaaaagaaaccattttccatcttacaagcataacactctcaagtggtgaaatattagaaaagcagtgttcatgaatacatcgttaatgtttttaccagagcaacatcgagcttggctcagatctgccatggagcacagctagtctaagagctagaggcctggtgctttcaaaagacttcatgtgagatttttgtgtactttactcaggaaagtgtgaatctctaaaaaataataataataagcacatgttttcatgattcattaattctcctttttgttccattaaccatttcttggttgtgctcccaagctttcctggagcctccacaaaggagagtagccaggagtaatgagaggacggtcaggtgggcacttccaaaagctggagagacccttctgaggaccctccaccatcagcggggcctcaggggaccctgtcctaacactggtgtggctgctgggccagacgctcacctgcacagaactcctccctgctcccactctgaagggcgtttcagaattgactcatttccactgcagtctgccagaacccctgtaataaggagctgtgttatattacatctggggctgtgtgcatctttacaaatggagacacactattcaaagggaagatctctaaagtagggagcgtggtacttattctttgtttgaaacattccgatttgttgtcaggccttatttgttttttgtaagtgattgtatcggaggcttaagttgtgtggaatcagtcccacagtgttgaaagacaagtacctcttttctgacacttcttactacttttacaggtagtaacagctacaaatactctcccagaagtggagggacaccatttgtgggtggggagaaagagggagaggttctatgtccacttgcttcattaagaatgttaaggtttaagaaagttgattctgcttggagaatttctcaagctttacatttttttttcactgaagaaaataaacaaactctaagaggtgtgcatatataacatttctttagatctttacctaaaaggaattttaatatattattggttgatgtaaattttgtttctgtggagttttgtttgttttgctttttgtagactgccatgtgcaagtaaaattcctgcttctgccatgttaaaattttaatatattttaaatgataataaacagagaaaacaaaatttatacctca

SEQ ID NO: 147179 - DNA, 549 bp, Homo sapiens
  Payload ID: 9113
  Gene Symbol: L3MBTL4
  Gene Name: l(3)mbt-like 4 (Drosophila)
  ENST ID: ENST00000583809
  CDS Start-End: 182-549
aagaaggacgccgccgcccgcgtgggatggtcgcgagcccgcgtgggtgcccacggccgccgccgcgcggggtggccccatccccgggcagattgctatgctatgccttgtatgactaagacctcttaccaagaatacgtgtcagaccataaaaccactgccaaggagtgcgggggtggcaatgaaacagcccaacaggaaaaggaagcttaatatggattccaaagagcgtttggatcaggacggacgcttggagcaagctgaagaggaaaagaagcccaaggatagcacaacccctttgagtcacgtcccttcagcggctgcacagggagcatggtcttgggagtggtacttgaaagaacagaaggctgtcgcagcacctgttgagctgttttccaaggatcagtcctttccagagcatgaaaatggttttcagattggaatgagattagaaggcattgatccccgacatccatcggtattctgtgtgctttctgtagcggaggtttgtggttaccgtctaagacttcattttgatggttatttaag

SEQ ID NO: 147180 - DNA, 568 bp, Homo sapiens
  Payload ID: 9113
  Gene Symbol: L3MBTL4
  Gene Name: l(3)mbt-like 4 (Drosophila)
  ENST ID: ENST00000581231
  CDS Start-End: 328-568
agacggtgaaccccaagagctgggatgaagcatgggtgagctactgggacttcgctgccagggagcaagctggcaggcaggaagtagccaagatttgggggaatccttcccagggaacgaatacagagaaggacgcatctgaaaattccgccgcagccacctccctcccatgggaaagccccgacctcggcgggcccagcgccacccggctccccggggtgtggaacactgagcgagattgctatgctatgccttgtatgactaagacctcttaccaagaatacgtgtcagaccataaaaccactgccaaggagtgcgggggtggcaatgaaacagcccaacaggaaaaggaagcttaatatggattccaaagagcgtttggatcaggacggacgcttggagcaagctgaagaggaaaagaagcccaaggatagcacaacccctttgagtcacgtcccttcagcggctgcacagggagcatggtcttgggagtggtacttgaaagaacagaaggctgtcgcagcacctgttgagctgttttccaaggatcagtcctttccagagcatg

SEQ ID NO: 147181 - DNA, 1002 bp, Homo sapiens
  Payload ID: 9113
  Gene Symbol: L3MBTL4
  Gene Name: l(3)mbt-like 4 (Drosophila)
  ENST ID: ENST00000583054
  CDS Start-End: 377-1002
tgcagttggatatgacaagtatgcacaactagctgatgacatctcatagcccagagtgggaagcagcctttcctcctctactcatcatccatctctcttactcatagaaccctgctttcctttatgggaattatgagagaagacttagggttttccaggaggcagatcctccatttccccatggctttgtccaagagtgcaggaagaagatctaagattggtcaattggatgctctttcccaggactttggcttgagggacagagactctagcaagaagggaacagattgctatgctatgccttgtatgactaagacctcttaccaagaatacgtgtcagaccataaaaccactgccaaggagtgcgggggtggcaatgaaacagcccaacaggaaaaggaagcttaatatggattccaaagagcgtttggatcaggacggacgcttggagcaagctgaagaggaaaagaagcccaaggatagcacaacccctttgagtcacgtcccttcagcggctgcacagggagcatggtcttgggagtggtacttgaaagaacagaaggctgtcgcagcacctgttgagctgttttccaaggatcagtcctttccagagcatgaaaatggttttcagattggaatgagattagaaggcattgatccccgacatccatcggtattctgtgtgctttctgtagcggaggtttgtggttaccgtctaagacttcattttgatggttatttaagttgctatgatttttggaccaatgctggttcccctgacattcatccagtaggatggtgtgaaaagaccaaacatgaactgcacatccctaagggttatagaaaagataaatttgtttggatggattacttgaaggcctgcaaattgcaaaatgctccaaagaaattattcagaaacagaagtcctaatgggccaatgtctaaagaatttcaggttggaatgaagctggaggccgtggacaggaagaacccttccttggt

SEQ ID NO: 147182 - DNA, 5004 bp, Homo sapiens
  Payload ID: 9114
  Gene Symbol: L1CAM
  Gene Name: L1 cell adhesion molecule
  Uniprot ID: P32004
  ENST ID: ENST00000361981
  CDS Start-End: 109-3855
tgcccccactcccaactcccgccccaagccgcccaccagcccccttcccctccggccggagcctgaaccgagcccggctggctgtgctgcgcggtgccgccgggaaagatggtcgtggcgctgcggtacgtgtggcctctcctcctctgcagcccctgcctgcttatccagatccccgaggaattgatggagccacctgtcatcacggaacagtctccacggcgcctggttgtcttccccacagatgacatcagcctcaagtgtgaggccagtggcaagcccgaagtgcagttccgctggacgagggatggtgtccacttcaaacccaaggaagagctgggtgtgaccgtgtaccagtcgccccactctggctccttcaccatcacgggcaacaacagcaactttgctcagaggttccagggcatctaccgctgctttgccagcaataagctgggcaccgccatgtcccatgagatccggctcatggccgagggtgcccccaagtggccaaaggagacagtgaagcccgtggaggtggaggaaggggagtcagtggttctgccttgcaaccctcccccaagtgcagagcctctccggatctactggatgaacagcaagatcttgcacatcaagcaggacgagcgggtgacgatgggccagaacggcaacctctactttgccaatgtgctcacctccgacaaccactcagactacatctgccacgcccacttcccaggcaccaggaccatcattcagaaggaacccattgacctccgggtcaaggccaccaacagcatgattgacaggaagccgcgcctgctcttccccaccaactccagcagccacctggtggccttgcaggggcagccattggtcctggagtgcatcgccgagggctttcccacgcccaccatcaaatggctgcgccccagtggccccatgccagccgaccgtgtcacctaccagaaccacaacaagaccctgcagctgctgaaagtgggcgaggaggatgatggcgagtaccgctgcctggccgagaactcactgggcagtgcccggcatgcgtactatgtcaccgtggaggctgccccgtactggctgcacaagccccagagccatctatatgggccaggagagactgcccgcctggactgccaagtccagggcaggccccaaccagaggtcacctggagaatcaacgggatccctgtggaggagctggccaaagaccagaagtaccggattcagcgtggcgccctgatcctgagcaacgtgcagcccagtgacacaatggtgacccaatgtgaggcccgcaaccggcacgggctcttgctggccaatgcctacatctacgttgtccagctgccagccaagatcctgactgcggacaatcagacgtacatggctgtccagggcagcactgcctaccttctgtgcaaggccttcggagcgcctgtgcccagtgttcagtggctggacgaggatgggacaacagtgcttcaggacgaacgcttcttcccctatgccaatgggaccctgggcattcgagacctccaggccaatgacaccggacgctacttctgcctggctgccaatgaccaaaacaatgttaccatcatggctaacctgaaggttaaagatgcaactcagatcactcaggggccccgcagcacaatcgagaagaaaggttccagggtgaccttcacgtgccaggcctcctttgacccctccttgcagcccagcatcacctggcgtggggacggtcgagacctccaggagcttggggacagtgacaagtacttcatagaggatgggcgcctggtcatccacagcctggactacagcgaccagggcaactacagctgcgtggccagtaccgaactggatgtggtggagagtagggcacagctcttggtggtggggagccctgggccggtgccacggctggtgctgtccgacctgcacctgctgacgcagagccaggtgcgcgtgtcctggagtcctgcagaagaccacaatgcccccattgagaaatatgacattgaatttgaggacaaggaaatggcgcctgaaaaatggtacagtctgggcaaggttccagggaaccagacctctaccaccctcaagctgtcgccctatgtccactacacctttagggttactgccataaacaaatatggccccggggagcccagcccggtctctgagactgtggtcacacctgaggcagccccagagaagaaccctgtggatgtgaagggggaaggaaatgagaccaccaatatggtcatcacgtggaagccgctccggtggatggactggaacgccccccaggttcagtaccgcgtgcagtggcgccctcaggggacacgagggccctggcaggagcagattgtcagcgaccccttcctggtggtgtccaacacgtccaccttcgtgccctatgagatcaaagtccaggccgtcaacagccagggcaagggaccagagccccaggtcactatcggctactctggagaggactacccccaggcaatccctgagctggaaggcattgaaatcctcaactcaagtgccgtgctggtcaagtggcggccggtggacctggcccaggtcaagggccacctccgcggatacaatgtgacgtactggagggagggcagtcagaggaagcacagcaagagacatatccacaaagaccatgtggtggtgcccgccaacaccaccagtgtcatcctcagtggcttgcggccctatagctcctaccacctggaggtgcaggcctttaacgggcgaggatcggggcccgccagcgagttcaccttcagcaccccagagggagtgcctggccaccccgaggcgttgcacctggagtgccagtcgaacaccagcctgctgctgcgctggcagcccccactcagccacaacggcgtgctcaccggctacgtgctctcctaccaccccctggatgaggggggcaaggggcaactgtccttcaaccttcgggaccccgaacttcggacacacaacctgaccgatctcagcccccacctgcggtaccgcttccagcttcaggccaccaccaaagagggccctggtgaagccatcgtacgggaaggaggcactatggccttgtctgggatctcagattttggcaacatctcagccacagcgggtgaaaactacagtgtcgtctcctgggtccccaaggagggccagtgcaacttcaggttccatatcttgttcaaagccttgggagaagagaagggtggggcttccctttcgccacagtatgtcagctacaaccagagctcctacacgcagtgggacctgcagcctgacactgactacgagatccacttgtttaaggagaggatgttccggcaccaaatggctgtgaagaccaatggcacaggccgcgtgaggctccctcctgctggcttcgccactgagggctggttcatcggctttgtgagtgccatcatcctcctgctcctcgtcctgctcatcctctgcttcatcaagcgcagcaagggcggcaaatactcagtgaaggataaggaggacacccaggtggactctgaggcccgaccgatgaaagatgagaccttcggcgagtacagtgacaacgaggagaaggcctttggcagcagccagccatcgctcaacggggacatcaagcccctgggcagtgacgacagcctggccgattatgggggcagcgtggatgttcagttcaacgaggatggttcgttcattggccagtacagtggcaagaaggagaaggaggcggcagggggcaatgacagctcaggggccacttcccccatcaaccctgccgtggccctagaatagtggagtccaggacaggagatgctgtgcccctggccttgggatccaggcccctccctctccagcaggcccatgggaggctggagttggggcagaggagaacttgctgcctcggatccccttcctaccacccggtccccactttattgccaaaacccagctgcaccccttcctgggcacacgctgctctgccccagcttgggcagatctcccacatgccaggggcctttgggtgctgttttgccagcccatttgggcagagaggctgtggtttgggggagaagaagtaggggtggcccgaaagggtctccgaaatgctgtctttcttgctccctgactgggggcagacatggtggggtctcctcaggaccagggttggcaccttccccctcccccagccactccccagccagcctggctgggactgggaacagaactcggtgtccccaccatctgctgtcttttctttgccatctctgctccaaccgggatgggagccgggcaaactggccgcgggggcaggggaggccatctggagagcccagagtccccccactcccagcatcgcactctggcagcaccgcctcttcccgccgcccagcccaccccatggccggctttcaggagctccatacacacgctgccttcggtacccaccacacaacatccaagtggcctccgtcactacctggctgcggggcgggcacacctcctcccactgcccactggccggcctcttccagccgcccccaccccccaggaccccttagcagccctgccctccctatcgtctgaacagttgtcttcctcagcctcctcccgcccccaccttgggaatgtaaatacaccgtgactttgaaagtttgtacccctgtccttccctttacgccactagtgtgtaggcagatgtctgagtccctaggtggtttctaggattgatagcaattagctttgatgaacccatcccaggaaaaataaaaacagacaaaaaaaaaggaaagattggttctcccagcactgctcagcagccacagcctccctgtatgcctgtgcttggtctactgataagccctctacaaaaaaacaaaagtatatatatatatgtacataatatcagaattataacaggcaaataaaacctgaaaatcaaga

SEQ ID NO: 147183 - DNA, 3888 bp, Homo sapiens
  Payload ID: 9114
  Gene Symbol: L1CAM
  Gene Name: L1 cell adhesion molecule
  Uniprot ID: P32004
  ENST ID: ENST00000361699
  CDS Start-End: 12-3773
cgccgggaaagatggtcgtggcgctgcggtacgtgtggcctctcctcctctgcagcccctgcctgcttatccagatccccgaggaatatgaaggacaccatgtgatggagccacctgtcatcacggaacagtctccacggcgcctggttgtcttccccacagatgacatcagcctcaagtgtgaggccagtggcaagcccgaagtgcagttccgctggacgagggatggtgtccacttcaaacccaaggaagagctgggtgtgaccgtgtaccagtcgccccactctggctccttcaccatcacgggcaacaacagcaactttgctcagaggttccagggcatctaccgctgctttgccagcaataagctgggcaccgccatgtcccatgagatccggctcatggccgagggtgcccccaagtggccaaaggagacagtgaagcccgtggaggtggaggaaggggagtcagtggttctgccttgcaaccctcccccaagtgcagagcctctccggatctactggatgaacagcaagatcttgcacatcaagcaggacgagcgggtgacgatgggccagaacggcaacctctactttgccaatgtgctcacctccgacaaccactcagactacatctgccacgcccacttcccaggcaccaggaccatcattcagaaggaacccattgacctccgggtcaaggccaccaacagcatgattgacaggaagccgcgcctgctcttccccaccaactccagcagccacctggtggccttgcaggggcagccattggtcctggagtgcatcgccgagggctttcccacgcccaccatcaaatggctgcgccccagtggccccatgccagccgaccgtgtcacctaccagaaccacaacaagaccctgcagctgctgaaagtgggcgaggaggatgatggcgagtaccgctgcctggccgagaactcactgggcagtgcccggcatgcgtactatgtcaccgtggaggctgccccgtactggctgcacaagccccagagccatctatatgggccaggagagactgcccgcctggactgccaagtccagggcaggccccaaccagaggtcacctggagaatcaacgggatccctgtggaggagctggccaaagaccagaagtaccggattcagcgtggcgccctgatcctgagcaacgtgcagcccagtgacacaatggtgacccaatgtgaggcccgcaaccggcacgggctcttgctggccaatgcctacatctacgttgtccagctgccagccaagatcctgactgcggacaatcagacgtacatggctgtccagggcagcactgcctaccttctgtgcaaggccttcggagcgcctgtgcccagtgttcagtggctggacgaggatgggacaacagtgcttcaggacgaacgcttcttcccctatgccaatgggaccctgggcattcgagacctccaggccaatgacaccggacgctacttctgcctggctgccaatgaccaaaacaatgttaccatcatggctaacctgaaggttaaagatgcaactcagatcactcaggggccccgcagcacaatcgagaagaaaggttccagggtgaccttcacgtgccaggcctcctttgacccctccttgcagcccagcatcacctggcgtggggacggtcgagacctccaggagcttggggacagtgacaagtacttcatagaggatgggcgcctggtcatccacagcctggactacagcgaccagggcaactacagctgcgtggccagtaccgaactggatgtggtggagagtagggcacagctcttggtggtggggagccctgggccggtgccacggctggtgctgtccgacctgcacctgctgacgcagagccaggtgcgcgtgtcctggagtcctgcagaagaccacaatgcccccattgagaaatatgacattgaatttgaggacaaggaaatggcgcctgaaaaatggtacagtctgggcaaggttccagggaaccagacctctaccaccctcaagctgtcgccctatgtccactacacctttagggttactgccataaacaaatatggccccggggagcccagcccggtctctgagactgtggtcacacctgaggcagccccagagaagaaccctgtggatgtgaagggggaaggaaatgagaccaccaatatggtcatcacgtggaagccgctccggtggatggactggaacgccccccaggttcagtaccgcgtgcagtggcgccctcaggggacacgagggccctggcaggagcagattgtcagcgaccccttcctggtggtgtccaacacgtccaccttcgtgccctatgagatcaaagtccaggccgtcaacagccagggcaagggaccagagccccaggtcactatcggctactctggagaggactacccccaggcaatccctgagctggaaggcattgaaatcctcaactcaagtgccgtgctggtcaagtggcggccggtggacctggcccaggtcaagggccacctccgcggatacaatgtgacgtactggagggagggcagtcagaggaagcacagcaagagacatatccacaaagaccatgtggtggtgcccgccaacaccaccagtgtcatcctcagtggcttgcggccctatagctcctaccacctggaggtgcaggcctttaacgggcgaggatcggggcccgccagcgagttcaccttcagcaccccagagggagtgcctggccaccccgaggcgttgcacctggagtgccagtcgaacaccagcctgctgctgcgctggcagcccccactcagccacaacggcgtgctcaccggctacgtgctctcctaccaccccctggatgaggggggcaaggggcaactgtccttcaaccttcgggaccccgaacttcggacacacaacctgaccgatctcagcccccacctgcggtaccgcttccagcttcaggccaccaccaaagagggccctggtgaagccatcgtacgggaaggaggcactatggccttgtctgggatctcagattttggcaacatctcagccacagcgggtgaaaactacagtgtcgtctcctgggtccccaaggagggccagtgcaacttcaggttccatatcttgttcaaagccttgggagaagagaagggtggggcttccctttcgccacagtatgtcagctacaaccagagctcctacacgcagtgggacctgcagcctgacactgactacgagatccacttgtttaaggagaggatgttccggcaccaaatggctgtgaagaccaatggcacaggccgcgtgaggctccctcctgctggcttcgccactgagggctggttcatcggctttgtgagtgccatcatcctcctgctcctcgtcctgctcatcctctgcttcatcaagcgcagcaagggcggcaaatactcagtgaaggataaggaggacacccaggtggactctgaggcccgaccgatgaaagatgagaccttcggcgagtacagtgacaacgaggagaaggcctttggcagcagccagccatcgctcaacggggacatcaagcccctgggcagtgacgacagcctggccgattatgggggcagcgtggatgttcagttcaacgaggatggttcgttcattggccagtacagtggcaagaaggagaaggaggcggcagggggcaatgacagctcaggggccacttcccccatcaaccctgccgtggccctagaatagtggagtccaggacaggagatgctgtgcccctggccttgggatccaggcccctccctctccagcaggcccatgggaggctggagttggggcagaggagaacttgctgcctcggatc

SEQ ID NO: 147184 - DNA, 4655 bp, Homo sapiens
  Payload ID: 9114
  Gene Symbol: L1CAM
  Gene Name: L1 cell adhesion molecule
  Uniprot ID: P32004
  ENST ID: ENST00000370055
  CDS Start-End: 199-3945
catcggcatcgcagacgcgctcgggcggcgggtccgaggccggcgtgcgcggaggctgggcgggcagcccgagcggtggccgcagcgcagtgcccccactcccaactcccgccccaagccgcccaccagcccccttcccctccggccggagcctgaaccgagcccggctggctgtgctgcgcggtgccgccgggaaagatggtcgtggcgctgcggtacgtgtggcctctcctcctctgcagcccctgcctgcttatccagatccccgaggaattgatggagccacctgtcatcacggaacagtctccacggcgcctggttgtcttccccacagatgacatcagcctcaagtgtgaggccagtggcaagcccgaagtgcagttccgctggacgagggatggtgtccacttcaaacccaaggaagagctgggtgtgaccgtgtaccagtcgccccactctggctccttcaccatcacgggcaacaacagcaactttgctcagaggttccagggcatctaccgctgctttgccagcaataagctgggcaccgccatgtcccatgagatccggctcatggccgagggtgcccccaagtggccaaaggagacagtgaagcccgtggaggtggaggaaggggagtcagtggttctgccttgcaaccctcccccaagtgcagagcctctccggatctactggatgaacagcaagatcttgcacatcaagcaggacgagcgggtgacgatgggccagaacggcaacctctactttgccaatgtgctcacctccgacaaccactcagactacatctgccacgcccacttcccaggcaccaggaccatcattcagaaggaacccattgacctccgggtcaaggccaccaacagcatgattgacaggaagccgcgcctgctcttccccaccaactccagcagccacctggtggccttgcaggggcagccattggtcctggagtgcatcgccgagggctttcccacgcccaccatcaaatggctgcgccccagtggccccatgccagccgaccgtgtcacctaccagaaccacaacaagaccctgcagctgctgaaagtgggcgaggaggatgatggcgagtaccgctgcctggccgagaactcactgggcagtgcccggcatgcgtactatgtcaccgtggaggctgccccgtactggctgcacaagccccagagccatctatatgggccaggagagactgcccgcctggactgccaagtccagggcaggccccaaccagaggtcacctggagaatcaacgggatccctgtggaggagctggccaaagaccagaagtaccggattcagcgtggcgccctgatcctgagcaacgtgcagcccagtgacacaatggtgacccaatgtgaggcccgcaaccggcacgggctcttgctggccaatgcctacatctacgttgtccagctgccagccaagatcctgactgcggacaatcagacgtacatggctgtccagggcagcactgcctaccttctgtgcaaggccttcggagcgcctgtgcccagtgttcagtggctggacgaggatgggacaacagtgcttcaggacgaacgcttcttcccctatgccaatgggaccctgggcattcgagacctccaggccaatgacaccggacgctacttctgcctggctgccaatgaccaaaacaatgttaccatcatggctaacctgaaggttaaagatgcaactcagatcactcaggggccccgcagcacaatcgagaagaaaggttccagggtgaccttcacgtgccaggcctcctttgacccctccttgcagcccagcatcacctggcgtggggacggtcgagacctccaggagcttggggacagtgacaagtacttcatagaggatgggcgcctggtcatccacagcctggactacagcgaccagggcaactacagctgcgtggccagtaccgaactggatgtggtggagagtagggcacagctcttggtggtggggagccctgggccggtgccacggctggtgctgtccgacctgcacctgctgacgcagagccaggtgcgcgtgtcctggagtcctgcagaagaccacaatgcccccattgagaaatatgacattgaatttgaggacaaggaaatggcgcctgaaaaatggtacagtctgggcaaggttccagggaaccagacctctaccaccctcaagctgtcgccctatgtccactacacctttagggttactgccataaacaaatatggccccggggagcccagcccggtctctgagactgtggtcacacctgaggcagccccagagaagaaccctgtggatgtgaagggggaaggaaatgagaccaccaatatggtcatcacgtggaagccgctccggtggatggactggaacgccccccaggttcagtaccgcgtgcagtggcgccctcaggggacacgagggccctggcaggagcagattgtcagcgaccccttcctggtggtgtccaacacgtccaccttcgtgccctatgagatcaaagtccaggccgtcaacagccagggcaagggaccagagccccaggtcactatcggctactctggagaggactacccccaggcaatccctgagctggaaggcattgaaatcctcaactcaagtgccgtgctggtcaagtggcggccggtggacctggcccaggtcaagggccacctccgcggatacaatgtgacgtactggagggagggcagtcagaggaagcacagcaagagacatatccacaaagaccatgtggtggtgcccgccaacaccaccagtgtcatcctcagtggcttgcggccctatagctcctaccacctggaggtgcaggcctttaacgggcgaggatcggggcccgccagcgagttcaccttcagcaccccagagggagtgcctggccaccccgaggcgttgcacctggagtgccagtcgaacaccagcctgctgctgcgctggcagcccccactcagccacaacggcgtgctcaccggctacgtgctctcctaccaccccctggatgaggggggcaaggggcaactgtccttcaaccttcgggaccccgaacttcggacacacaacctgaccgatctcagcccccacctgcggtaccgcttccagcttcaggccaccaccaaagagggccctggtgaagccatcgtacgggaaggaggcactatggccttgtctgggatctcagattttggcaacatctcagccacagcgggtgaaaactacagtgtcgtctcctgggtccccaaggagggccagtgcaacttcaggttccatatcttgttcaaagccttgggagaagagaagggtggggcttccctttcgccacagtatgtcagctacaaccagagctcctacacgcagtgggacctgcagcctgacactgactacgagatccacttgtttaaggagaggatgttccggcaccaaatggctgtgaagaccaatggcacaggccgcgtgaggctccctcctgctggcttcgccactgagggctggttcatcggctttgtgagtgccatcatcctcctgctcctcgtcctgctcatcctctgcttcatcaagcgcagcaagggcggcaaatactcagtgaaggataaggaggacacccaggtggactctgaggcccgaccgatgaaagatgagaccttcggcgagtacagtgacaacgaggagaaggcctttggcagcagccagccatcgctcaacggggacatcaagcccctgggcagtgacgacagcctggccgattatgggggcagcgtggatgttcagttcaacgaggatggttcgttcattggccagtacagtggcaagaaggagaaggaggcggcagggggcaatgacagctcaggggccacttcccccatcaaccctgccgtggccctagaatagtggagtccaggacaggagatgctgtgcccctggccttgggatccaggcccctccctctccagcaggcccatgggaggctggagttggggcagaggagaacttgctgcctcggatccccttcctaccacccggtccccactttattgccaaaacccagctgcaccccttcctgggcacacgctgctctgccccagcttgggcagatctcccacatgccaggggcctttgggtgctgttttgccagcccatttgggcagagaggctgtggtttgggggagaagaagtaggggtggcccgaaagggtctccgaaatgctgtctttcttgctccctgactgggggcagacatggtggggtctcctcaggaccagggttggcaccttccccctcccccagccactccccagccagcctggctgggactgggaacagaactcggtgtccccaccatctgctgtcttttctttgccatctctgctccaaccgggatgggagccgggcaaactggccgcgggggcaggggaggccatctggagagcccagagtccccccactcccagcatcgcactctggcagcaccgcctcttcccgccgcccagcccaccccatggccggctttcaggagctccatacacacgctgccttcggtacccaccacacaacatccaagtggcctccgtcactacctggctgcggggcgggcacacctcc

SEQ ID NO: 147185 - DNA, 692 bp, Homo sapiens
  Payload ID: 9114
  Gene Symbol: L1CAM
  Gene Name: L1 cell adhesion molecule
  ENST ID: ENST00000370058
  CDS Start-End: 1-462
gaagagaagggtggggcttccctttcgccacagtatgtcagctacaaccagagctcctacacgcagtgggacctgcagcctgacactgactacgagatccacttgtttaaggagaggatgttccggcaccaaatggctgtgaagaccaatggcacagtgaaggataaggaggacacccaggtggactctgaggcccgaccgatgaaagatgagaccttcggcgagtacagtgacaacgaggagaaggcctttggcagcagccagccatcgctcaacggggacatcaagcccctgggcagtgacgacagcctggccgattatgggggcagcgtggatgttcagttcaacgaggatggttcgttcattggccagtacagtggcaagaaggagaaggaggcggcagggggcaatgacagctcaggggccacttcccccatcaaccctgccgtggccctagaatagtggagtccaggacaggagatgctgtgcccctggccttgggatccaggcccctccctctccagcaggcccatgggaggctggagttggggcagaggagaacttgctgcctcggatccccttcctaccacccggtccccactttattgccaaaacccagctgcaccccttcctgggcacacgctgctctgccccagcttgggcagatctcccacatgccaggggcctttggg

SEQ ID NO: 147186 - DNA, 5113 bp, Homo sapiens
  Payload ID: 9114
  Gene Symbol: L1CAM
  Gene Name: L1 cell adhesion molecule
  Uniprot ID: P32004
  ENST ID: ENST00000370060
  CDS Start-End: 191-3964
tcgcagacgcgctcgggcggcgggtccgaggccggcgtgcgcggaggctgggcgggcagcccgagcggtggccgcagcgcagtgcccccactcccaactcccgccccaagccgcccaccagcccccttcccctccggccggagcctgaaccgagcccggctggctgtgctgcgcggtgccgccgggaaagatggtcgtggcgctgcggtacgtgtggcctctcctcctctgcagcccctgcctgcttatccagatccccgaggaatatgaaggacaccatgtgatggagccacctgtcatcacggaacagtctccacggcgcctggttgtcttccccacagatgacatcagcctcaagtgtgaggccagtggcaagcccgaagtgcagttccgctggacgagggatggtgtccacttcaaacccaaggaagagctgggtgtgaccgtgtaccagtcgccccactctggctccttcaccatcacgggcaacaacagcaactttgctcagaggttccagggcatctaccgctgctttgccagcaataagctgggcaccgccatgtcccatgagatccggctcatggccgagggtgcccccaagtggccaaaggagacagtgaagcccgtggaggtggaggaaggggagtcagtggttctgccttgcaaccctcccccaagtgcagagcctctccggatctactggatgaacagcaagatcttgcacatcaagcaggacgagcgggtgacgatgggccagaacggcaacctctactttgccaatgtgctcacctccgacaaccactcagactacatctgccacgcccacttcccaggcaccaggaccatcattcagaaggaacccattgacctccgggtcaaggccaccaacagcatgattgacaggaagccgcgcctgctcttccccaccaactccagcagccacctggtggccttgcaggggcagccattggtcctggagtgcatcgccgagggctttcccacgcccaccatcaaatggctgcgccccagtggccccatgccagccgaccgtgtcacctaccagaaccacaacaagaccctgcagctgctgaaagtgggcgaggaggatgatggcgagtaccgctgcctggccgagaactcactgggcagtgcccggcatgcgtactatgtcaccgtggaggctgccccgtactggctgcacaagccccagagccatctatatgggccaggagagactgcccgcctggactgccaagtccagggcaggccccaaccagaggtcacctggagaatcaacgggatccctgtggaggagctggccaaagaccagaagtaccggattcagcgtggcgccctgatcctgagcaacgtgcagcccagtgacacaatggtgacccaatgtgaggcccgcaaccggcacgggctcttgctggccaatgcctacatctacgttgtccagctgccagccaagatcctgactgcggacaatcagacgtacatggctgtccagggcagcactgcctaccttctgtgcaaggccttcggagcgcctgtgcccagtgttcagtggctggacgaggatgggacaacagtgcttcaggacgaacgcttcttcccctatgccaatgggaccctgggcattcgagacctccaggccaatgacaccggacgctacttctgcctggctgccaatgaccaaaacaatgttaccatcatggctaacctgaaggttaaagatgcaactcagatcactcaggggccccgcagcacaatcgagaagaaaggttccagggtgaccttcacgtgccaggcctcctttgacccctccttgcagcccagcatcacctggcgtggggacggtcgagacctccaggagcttggggacagtgacaagtacttcatagaggatgggcgcctggtcatccacagcctggactacagcgaccagggcaactacagctgcgtggccagtaccgaactggatgtggtggagagtagggcacagctcttggtggtggggagccctgggccggtgccacggctggtgctgtccgacctgcacctgctgacgcagagccaggtgcgcgtgtcctggagtcctgcagaagaccacaatgcccccattgagaaatatgacattgaatttgaggacaaggaaatggcgcctgaaaaatggtacagtctgggcaaggttccagggaaccagacctctaccaccctcaagctgtcgccctatgtccactacacctttagggttactgccataaacaaatatggccccggggagcccagcccggtctctgagactgtggtcacacctgaggcagccccagagaagaaccctgtggatgtgaagggggaaggaaatgagaccaccaatatggtcatcacgtggaagccgctccggtggatggactggaacgccccccaggttcagtaccgcgtgcagtggcgccctcaggggacacgagggccctggcaggagcagattgtcagcgaccccttcctggtggtgtccaacacgtccaccttcgtgccctatgagatcaaagtccaggccgtcaacagccagggcaagggaccagagccccaggtcactatcggctactctggagaggactacccccaggcaatccctgagctggaaggcattgaaatcctcaactcaagtgccgtgctggtcaagtggcggccggtggacctggcccaggtcaagggccacctccgcggatacaatgtgacgtactggagggagggcagtcagaggaagcacagcaagagacatatccacaaagaccatgtggtggtgcccgccaacaccaccagtgtcatcctcagtggcttgcggccctatagctcctaccacctggaggtgcaggcctttaacgggcgaggatcggggcccgccagcgagttcaccttcagcaccccagagggagtgcctggccaccccgaggcgttgcacctggagtgccagtcgaacaccagcctgctgctgcgctggcagcccccactcagccacaacggcgtgctcaccggctacgtgctctcctaccaccccctggatgaggggggcaaggggcaactgtccttcaaccttcgggaccccgaacttcggacacacaacctgaccgatctcagcccccacctgcggtaccgcttccagcttcaggccaccaccaaagagggccctggtgaagccatcgtacgggaaggaggcactatggccttgtctgggatctcagattttggcaacatctcagccacagcgggtgaaaactacagtgtcgtctcctgggtccccaaggagggccagtgcaacttcaggttccatatcttgttcaaagccttgggagaagagaagggtggggcttccctttcgccacagtatgtcagctacaaccagagctcctacacgcagtgggacctgcagcctgacactgactacgagatccacttgtttaaggagaggatgttccggcaccaaatggctgtgaagaccaatggcacaggccgcgtgaggctccctcctgctggcttcgccactgagggctggttcatcggctttgtgagtgccatcatcctcctgctcctcgtcctgctcatcctctgcttcatcaagcgcagcaagggcggcaaatactcagtgaaggataaggaggacacccaggtggactctgaggcccgaccgatgaaagatgagaccttcggcgagtacaggtccctggagagtgacaacgaggagaaggcctttggcagcagccagccatcgctcaacggggacatcaagcccctgggcagtgacgacagcctggccgattatgggggcagcgtggatgttcagttcaacgaggatggttcgttcattggccagtacagtggcaagaaggagaaggaggcggcagggggcaatgacagctcaggggccacttcccccatcaaccctgccgtggccctagaatagtggagtccaggacaggagatgctgtgcccctggccttgggatccaggcccctccctctccagcaggcccatgggaggctggagttggggcagaggagaacttgctgcctcggatccccttcctaccacccggtccccactttattgccaaaacccagctgcaccccttcctgggcacacgctgctctgccccagcttgggcagatctcccacatgccaggggcctttgggtgctgttttgccagcccatttgggcagagaggctgtggtttgggggagaagaagtaggggtggcccgaaagggtctccgaaatgctgtctttcttgctccctgactgggggcagacatggtggggtctcctcaggaccagggttggcaccttccccctcccccagccactccccagccagcctggctgggactgggaacagaactcggtgtccccaccatctgctgtcttttctttgccatctctgctccaaccgggatgggagccgggcaaactggccgcgggggcaggggaggccatctggagagcccagagtccccccactcccagcatcgcactctggcagcaccgcctcttcccgccgcccagcccaccccatggccggctttcaggagctccatacacacgctgccttcggtacccaccacacaacatccaagtggcctccgtcactacctggctgcggggcgggcacacctcctcccactgcccactggccggcctcttccagccgcccccaccccccaggaccccttagcagccctgccctccctatcgtctgaacagttgtcttcctcagcctcctcccgcccccaccttgggaatgtaaatacaccgtgactttgaaagtttgtacccctgtccttccctttacgccactagtgtgtaggcagatgtctgagtccctaggtggtttctaggattgatagcaattagctttgatgaacccatcccaggaaaaataaaaacagacaaaaaaaaaggaaagattggttctcccagcactgctcagcagccacagcctccctgtatgcctgtgcttggtctactgataagccctctacaaaaaaacaaaagtatatatatatatgtacataatatcagaattataacaggcaaataaaacctgaaaatcaaga

SEQ ID NO: 147187 - DNA, 576 bp, Homo sapiens
  Payload ID: 9114
  Gene Symbol: L1CAM
  Gene Name: L1 cell adhesion molecule
  ENST ID: ENST00000407935
  CDS Start-End: 192-576
ttacccagatgttagtcactaacgtccttccgttctctcgtctctcttcccccacccttcccttcccttctcccctctcccagtgcccccactcccaactcccgccccaagccgcccaccagcccccttcccctccggccggagcctgaaccgagcccggctggctgtgctgcgcggtgccgccgggaaagatggtcgtggcgctgcggtacgtgtggcctctcctcctctgcagcccctgcctgcttatccagatccccgaggaattgatggagccacctgtcatcacggaacagtctccacggcgcctggttgtcttccccacagatgacatcagcctcaagtgtgaggccagtggcaagcccgaagtgcagttccgctggacgagggatggtgtccacttcaaacccaaggaagagctgggtgtgaccgtgtaccagtcgccccactctggctccttcaccatcacgggcaacaacagcaactttgctcagaggttccagggcatctaccgctgctttgccagcaataagctgggcaccgccatgtcccatgagatccggctcatggccgagg

SEQ ID NO: 147188 - DNA, 569 bp, Homo sapiens
  Payload ID: 9114
  Gene Symbol: L1CAM
  Gene Name: L1 cell adhesion molecule
  ENST ID: ENST00000420165
  CDS Start-End: 300-569
acagccgctgctgccgcagcatcggcatcgcagacgcgctcgggcggcgggtccgaggccggcgtgcgcggaggctgggcgggcagcccgagcggtggccgcagcgcaggaactccaggcagaacctgagaactgacaggcaggtgtgcagggcacatgtgcagggcaccgctggaggttcccttctcaagtgcccccactcccaactcccgccccaagccgcccaccagcccccttcccctccggccggagcctgaaccgagcccggctggctgtgctgcgcggtgccgccgggaaagatggtcgtggcgctgcggtacgtgtggcctctcctcctctgcagcccctgcctgcttatccagatccccgaggaattgatggagccacctgtcatcacggaacagtctccacggcgcctggttgtcttccccacagatgacatcagcctcaagtgtgaggccagtggcaagcccgaagtgcagttccgctggacgagggatggtgtccacttcaaacccaaggaagagctgggtgtgaccgtgtaccagtcgccccactctggctccttc

SEQ ID NO: 147189 - DNA, 637 bp, Homo sapiens
  Payload ID: 9114
  Gene Symbol: L1CAM
  Gene Name: L1 cell adhesion molecule
  ENST ID: ENST00000458029
  CDS Start-End: 387-637
gagtgcaacccctcccagagaagacacaccacagaaataccagctcacatacagctcactccctgcttgcagatccacaaccacacacatgcccacggacacctgcacatgcagacacatacggggatgtgcatgccatgcacaggggagctgatggggcaacaagttggtgctgggaaggcagctggcaggaaaggtgcagacagagagtagagagggaataaaaggcaacctagaggcccagccagggctatctcttccagatttctccctccaagtgcccccactcccaactcccgccccaagccgcccaccagcccccttcccctccggccggagcctgaaccgagcccggctggctgtgctgcgcggtgccgccgggaaagatggtcgtggcgctgcggtacgtgtggcctctcctcctctgcagcccctgcctgcttatccagatccccgaggaatatgaaggacaccatgtgatggagccacctgtcatcacggaacagtctccacggcgcctggttgtcttccccacagatgacatcagcctcaagtgtgaggccagtggcaagcccgaagtgcagttccgctggacgagggatggtgtccacttcaaacccaaggaagagctgggtgt

SEQ ID NO: 147190 - DNA, 570 bp, Homo sapiens
  Payload ID: 9114
  Gene Symbol: L1CAM
  Gene Name: L1 cell adhesion molecule
  ENST ID: ENST00000455590
  CDS Start-End: 1-570
ttgacccctccttgcagcccagcatcacctggcgtggggacggtcgagacctccaggagcttggggacagtgacaagtacttcatagaggatgggcgcctggtcatccacagcctggactacagcgaccagggcaactacagctgcgtggccagtaccgaactggatgtggtggagagtagggcacagctcttggtggtggaatatgacattgaatttgaggacaaggaaatggcgcctgaaaaatggtacagtctgggcaaggttccagggaaccagacctctaccaccctcaagctgtcgccctatgtccactacacctttagggttactgccataaacaaatatggccccggggagcccagcccggtctctgagactgtggtcacacctgaggcagccccagagaagaaccctgtggatgtgaagggggaaggaaatgagaccaccaatatggtcatcacgtggaagccgctccggtggatggactggaacgccccccaggttcagtaccgcgtgcagtggcgccctcaggggacacgagggccctggcaggagcagattgtcagcg

SEQ ID NO: 147191 - DNA, 655 bp, Homo sapiens
  Payload ID: 9114
  Gene Symbol: L1CAM
  Gene Name: L1 cell adhesion molecule
  ENST ID: ENST00000439496
  CDS Start-End: 204-655
aagagcccgggcttacccagatgttagtcactaacgtccttccgttctctcgtctctcttcccccacccttcccttcccttctcccctctcccagtgcccccactcccaactcccgccccaagccgcccaccagcccccttcccctccggccggagcctgaaccgagcccggctggctgtgctgcgcggtgccgccgggaaagatggtcgtggcgctgcggtacgtgtggcctctcctcctctgcagcccctgcctgcttatccagatccccgaggaatatgaaggacaccatgtgatggagccacctgtcatcacggaacagtctccacggcgcctggttgtcttccccacagatgacatcagcctcaagtgtgaggccagtggcaagcccgaagtgcagttccgctggacgagggatggtgtccacttcaaacccaaggaagagctgggtgtgaccgtgtaccagtcgccccactctggctccttcaccatcacgggcaacaacagcaactttgctcagaggttccagggcatctaccgctgctttgccagcaataagctgggcaccgccatgtcccatgagatccggctcatggccgagggtgcccccaagtggccaaaggagacagtgaagcccgtggaggtggaggaagg

SEQ ID NO: 147192 - DNA, 1377 bp, Homo sapiens
  Payload ID: 9115
  Gene Symbol: L2HGDH
  Gene Name: L-2-hydroxyglutarate dehydrogenase
  ENST ID: ENST00000261699
  CDS Start-End: 19-1344
ggggagcgtgcgtaggggatggtgccagcgctgcgttatttggttggtgcctgcggacgggcccgcgggcttttcgccggtggctcccctggggcgtgcgggttcgcgtctgggaggccaagaccgctgtgtggaggtagccgcagcgccagcaccagctcatttgatatagtcatcgttggtggcggaattgtggggcttgcctctgccagagcactcatcctgcgacatccatcactttctattggtgttctggaaaaggagaaagatttagctgttcaccagactggacataacagtggtgtcatacatagtggaatttattataaacctgagtctctgaaagccaaattatgtgtacaaggtgcagccctcctctatgagtactgtcagcaaaagggaatttcctacaagcagtgtggcaagcttatagtagctgttgaacaagaagaaattcccagacttcaggccctatatgagaaaggcctccagaatggtgtcccgggcctgaggctgatccagcaggaggatataaaaaagaaggagccatattgtaggggtctaatggctattgattgtccacatactggcattgtggactatcggcaggtggctttgtcatttgcccaggatttccaagaagcaggtggctctgtcttgaccaattttgaagtaaaaggtattgaaatggctaaagaaagtccttcaagaagtatagatggaatgcaatatccaattgttataaagaatacaaagggagaggaaattcgatgtcagtatgttgtgacatgtgcaggactttactcagaccgtatttcagagttgagtggctgcactcctgatcctcgaattgtaccattccggggagattacctgcttttgaagccagaaaaatgttatcttgtaaaaggaaatatttatccggtcccagatagccggtttcctttcctaggagttcacttcacaccaaggatggatggcagtatttggctagggcctaatgcagttcttgcctttaaacgagagggttacagaccctttgacttcagtgccacagatgttatggatataattatcaatagtggcttgattaaactggcatcccagaatttttcctatggagttactgaaatgtataaagcatgttttcttggtgcaacagtgaagtatcttcaaaaattcatccctgaaattactatcagtgatatacttaggcaggtggctgtgagaggaccgagctggctatggcagcaacccatgaaagtgagtgataacaacatttattgtttcctgtggcgttgctttgctttgctattgactggtagcgcttgtagctttaaataaattgaggaagtatgagagagtaaatggaagaaa

SEQ ID NO: 147193 - DNA, 6414 bp, Homo sapiens
  Payload ID: 9115
  Gene Symbol: L2HGDH
  Gene Name: L-2-hydroxyglutarate dehydrogenase
  Uniprot ID: Q9H9P8
  ENST ID: ENST00000267436
  CDS Start-End: 399-1790
agtttctcccacggccccatgtccgcatggcggtgaaggtcgaagacgcgcgacccaaagggccaggttttcagtcagcccagcgttggcgacgggcgagggcagaacacaaccaccaccctagtcccgcccggctcggggcctagcttctctactcacagcgtcggagggagggagggagggagcgagccagcgtccccgcgtctgcggcaccctggccggcccttcgccctccgacgcgcgcgcctattggccaccgcagcctctcccacatggggcgaaggcgcgccacttcattggcccccgcgtgaggggcggggctaaagagcgcgggtcctcggccgtggagggtcaagtggcttcttctgagcgctgagggaggggagcgtgcgtaggggatggtgccagcgctgcgttatttggttggtgcctgcggacgggcccgcgggcttttcgccggtggctcccctggggcgtgcgggttcgcgtctgggaggccaagaccgctgtgtggaggtagccgcagcgccagcaccagctcatttgatatagtcatcgttggtggcggaattgtggggcttgcctctgccagagcactcatcctgcgacatccatcactttctattggtgttctggaaaaggagaaagatttagctgttcaccagactggacataacagtggtgtcatacatagtggaatttattataaacctgagtctctgaaagccaaattatgtgtacaaggtgcagccctcctctatgagtactgtcagcaaaagggaatttcctacaagcagtgtggcaagcttatagtagctgttgaacaagaagaaattcccagacttcaggccctatatgagaaaggcctccagaatggtgtcccgggcctgaggctgatccagcaggaggatataaaaaagaaggagccatattgtaggggtctaatggctattgattgtccacatactggcattgtggactatcggcaggtggctttgtcatttgcccaggatttccaagaagcaggtggctctgtcttgaccaattttgaagtaaaaggtattgaaatggctaaagaaagtccttcaagaagtatagatggaatgcaatatccaattgttataaagaatacaaagggagaggaaattcgatgtcagtatgttgtgacatgtgcaggactttactcagaccgtatttcagagttgagtggctgcactcctgatcctcgaattgtaccattccggggagattacctgcttttgaagccagaaaaatgttatcttgtaaaaggaaatatttatccggtcccagatagccggtttcctttcctaggagttcacttcacaccaaggatggatggcagtatttggctagggcctaatgcagttcttgcctttaaacgagagggttacagaccctttgacttcagtgccacagatgttatggatataattatcaatagtggcttgattaaactggcatcccagaatttttcctatggagttactgaaatgtataaagcatgttttcttggtgcaacagtgaagtatcttcaaaaattcatccctgaaattactatcagtgatatacttaggggcccagctggagtaagagcccaggccctggatagagatggaaatctggtagaagattttgtatttgatgcaggagttggggatattggaaatcgcattcttcatgtgagaaatgcaccttctcctgctgctacttcttccattgcaatttctggaatgattgcagatgaagtacaacaaagatttgaattataaataatgaaaggagctaggtatgcactgtaatcttcatgtcagcaacaagaatgtactaattgcattctttaatttaaaaaatggtttttaaactttagtttttaggtcaaagataaccactgcattgttaaaatgatgtaacatagaaataataattttctacaaaaattagccaggcatggtggcgcatgcctgtaatctcagctactcaggaggctgaggcaggagaatcaattgaaccgagcagacggaggtgagctgagagctgagattgcaccactgcactccagcctgggtgacagagcaagaaaataataataataataattttcaaaatgttaggctgggggccgtggccagcactttgggaagccaaggcaggtagattgtagcccaggagtttgagaacagcctgggcaacatggcaaaaccctgtttctacacaaagttagctgggtctggtgcctctgtagttccagctcctcagtaggctgaggtgagaggatcacttgagcccaggaggtctaggctgcagtgagcttatgttcatgacactgcattccaggctggatgatagagcaagatcttgtctcaaaaaaaaaaaaaaaaaaaaaaaaaatccagcctgggcaacatagtgaatgaaaccccatctctacaaaaaatacaaaaattagctgggcatgatggtgtgtgcctgtagtcccagctacttgggggctgaggcaggaggatcgcttgagcccgggagatcaaggctacagtgagctgtgttcatgccactataccccagcctgggcaacaaagtgagtccctgactcaaaaaataaaaacaacaacaaaaaataaattccatgcttatttactttgcgaataaagaggcaaggtacagttttatctgtccgaatccctgacttttatttattttttttttcagacggagtttcactcttgttgcccaggcttgagtgcaatggtacgatcttggctcactgcaacctctgcctcccgggttccagcgattctcttgcctcaacctcctgagtagctgggattacaggcgcccaccaccatgcctggctaattttttgtatttttagtagagacggggttttgccatgttggccaggctggtctcgaattcctgacctcaggtgatccacctgcctcagcctcccaaaatgctgggattacaggtgcgagccatcatgctcagccctgaatccctgactttgttaatgacctgtccttaccaaccatgacctagagaagatttggctttttaagagttttggagaaagatggcataaaaatagattatttccttaaatcaattttttagcattacgctacctaagctcgtttggtctctcatagacaagaaaatacattatattgtaggttacattcttttaattttgaagagtcacaaaactcacattatttagagcaacaatatttgtatttggaaattaaaaattcatgatttcaagaaaatacataaaatttacatttttgagtagtttgaataagtttctatcttaattataatatttgtaggaaataacaaaacaaactcaaagcctttattatttccagtctctttgtaactgatgtggtatggtatcatcatgaaatctaaacagtggtacactgagtggttgtcctgttcttcaatctctgtggctgagaactgaaataacttagaagagacagatttttatgagagcagttttagaatcctgacactgatgtatagaactccaatttaaaaaagttatttatctattatatctctgatctttagtcacactaaggctctcaaaatgttggccaagattggtaatgattcatacgtacttgatttttcagggctcctataaacttgtatagggatatttttccatttttgataaatatctaactttgaggcattcacttttgtaaaccgcgaaagtgccttacattcacctcatgagtattttaagttgatgcccagtgctgtggtatatcctgtatatatgtgttttgtggtatctatcgaaattattcttataatttagaaagttagaaaatagaaattgtaaatgaaaatgtggcgacctgactgcagaactttgagtactgaaccacatttaggtgaggcattttcatccattctctctgatttgctctctcaggattcatcttctactgtgtatgtcttctttcctcttagctctccaaagctgtatgatggatgggtgagaaggatgtgcattttggttgataggaaaaatgtttctgttttcttccttttcccctcacttcaagcattgatgattacattgattgagctacctcatccattaatttgaaaggctacacttcatcagctcatgtttaagaagtagcacatcccaggtaaacagagtaggccattattcaactcttaggatgagtatattaaaagcattcagatatcaatgacagaagaaacaagccctaatgtttctttataacagctgattcctgcaagaaatgcaaacacaggatatttttctgttccattacaagattactaagagatggaaaatattatcattctgtattttgtcagtagtacgattgcatacatactaagttgtaaacattgaattacaaaaaatgattgtcctaattgaagcagtcctcaatccatttgagtctgtacaataccctgaaaaggaaacaacaggtgctggagaggatgtggagaaataggaacacttttacactgttggtgggactgtaaactagttcaaccattgtggaagtcagtgtggcgattcctcagggatctggaactagaaataccatttgacccagccatcccattactgggtatatacccaagggactataaatcatgctgctataaagacacatgcacacgtatgtttattgtggcactattcacaatagtaaagacttggaaccaacccaaatgtccaacaacgatagactggattaagaaaatgtggcacatatacaccatggaatactatgcagccataaaaaatgatgagttcatgtcctttgtagggacatggatgaaattggaaatcatcattctcagtaaactatcgcaagaacaaaaaaccaaacaccgcatgttctcactcatagatgggaattgaacaatgagaacacatggacacaggaaggggaacatcacactctggggactgttgtggggtggggggaggggggagggatagcattaggagatatacctaatgctaaatgacgagttaatgggtgcagcacaccagcacggcacatgtatacatatgtaactaacctgcacattgtgcacatgtaccctaaaacttaaagtataataataaacaatatatatatatatatatatataaaataccctgaaaaataaaaatgaaaaatttgttgaaagtgttttgaatatgtaggttattctgcttgtaaaacgttttatatgtatgtcaatagggtttttttgtttaatactgatataataaagttttatgtatttctgacagaagaaatgtatattaatatttaaaatattttaatgagccttggtgttgtagagaacatattttttagttccataaaaacttttatgcaaataaatttttttatgtgtaaaacataaactgtttgctttagatagatagcagccaacctttttaaaaaactcatttctgtgttagtatataatacaaaatgaggttgagtcatttatattttgggtaaaaagtggagcattttagattttaacttcagagtgtttgtgaggaactcttgatgtaccagcaagtatatttttggtgtttcatgttacgtagcttaactcttttatccatacatatatgtgtatatcaaagtccttcccttgatcctctcagcattagcactgtttggggagttgcctttactgttggcagaattccactttccctgaggccatttggaaatctacctagtagcctgtgggataaccttaactcttagaactttcttcaaaggatggtggtgagaatggggtatactgccaggccctggcctacgggagtttgtagggcctacttttggaggcaatccaaccctgatggctgtacctatgagctatccctgtaaacacaggagacatggtgtctatattgtttaaggactggctctgccctcctgggcccttaatctgtgtctagacttcttggtcagaggtttcctcatctttctgcgcatacactattatctaaagatcttgtaaacatttttgagttgtaatcgtaaagtcagtttctaagcttttctaacacactcaaagggagtttttgaaatctcttcatcagggcttaaggtagaaggacagggtgaaatggttgggaaagcaaaagctgcctcgagatgttttcaaatagtttgtactcattaaatagcttaagaatggaaataaaccctgaagccctgaagggaagaacagtgttgataccaaccaactctacttttctggcctcaaatcctagaaagtattgtgggtttgttgttgttgttgatgttgttaattgcttgtattttctgcttatgggaaggatctcacattaaagttatcttattttaa

SEQ ID NO: 147194 - DNA, 1958 bp, Homo sapiens
  Payload ID: 9115
  Gene Symbol: L2HGDH
  Gene Name: L-2-hydroxyglutarate dehydrogenase
  Uniprot ID: Q9H9P8
  ENST ID: ENST00000421284
  CDS Start-End: 80-1471
gctaaagagcgcgggtcctcggccgtggagggtcaagtggcttcttctgagcgctgagggaggggagcgtgcgtaggggatggtgccagcgctgcgttatttggttggtgcctgcggacgggcccgcgggcttttcgccggtggctcccctggggcgtgcgggttcgcgtctgggaggccaagaccgctgtgtggaggtagccgcagcgccagcaccagctcatttgatatagtcatcgttggtggcggaattgtggggcttgcctctgccagagcactcatcctgcgacatccatcactttctattggtgttctggaaaaggagaaagatttagctgttcaccagactggacataacagtggtgtcatacatagtggaatttattataaacctgagtctctgaaagccaaattatgtgtacaaggtgcagccctcctctatgagtactgtcagcaaaagggaatttcctacaagcagtgtggcaagcttatagtagctgttgaacaagaagaaattcccagacttcaggccctatatgagaaaggcctccagaatggtgtcccgggcctgaggctgatccagcaggaggatataaaaaagaaggagccatattgtaggggtctaatggctattgattgtccacatactggcattgtggactatcggcaggtggctttgtcatttgcccaggatttccaagaagcaggtggctctgtcttgaccaattttgaagtaaaaggtattgaaatggctaaagaaagtccttcaagaagtatagatggaatgcaatatccaattgttataaagaatacaaagggagaggaaattcgatgtcagtatgttgtgacatgtgcaggactttactcagaccgtatttcagagttgagtggctgcactcctgatcctcgaattgtaccattccggggagattacctgcttttgaagccagaaaaatgttatcttgtaaaaggaaatatttatccggtcccagatagccggtttcctttcctaggagttcacttcacaccaaggatggatggcagtatttggctagggcctaatgcagttcttgcctttaaacgagagggttacagaccctttgacttcagtgccacagatgttatggatataattatcaatagtggcttgattaaactggcatcccagaatttttcctatggagttactgaaatgtataaagcatgttttcttggtgcaacagtgaagtatcttcaaaaattcatccctgaaattactatcagtgatatacttaggggcccagctggagtaagagcccaggccctggatagagatggaaatctggtagaagattttgtatttgatgcaggagttggggatattggaaatcgcattcttcatgtgagaaatgcaccttctcctgctgctacttcttccattgcaatttctggaatgattgcagatgaagtacaacaaagatttgaattataaataatgaaaggagctagacggagtttcactcttgttgcccaggcttgagtgcaatggtacgatcttggctcactgcaacctctgcctcccgggttccagcgattctcttgcctcaacctcctgagtagctgggattacaggcgcccaccaccatgcctggctaattttttgtatttttagtagagacggggttttgccatgttggccaggctggtctcgaattcctgacctcaggtgatccacctgcctcagcctcccaaaatgctgggattacaggtgcgagccatcatgctcagccctgaatccctgactttgttaatgacctgtccttaccaaccatgacctagagaagatttggctttttaagagttttggagaaagatggcataaaaatagattatttccttaaatcaattttttagcattacgctacctaagctcgtttggtctctcatagacaagaaaatacattatattgtaggttaca

SEQ ID NO: 147195 - DNA, 841 bp, Homo sapiens
  Payload ID: 9115
  Gene Symbol: L2HGDH
  Gene Name: L-2-hydroxyglutarate dehydrogenase
  ENST ID: ENST00000555423
  CDS Start-End: 77-787
aaagagcgcgggtcctcggccgtggagggtcaagtggcttcttctgagcgctgagggaggggagcgtgcgtaggggatggtgccagcgctgcgttatttggttggtgcctgcggacgggcccgcgggcttttcgccggtggctcccctggggcgtgcgggttcgcgtctgggaggccaagaccgctgtgtggaggtagccgcagcgccagcaccagctcatttgatatagtcatcgttggtggcggaattgtggggcttgcctctgccagagcactcatcctgcgacatccatcactttctattggtgttctggaaaaggagaaagatttagctgttcaccagactggacataacagtggtgtcatacatagtggaatttattataaacctgagtctctgaaagccaaattatgtgtacaaggtgcagccctcctctatgagtactgtcagcaaaagggaatttcctacaagcagtgtggcaagcttatagtagctgttgaacaagaagaaattcccagacttcaggccctatatgagaaaggcctccagaatggtgtcccgggcctgaggctgatccagcaggaggatataaaaaagaaggagccatattgtaggggtctaatggctattgattgtccacatactggcattgtggactatcggcaggtggctttgtcatttgcccaggatttccaagaagcaggtggctctgtcttgaccaattttgaagtaaaaggtattgaaatggctaaagaaagtccttcaagaagtatagatgctgaataacgagcaagaatttcagattaacaaagatgtcaggtggaaagcttcattggttta

SEQ ID NO: 147196 - DNA, 597 bp, Homo sapiens
  Payload ID: 9115
  Gene Symbol: L2HGDH
  Gene Name: L-2-hydroxyglutarate dehydrogenase
  ENST ID: ENST00000554191
  CDS Start-End: 77-277
aaagagcgcgggtcctcggccgtggagggtcaagtggcttcttctgagcgctgagggaggggagcgtgcgtaggggatggtgccagcgctgcgttatttggttggtgcctgcggacgggcccgcgggcttttcgccggtggctcccctggggcgtgcgggttcgcgtctgggaggccaagaccgctgtgtggaggtagccgcagcgccagcaccagaagaaacagtttgtgtgaaggctgtaaggcttggagaggttttggctattttgacgactagaagctcatttgatatagtcatcgttggtggcggaattgtggggcttgcctctgccagagcactcatcctgcgacatccatcactttctattggtgttctggaaaaggagaaagatttagctgttcaccagactggacataacagtggtgtcatacatagtggaatttattataaacctgagtctctgaaagccaaattatgtgtacaaggtgcagccctcctctatgagtactgtcagcaaaagggaatttcctacaagcagtgtggcaagcttatagtagctgttgaacaagaagaaattcccagacttcaggccctat

SEQ ID NO: 147197 - DNA, 804 bp, Homo sapiens
  Payload ID: 9115
  Gene Symbol: L2HGDH
  Gene Name: L-2-hydroxyglutarate dehydrogenase
  ENST ID: ENST00000555610
  CDS Start-End: 5-640
ggggatggtgccagcgctgcgttatttggttggtgcctgcggacgggcccgcgggcttttcgccggtggctcccctggggcgtgcgggttcgcgtctgggaggccaagaccgctgtgtggaggtagccgcagcgccagcaccagctcatttgatatagtcatcgttggtggcggaattgtggggcttgcctctgccagagcactcatcctgcgacatccatcactttctattggtgttctggaaaaggagaaagatttagctgttcaccagactggacataacagtggtgtcatacatagtggaatttattataaacctgagtctctgaaagccaaattatgtgtacaaggtgcagccctcctctatgagtactgtcagcaaaagggaatttcctacaagcagtgtggcaagcttatagtagctgttgaacaagaagaaattcccagacttcaggccctatatgagaaaggcctccagaatggtgtcccgggcctgaggctgatccagcaggaggatataaaaaagaaggagccatattgtaggatatccagttgtgtcagcatcacttatcaaaaaaccattattttcccactgtgctgcagtattgcctttatgatatcagggtctaatggctattgattgtccacatactggcattgtggactatcggcaggtggctttgtcatttgcccaggatttccaagaagcaggtggctctgtcttgaccaattttgaagtaaaaggtattgaaatggctaaagaaagtccttcaagaagtatagatggtaagccatccttgtctt

SEQ ID NO: 147198 - DNA, 393 bp, Homo sapiens
  Payload ID: 9116
  Gene Symbol:
  Gene Name: L34079.2
  ENST ID: ENST00000594374
  CDS Start-End: 1-393
gcggccgccgcctctcacccaacgcactacgacgccctcatcctcgtcacccctggggcccccactgagaaggactgggcccaggtccaggccttgctgctaccagatgcgcctcttgtctgcgtgcgcacagacggcgagggcgaggatccggagtgtctgggagaagttggagaaggaggagcagatacacagtgtggacattgggaatgatggctcagctttcgtggaggtgctggtgggcagttcagctggaggcgctggggagcaagactatgaggtccttctggtcacctcatctttcatgtccccttccgagagccgcagtggctcaaaccccaaccgcgttcgcatgtttgggcctgacaagctggtccgggcagccgccgagaa

SEQ ID NO: 147199 - DNA, 1527 bp, Homo sapiens
  Payload ID: 9117
  Gene Symbol: L3HYPDH
  Gene Name: L-3-hydroxyproline dehydratase (trans-)
  Uniprot ID: Q96EM0
  ENST ID: ENST00000247194
  CDS Start-End: 115-1179
cgccccccggacgtggctggttagcgtcccgccctcctcccgcggagtcagtgggtgagggtcgggcttgaagccatagctgcgggaccgtactcgtctcccccgacgcagaccatggagagcgcgctggcggtgccccggctgcccccgcatgatccagggacgccggtgctgtcggtggtggacatgcacacgggcggcgagcccttgcgtatcgtgctggcggggtgtccggaggtgtctgggcccaccctgctggccaagcggcgctacatgcgccagcaccttgaccacgtgcggcgacggctcatgttcgagccccgagggcaccgggacatgtacggggcggtcctagtcccgagcgagctgccggacgcgcatctgggcgtcctgttcctgcacaacgagggctacagctccatgtgcggccacgcagtgctggcgctgggccgcttcgctttggacttcgggcttgtgccggcgccccctgcgggcacccgcgaggcccgcgtcaatatccactgcccctgcgggctggtgaccgccttcgtggcatgcgaggacggccgcagccacggaccggtgcgcttccacagcgtcccggccttcgtgctggccacagatctcatggtggatgttcctggacatggaaaggtgatggtggacattgcatatggcggtgcattttatgcatttgttactgctgaaaagttaggactagacatttgttctgcaaagaccagggaccttgtggatgcagcgagtgcagtgacagaggcagtgaaagctcagtttaaaattaatcatcctgatagtgaagaccttgcctttttatatggaactatattaacagatggaaaagatgcttataccaaggaaccaaccaccaacatttgtgtttttgcagatgaacaggttgacagaagtcccactggctcaggagtgacagcccgaattgccttacagtatcacaaagggcttctggaactgaaccagatgagagccttcaaaagcagtgcaactggctcagtattcacagggaaagctgtgagggaagcgaaatgtggtgattttaaagctgttatagtggaagtatcaggacaagcccattacacgggtacagcaagctttataatagaagatgacgacccattgagggatggatttcttctcaagtgacttcttccatgattttaagggctttctttttaaagtaatcattatccttaaggactgttttctctaaattatatgaaaacaaataaattatacatataaactaactctcattctttgtaaaatactaccctgtggctaaatataaagtcattatacctcgtatttgcaactgtatttgtataaatatcacttatgtctagcatacaaaatgccagaaattcagagtctttttctagtgattaacgtatcaggtaaaattaaaacagtagttacttttaaaatattgctctatagtaattactattaatatcatattttgtattaaaggctcttcgaataatatgtgga

SEQ ID NO: 147200 - DNA, 758 bp, Homo sapiens
  Payload ID: 9117
  Gene Symbol: L3HYPDH
  Gene Name: L-3-hydroxyproline dehydratase (trans-)
  ENST ID: ENST00000481608
  CDS Start-End: 333-758
gcggccacgcagtgctggcgctgggccgcttcgctttggacttcgggcttgtgccggcgccccctgcgggcacccgcgaggcccgcgtcaatatccactgcccctgcgggctggtgaccgccttcgtggcatgcgaggacggccgcagccacggaccggtgcgcttccacagcgtcccggccttcgtgctggccacaggtaatgggcgggacctttccagcccagggcagagctgcaaccgggacgcgactaactacattaacggtttttctgggctggaactctggcaactaacctactccgcgaaaccttgcaattaatagaaagatctcatggtggatgttcctggacatggaaaggtgatggtggacattgcatatggcggtgcattttatgcatttgttactgctgaaaagttaggactagacatttgttctgcaaagaccagggaccttgtggatgcagcgagtgcagtgacagaggcagtgaaagctcagtttaaaattaatcatcctgatagtgaagaccttgcctttttatatggaactatattaacagatggaaaagatgcttataccaaggaaccaaccaccaacatttgtgtttttgcagatgaacaggttgacagaagtcccactggctcaggagtgacagcccgaattgccttacagtatcacaaagggcttctggaactgaaccagatgagagccttcaaaagcagtgcaactggctcagtattcacagggaaagctgtgagg

SEQ ID NO: 147201 - DNA, 700 bp, Homo sapiens
  Payload ID: 9117
  Gene Symbol: L3HYPDH
  Gene Name: L-3-hydroxyproline dehydratase (trans-)
  ENST ID: ENST00000487285
  CDS Start-End: 202-639
agaaaggtaaatcactgccaacgtgtgtcagcagccttgcgtatttggtgcgtgtaatttcgattttccctgactcccatccgcctgtggttttgggagacccttgaggagcgaggaattgcgtgttaccctgactcagcgcctccctctgcactggtgaggcattcctagagatttcaccggtggataaagcaagatctcatggtggatgttcctggacatggaaaggtgatggtggacattgcatatggcggtgcattttatgcatttgttactgctgaaaagttaggactagacatttgttctgcaaagaccagggaccttgtggatgcagcgagtgcagtgacagaggcagtgaaagctcagtttaaaattaatcatcctgatagtgaagaccttgcctttttatatggaactatattaacagatggaaaagatgcttataccaaggaaccaaccaccaacatttgtgtttttgcagatgaacaggttgacagaagtcccactggctcaggagtgacagcccgaattgccttacagtatcacaaagggcttctggaactgaaccagatgagagccttcaaaagcagtgcaactggctcagtattcacagggaaagctgtgagggagctgttatgagaagaatctgggattgcaatgtccccccaaatagagagggagccgagagaccaaagaatga

SEQ ID NO: 147202 - DNA, 6595 bp, Homo sapiens
  Payload ID: 9118
  Gene Symbol: LARP1
  Gene Name: La ribonucleoprotein domain family, member 1
  Uniprot ID: Q6PKG0
  ENST ID: ENST00000336314
  CDS Start-End: 25-3084
gtgaccccaggccctggtcactccatgctttggagggtgcttttgtcaaagaggcctcctttccctcacccagagctggatttccaagaggctcccatacctagctgccctggcagactcccagggaggaaaaacagcgtggccttggcagctgccccgaggaaggagcccacaggtgacagggagaagccattgccattccctgtcctggcccccttcagcaaccctgaacactctgctccagccaaggtggtgagggcagctgttcctaaacagcgcaaaggcagcaaggttggtgactttggagatgcaatcaattggcccacacctggagagatagcccacaagagtgttcagccacagtcccacaagcctcagcctacccgtaaactgccacccaagaaggacatgaaggaacaggagaaaggagaagggagtgatagtaaggagagtccaaaaaccaaatcagatgaatcaggggaggaaaagaatggagatgaggattgccagcgaggcgggcagaagaagaaaggaaacaaacacaagtgggttccattacaaatagacatgaagcctgaagtgcccagagagaaactggcttcacgccccactcgcccaccggagcctagacacatacctgccaatcgcggagagatcaaagggtctgagtctgccacctacgtgcccgtggccccccccaccccagcctggcaaccagagatcaaaccggagcctgcctggcacgaccaggatgagacatcgagtgtgaagagtgatggggctggtggggcgcgggcttccttccgtggccgtggacgggggcgtggtcgcggccggggacgcggccggggtggcactcgaacccattttgactaccagtttggctaccgaaagtttgatggtgtggaggggcctcgtacgcccaagtacatgaacaacatcacctactactttgacaatgtcagcagcaccgagctttacagtgtggatcaggaactgctcaaagactacatcaagcgccagattgaatactacttcagcgtggacaatttagagcgagacttcttcctgcgaaggaaaatggatgctgatggtttcctacccatcacccttattgcttccttccaccgagtgcaggcccttaccactgacatttcactcatctttgcggccctaaaggacagcaaggtggtggagatcgttgatgagaaagttcgtaggagggaggaaccagaaaagtggcctcttcccccaatagtggattattcacagactgatttctcccagcttctcaactgccctgaatttgttccccgtcagcactaccaaaaggagacagagtcggcacctggctctcctcgtgcagtcaccccagtgccaaccaaaacagaggaggtcagcaacctaaagacactacccaagggcctgtctgccagcctgcctgacctggattctgagaactggattgaagtgaagaagaggcctcggccatccccagcacggcccaagaagtcagaggagtccagattttcccacctgacctctctgcctcagcagctgccttcccagcagctgatgtccaaggatcaggatgagcaagaggaactggattttctgtttgacgaggagatggagcagatggatgggcggaagaacaccttcactgcctggtctgatgaggaatctgactatgagattgatgacagggatgtcaacaagatcctcattgtcacccagacaccacattacatgcgccggcacccagggggggaccgcacaggcaaccacacctcgcgtgccaagatgagcgccgaactggccaaggtcattaatgatggcctcttctactatgagcaggacctgtgggctgaaaagtttgaacctgagtattcccagatcaagcaagaagtcgagaacttcaaaaaggtcaatatgatcagccgggagcagtttgacacactgacccctgagccccctgtggatcccaaccaggaagttcctcctgggccacctcggttccagcaagttcctacggatgccctggccaacaagttgtttggtgctcctgagccctccaccatcgcccgctctctaccaaccactgtcccagagtcaccaaactaccgcaacaccaggacccctcgcactccccggacaccacagctcaaagactcaagccagacatcacggttttacccagtggtgaaagaaggacggacactggatgccaagatgcctcgaaaaagaaagacaagacacagttcaaacccacccttggagagccatgtgggctgggtgatggattcccgtgagcacaggccccgtactgcttccatcagctccagcccctcagaagggacgcctacagttggcagctatggctgtacccctcagtcattgcccaagttccagcatccttcccatgaactgctcaaggaaaatggcttcacacaacacgtctaccataagtatcgtaggcgctgccttaatgagcggaaacgcttgggcattggccagtctcaggagatgaacacactcttccgcttctggtccttcttcctccgagatcacttcaacaaaaagatgtatgaggagttcaagcagctggctctggaggacgccaaagaaggctacagatatggtttggagtgcctttttcgatactacagttatggcctggaaaagaagttccggctggacatattcaaggattttcaggaggaaacggtgaaggactatgaagctggccaactgtatgggctggagaagttctgggccttcttgaaatattccaaagccaaaaatttggacattgaccccaaactgcaagaatacctcggcaaattccgacgtcttgaagacttccgagtagatccccccatgggtgaggagggcaaccacaagcgacactcagtggtagcaggaggtggcggcggtgagggcaggaagcggtgcccctcccagtcttccagcaggcctgctgccatgatcagccaaccccctacaccacccaccggccagcctgtccgggaagatgccaaatggacaagccagcactcgaacacacagactttgggaaagtgaaaagctccttagccctggggcttgaggggggaaaggggtagggtgggtaagagtccatgggggtgcccagtcccaggaaaggggacaatgaagggacaggcctggagttactaggacaggcctttgtgctgagtagcaatgtatacaccatttgggctatcagaggtacccctgggcaggagcctctacatccccttccccctcctctctccatgactcttgacatcctagcttcttctaaggggggagggaaaggggggagatttttatatatatatacatatatatatatcaagttttaaattattgatagttcatctggattaccaaaatcactctgcagccctgcccgaggctagtaggctgcaaccctggtccccacccctaacctcctgctccccctcaagccaactatgcagcccacaagaaggccctgcgggcccccccattgcccagcactgtctcatagaaggctctggtggtacctctgggccccaggagcatcagccccttgatcatctggggtttgtcatcaccatattttctccctgctgttcccaccatgcccttctgccatcttctgggagaaggaaaccaaaggatctaaaactggggtttgggggaaggtttcagcctctccccactccccttgccccacaccctttactccccagcccagagagacgctgcttttaccaggaaagactattgaaagatgttttattttatttttctctgacctttccatccttgaaaaaatggggaaaaaagaagaaaaaagacaaaatcgaccataaaagaccaaaaaaaaaaaaaaaatcagaaaacccccacctaatccacagaaagtaatgtctttcccctccccttggaatttttgttttgtttttggaaataatatttttttaaaagttgccttattgtggagcgggaatctgaaatacccaaatgcctgttttcctcggtggagtcaacccgaagagctcccaccttctctggatgtgcctgggcttggactggctagaatctttctctggactgttgcatgtacagtgcctccatcctggaggcaagagagttgggagtggctcgaatcagagccgtgcccaagatatccctgctgttgcatcgtttgaagctgacgtcctgtgtctgtacactgctgccactgttgtgtcctcgctctgcttgctgttgcctcacgccaggccccgtcctgccgtgacacccttcatcctacccttggaaccccaaggccaagttggttcaaactgttggagaacagagttggcctgcatctggaacacacttgtcctcagcttaccatctcctcacaccccagagtggaaaggtgaacacctgcagctgaggcttggaaacgtttcttgtgttgccctgaaaaatctttgagacctcagggaggctctgtctctcttaaaaggtggagaaagatgccattctctccctaaggtctggtggagtctccccatcttgcatacccttctgcaagccatctatctctgctcactctccaattgacccgcctgggaacaagggatgaggaggagttgggggctggggggaatcctgccagttggtgaagccctgtggcaggaaggtatatgtggacatagagtatacctgattctctttcttcagccactgactgcttgggttgggctgtgaatgataatggaatggctggagtctgctgttgtcagaaggcagggagggtgatgaaggactgacccacatggactgggatgtgtgtcggttatgggcatgactgcacgttcactctcagtgggatctgggcaacatggagttcattgtcctgttgcttacttactgcaatgtctttggccctccttttcaactggttcctctgttgggcccaaaggttgggagtaggagacagtatcccaggctgacaagggcttgccctttaccttgggcaccttgttaatttttagcctgtgcccttccccacctttgccctcccagtggttggtatgtgggaagcccatctcagttcctgtgacttcatgtctcaaaccaaggatgagcgtctggtctctgctatgatggtggtatccgaggcctttccctgcccagtctggtgcctgccccacattgtaccggacactggattcctggacccccttctcctttcctttctttccttcaggtcacgcagccctgtactgtatccagcaccacagaaacctcagtgtttttcctctgctggtttggggcacaaggaagccttagggtatggggaaaggctgttattacctagagtttactcccaggccagggggctgccatcttcttcacagacatccctgaaaggaagcccctttggggcagggaggtgaggacttcatctcaacatcggctggtggttggtaggggagctttttcttttctttcctttttttttgtttttgtttttgtttttgtttttggtaacatgttaggagttaatgttgcaaagagtagtttacatcttcactttctgaagacacttgaatttaggaccgatgtatctgtgacaagcatgccagaagtggcaggggccatcagggctaaccacttcacacctaccatcgtcccatggggatccaagacctgagataaagcaacagcctgcccagatccctctgttcatcctatcccttccaaggttggtccatgccaacataacctctgggcatcagacatcagcaggtctgtgtgcctcagccctgttaaggggcaggtttctctttagccctcttcctgcacttgggagcaaaggcactaccagtagagaagggccatccagccgtgccccagcctggacccctggggctcagatagaggtgctgagcccctgtgtcaaagttgttaaatgtttttgttttgttccattgtagctctttttttttttttttcccctttcctggtgattgattttacaaaagaaagtaagctgcttagaaggccctggaagggaagtgaggaggagggacaaggaagatgactagttacggagggtgagggttgttttttgccaaaaagcctgggtagagtgatctgaattatctggcaccctcctgaatggaaccccagagtacctcctgtgtggaagggtccctggattttccctaacacccaccctctcccccttcagccatgctgatggcagagaagataagaacttggagcccatttctcactggagaggaaaacttgtcatctggctttgcggagaaggttccaccttacgctcgtagtacattatctttactatgtgctaggatatcatatttaaaaggacaaaaaaatgtaaaatacttgaatgagcttgtattataacattaatattattgagagtatctgctttccaggctgaagtgattcattcattattctagtcctgctttagtcctttgtaatttgtggtaattatgcttttctttttaatacaaaaaaatgtataaaaataaacacttgaaaaggcaaaata

SEQ ID NO: 147203 - DNA, 450 bp, Homo sapiens
  Payload ID: 9118
  Gene Symbol: LARP1
  Gene Name: La ribonucleoprotein domain family, member 1
  ENST ID: ENST00000518194
  CDS Start-End: 1-450
gcgaggcgggcagaagaagaaaggaaacaaacacaagtgggttccattacaaatagacatgaagcctgaagtgcccagagagaaactggcttcacgccccactcgcccaccggagcctagacacatacctgccaatcgcggagagatcaaagggtctgagtctgccacctacgtgcccgtggccccccccaccccagcctggcaaccagagatcaaaccggagcctgcctggcacgaccaggatgagacatcgagtgtgaagagtgatggggctgcccattttgactaccagtttggctaccgaaagtttgatggtgtggaggggcctcgtacgcccaagtacatgaacaacatcacctactactttgacaatgtcagcagcaccgagctttacagtgtggatcaggaactgctcaaagactacatcaagcgccagattgaatactactt

SEQ ID NO: 147204 - DNA, 817 bp, Homo sapiens
  Payload ID: 9118
  Gene Symbol: LARP1
  Gene Name: La ribonucleoprotein domain family, member 1
  ENST ID: ENST00000521577
  CDS Start-End: 1-184
gaacggacagtcccccccagaacactctgctccagccaaggtggtgagggcagctgttcctaaacagcgcaaaggcagcaaggttggtgactttggagatgcaatcaattggcccacacctggagagatagcccacaagagtgttcagatgaagctgctgagacttgcagaggttaattactagcccttgatggccaagtggggattggaagtcagccacagtcccacaagcctcagcctacccgtaaactgccacccaagaaggacatgaaggaacaggagaaaggagaagggagtgatagtaaggagagtccaaaaaccaaatcagatgaatcaggggaggaaaagaatggagatgaggattgccagcgaggcgggcagaagaagaaaggaaacaaacacaagtgggttccattacaaatagacatgaagcctgaagtgcccagagagaaactggcttcacgccccactcgcccaccggagcctagacacatacctgccaatcgcggagagatcaaagggtctgagtctgccacctacgtgcccgtggccccccccaccccagcctggcaaccagagatcaaaccggagcctgcctggcacgaccaggatgagacatcgagtgtgaagagtgatggggctggtggggcgcgggcttccttccgtggccgtggacgggggcgtggtcgcggccggggacgcggccggggtggcactcgaacccattttgactaccagtttggctaccgaaagtttgatggtgtggaggggcctcgtacgcccaagtacatgaacaacatcacctactactttgaca

SEQ ID NO: 147205 - DNA, 2630 bp, Homo sapiens
  Payload ID: 9118
  Gene Symbol: LARP1
  Gene Name: La ribonucleoprotein domain family, member 1
  ENST ID: ENST00000518297
  CDS Start-End: 184-2630
ggatttacggcggctgcatctaactgggagggggccgcacctcgcgtgaaccccgacccttctctgcagggactggggcccagcgccccggaggaaggcgtcgcgggcgctctgctagccaagttcgaggcgggggaggcagcctcgggcgcgcccggcttctccgggggggcgggcgcgcagatggccactcaggtggagccgctgctgcctgggggcgccacgctcttgcaggccgaagagcacggggggctggtgaggaagaagccgccgccggcgcccgagggcaagggcgagcccgggccaaacgacgtccgcgggggggagccggacggcagcgctcggagaccccggccgccctgcgccaagccgcacaaggagggcaccgggcagcaggagcgcgagagcccgcggccgctgcagctgcccggcgccgaaggcccggccatcagcgacggggaggagggcggcggcgagccaggcgctggcggaggagctgccggagccgcgggcgcggggcgccgggacttcgtggaagcccccccgcccaaggtgaacccgtggactaagaacgcattgccgccggtcctgaccaccgtgaacggacagtcccccccagaacactctgctccagccaaggtggtgagggcagctgttcctaaacagcgcaaaggcagcaaggttggtgactttggagatgcaatcaattggcccacacctggagagatagcccacaagagtgttcagccacagtcccacaagcctcagcctacccgtaaactgccacccaagaaggacatgaaggaacaggagaaaggagaagggagtgatagtaaggagagtccaaaaaccaaatcagatgaatcaggggaggaaaagaatggagatgaggattgccagcgaggcgggcagaagaagaaaggaaacaaacacaagtgggttccattacaaatagacatgaagcctgaagtgcccagagagaaactggcttcacgccccactcgcccaccggagcctagacacatacctgccaatcgcggagagatcaaagggtctgagtctgccacctacgtgcccgtggccccccccaccccagcctggcaaccagagatcaaaccggagcctgcctggcacgaccaggatgagacatcgagtgtgaagagtgatggggctggtggggcgcgggcttccttccgtggccgtggacgggggcgtggtcgcggccggggacgcggccggggtggcactcgaacccattttgactaccagtttggctaccgaaagtttgatggtgtggaggggcctcgtacgcccaagtacatgaacaacatcacctactactttgacaatgtcagcagcaccgagctttacagtgtggatcaggaactgctcaaagactacatcaagcgccagattgaatactacttcagcgtggacaatttagagcgagacttcttcctgcgaaggaaaatggatgctgatggtttcctacccatcacccttattgcttccttccaccgagtgcaggcccttaccactgacatttcactcatctttgcggccctaaaggacagcaaggtggtggagatcgttgatgagaaagttcgtaggagggaggaaccagaaaagtggcctcttcccccaatagtggattattcacagactgatttctcccagcttctcaactgccctgaatttgttccccgtcagcactaccaaaaggagacagagtcggcacctggctctcctcgtgcagtcaccccagtgccaaccaaaacagaggaggtcagcaacctaaagacactacccaagggcctgtctgccagcctgcctgacctggattctgagaactggattgaagtgaagaagaggcctcggccatccccagcacggcccaagaagtcagaggagtccagattttcccacctgacctctctgcctcagcagctgccttcccagcagctgatgtccaaggatcaggatgagcaagaggaactggattttctgtttgacgaggagatggagcagatggatgggcggaagaacaccttcactgcctggtctgatgaggaatctgactatgagattgatgacagggatgtcaacaagatcctcattgtcacccagacaccacattacatgcgccggcacccagggggggaccgcacaggcaaccacacctcgcgtgccaagatgagcgccgaactggccaaggtcattaatgatggcctcttctactatgagcaggacctgtgggctgaaaagtttgaacctgagtattcccagatcaagcaagaagtcgagaacttcaaaaaggtcaatatgatcagccgggagcagtttgacacactgacccctgagccccctgtggatcccaaccaggaagttcctcctgggccacctcggttccagcaagttcctacggatgccctggccaacaagttgtttggtgctcctgagccctccaccatcgcccgctctctaccaaccactgtcccagagtcaccaaactaccgcaacaccaggacccctcgcactccccggacaccacagctcaaagactcaagccagacatcacggttttacccagtggtgaaagaaggacggacactggatgccaagatgcctcg

SEQ ID NO: 147206 - DNA, 399 bp, Homo sapiens
  Payload ID: 9118
  Gene Symbol: LARP1
  Gene Name: La ribonucleoprotein domain family, member 1
  ENST ID: ENST00000518892
  CDS Start-End: 1-202
cggcgccgaaggcccggccatcagcgacggggaggagggcggcggcgagccaggcgctggcggaggagctgccggagccgcgggcgcggggcgccgggacttcgtggaagcccccccgcccaaggtgaacccgtggactaagaacgcattgccgccggtcctgaccaccgtgaacggacagtcccccccagataccctttagggctggtttgccttagttgaggaagaagaccctcctagggactctgtctgccatccaccctgctacagtctgggcctcggagacctgtggacagataagctgctgggcccagtcatcagtaactgtttactcagaaaaacaagggaagtgctctaagattacactaagaaggcttttgacccattcctcgccagtag

SEQ ID NO: 147207 - DNA, 569 bp, Homo sapiens
  Payload ID: 9118
  Gene Symbol: LARP1
  Gene Name: La ribonucleoprotein domain family, member 1
  ENST ID: ENST00000519931
  CDS Start-End: 292-569
acggccaccgcctgggccgcagcggttagtgggcaacggtgtggttcgggcctacctcgtcggcagagggtgggcgctggtttcagtgaaacgatccccaccgcatgctggtaacactctgctccagccaaggtggtgagggcagctgttcctaaacagcgcaaaggcagcaaggttggtgactttggagatgcaatcaattggcccacacctggagagatagcccacaagagtgttcagccacagtcccacaagcctcagcctacccgtaaactgccacccaagaaggacatgaaggaacaggagaaaggagaagggagtgatagtaaggagagtccaaaaaccaaatcagatgaatcaggggaggaaaagaatggagatgaggattgccagcgaggcgggcagaagaagaaaggaaacaaacacaagtgggttccattacaaatagacatgaagcctgaagtgcccagagagaaactggcttcacgccccactcgcccaccggagcctagacacatacctgccaatcgcggagagatcaaagggtctgagtctgccacctacgtgcc

SEQ ID NO: 147208 - DNA, 501 bp, Homo sapiens
  Payload ID: 9118
  Gene Symbol: LARP1
  Gene Name: La ribonucleoprotein domain family, member 1
  ENST ID: ENST00000517616
  CDS Start-End: 1-501
gcggccgctgcagctgcccggcgccgaaggcccggccatcagcgacggggaggagggcggcggcgagccaggcgctggcggaggagctgccggagccgcgggcgcggggcgccgggacttcgtggaagcccccccgcccaaggtgaacccgtggactaagaacgcattgccgccggtcctgaccaccgtgaacggacagtcccccccagaacactctgctccagccaaggtggtgagggcagctgttcctaaacagcgcaaaggcagcaagccacagtcccacaagcctcagcctacccgtaaactgccacccaagaaggacatgaaggaacaggagaaaggagaagggagtgatagtaaggagagtccaaaaaccaaatcagatgaatcaggggaggaaaagaatggagatgaggattgccagcgaggcgggcagaagaagaaaggaaacaaacacaagtgggttccattacaaatagacatgaagcctgaagtgcccag

SEQ ID NO: 147209 - DNA, 2128 bp, Homo sapiens
  Payload ID: 9118
  Gene Symbol: LARP1
  Gene Name: La ribonucleoprotein domain family, member 1
  ENST ID: ENST00000524248
  CDS Start-End: 297-2128
acgtggtgcctccccgcgcggggagcggcatgtgactgccgaccggcgctccgcgagtcctccctctccctcctccgcgttttggtccttttggaccgtgcccctttccggggggagaacactctgctccagccaaggtggtgagggcagctgttcctaaacagcgcaaaggcagcaaggttggtgactttggagatgcaatcaattggcccacacctggagagatagcccacaagagtgttcagccacagtcccacaagcctcagcctacccgtaaactgccacccaagaaggacatgaaggaacaggagaaaggagaagggagtgatagtaaggagagtccaaaaaccaaatcagatgaatcaggggaggaaaagaatggagatgaggattgccagcgaggcgggcagaagaagaaaggaaacaaacacaagtgggttccattacaaatagacatgaagcctgaagtgcccagagagaaactggcttcacgccccactcgcccaccggagcctagacacatacctgccaatcgcggagagatcaaagggtctgagtctgccacctacgtgcccgtggccccccccaccccagcctggcaaccagagatcaaaccggagcctgcctggcacgaccaggatgagacatcgagtgtgaagagtgatggggctggtggggcgcgggcttccttccgtggccgtggacgggggcgtggtcgcggccggggacgcggccggggtggcactcgaacccattttgactaccagtttggctaccgaaagtttgatggtgtggaggggcctcgtacgcccaagtacatgaacaacatcacctactactttgacaatgtcagcagcaccgagctttacagtgtggatcaggaactgctcaaagactacatcaagcgccagattgaatactacttcagcgtggacaatttagagcgagacttcttcctgcgaaggaaaatggatgctgatggtttcctacccatcacccttattgcttccttccaccgagtgcaggcccttaccactgacatttcactcatctttgcggccctaaaggacagcaaggtggtggagatcgttgatgagaaagttcgtaggagggaggaaccagaaaagtggcctcttcccccaatagtggattattcacagactgatttctcccagcttctcaactgccctgaatttgttccccgtcagcactaccaaaaggagacagagtcggcacctggctctcctcgtgcagtcaccccagtgccaaccaaaacagaggaggtcagcaacctaaagacactacccaagggcctgtctgccagcctgcctgacctggattctgagaactggattgaagtgaagaagaggcctcggccatccccagcacggcccaagaagtcagaggagtccagattttcccacctgacctctctgcctcagcagctgccttcccagcagctgatgtccaaggatcaggatgagcaagaggaactggattttctgtttgacgaggagatggagcagatggatgggcggaagaacaccttcactgcctggtctgatgaggaatctgactatgagattgatgacagggatgtcaacaagatcctcattgtcacccagacaccacattacatgcgccggcacccagggggggaccgcacaggcaaccacacctcgcgtgccaagatgagcgccgaactggccaaggtcattaatgatggcctcttctactatgagcaggacctgtgggctgaaaagtttgaacctgagtattcccagatcaagcaagaagtcgagaacttcaaaaaggtcaatatgatcagccgggagcagtttgacacactgacccctgagccccctgtggatcccaaccaggaagttcctcctgggccacctcggttccagcaagttcctacggatgccctggccaacaagttgtttggtgctcctgagccctccaccatcgcccgctctctaccaaccactgtcccagagtcaccaaactaccgcaacaccaggacccctcgcactccccggacaccacagctcaaagactcaagccagacatcacggttttacccagtggtgaaagaaggacggacactggatgccaagatgcctcg

SEQ ID NO: 147210 - DNA, 467 bp, Homo sapiens
  Payload ID: 9118
  Gene Symbol: LARP1
  Gene Name: La ribonucleoprotein domain family, member 1
  ENST ID: ENST00000522272
  CDS Start-End: 1-109
aagacacagttcaaacccacccttggagagccatgtgggctgggtgatggattcccgtgagcacaggccccgtactgcttccatcagagatggcacagactgcaaataggcatgcttttgaagaaaatatacaattgatctttgaacaacgaagggcgtggggtgcccagctgcacacagttgaaaatccgtgtataacttttgactctccaaaagcctactgttaaccagaagccttaccaataacatatagtcaattagcacatgttttgcatattatatgtattacatactgtattcttacaataagctaaataaaaaatattactaagaaaatcacaaagaagggaacaacaaacactggggcctacttggtggggagagggaggagagtgaggtacagtttacctacttaacaaacctgtacacatacctctgaacctaaaataaaagttaaaatcataaga

SEQ ID NO: 147211 - DNA, 843 bp, Homo sapiens
  Payload ID: 9118
  Gene Symbol: LARP1
  Gene Name: La ribonucleoprotein domain family, member 1
  ENST ID: ENST00000523163
  CDS Start-End: 1-843
gatgaatcaggggaggaaaagaatggagatgaggattgccagcgaggcgggcagaagaagaaaggaaacaaacacaagtgggttccattacaaatagacatgaagcctgaagtgcccagagagaaactggcttcacgccccactcgcccaccggagcctagacacatacctgccaatcgcggagagatcaaagcccattttgactaccagtttggctaccgaaagtttgatggtgtggaggggcctcgtacgcccaagtacatgaacaacatcacctactactttgacaatgtcagcagcaccgagctttacagtgtggatcaggaactgctcaaagactacatcaagcgccagattgaatactacttcagcgtggacaatttagagcgagacttcttcctgcgaaggaaaatggatgctgatggtttcctacccatcacccttattgcttccttccaccgagtgcaggcccttaccactgacatttcactcatctttgcggccctaaaggacagcaaggtggtggagatcgttgatgagaaagttcgtaggagggaggaaccagaaaagtggcctcttcccccaatagtggattattcacagactgatttctcccagcttctcaactgccctgaatttgttccccgtcagcactaccaaaaggagacagagtcggcacctggctctcctcgtgcagtcaccccagtgccaaccaaaacagaggaggtcagcaacctaaagacactacccaagggcctgtctgccagcctgcctgacctggattctgagaactggattgaagtgaagaagaggcctcggccatccccagcacggcccaagaag

SEQ ID NO: 147212 - DNA, 827 bp, Homo sapiens
  Payload ID: 9118
  Gene Symbol: LARP1
  Gene Name: La ribonucleoprotein domain family, member 1
  ENST ID: ENST00000518677
  CDS Start-End: 1-551
agcaggacctgtgggctgaaaagtttgaacctgagtattcccagatcaagcaagaagtcgagaacttcaaaaaggtcaatatgatcagccgggagcagtttgacacactgacccctgagccccctgtggatcccaaccaggaagttcctcctgggccacctcggttccagcaagttcctacggatgccctggccaacaagttgtttggtgctcctgagccctccaccatcgcccgctctctaccaaccactgtcccagagtcaccaaactaccgcaacaccaggacccctcgcactccccggacaccacagctcaaagactcaagccagacatcacggttttacccagtggtgaaagaaggacggacactggatgccaagatgcctcgaaaaagaaagacaagacacagttcaaacccacccttggagagccatgtgggctgggtgatggattcccgtgagcacaggccccgtactgcttccatcagtaagatggccccagtgtgtgtttcctgtttcccaaagcaagctttgagagccacctacctatgaccaatgctctctactccctgcagagatggcacagactgcaaataggcatgcttttgaagaaaatatacaattgatctttgaacaacgaagggcgtggggtgcccagctgcacacagttgaaaatccgtgtataacttttgactctccaaaagcctactgttaaccagaagccttaccaataacatatagtcaattagcacatgttttgcatattatatgtattacatactgtattcttacaataagctaaataaaaaatattactaagaaaatcac

SEQ ID NO: 147213 - DNA, 587 bp, Homo sapiens
  Payload ID: 9118
  Gene Symbol: LARP1
  Gene Name: La ribonucleoprotein domain family, member 1
  ENST ID: ENST00000518742
  CDS Start-End: 1-587
gagctttacagtgtggatcaggaactgctcaaagactacatcaagcgccagattgaatactacttcagcgtggacaatttagagcgagacttcttcctgcgaaggaaaatggatgctgatggtttcctacccatcacccttattgcttccttccaccgagtgcaggcccttaccactgacatttcactcatctttgcggccctaaaggacagcaaggtggtggagatcgttgatgagaaagttcgtaggagggaggaaccagaaaagtggcctcttcccccaatagtggattattcacagactgatttctcccagcttctcaactgccctgaatttgttccccgtcagcactaccaaaaggagacagtcaccccagtgccaaccaaaacagaggaggtcagcaacctaaagacactacccaagggcctgtctgccagcctgcctgacctggattctgagaactggattgaagtgaagaagaggcctcggccatccccagcacggcccaagaagtcagaggagtccagattttcccacctgacctctctgcctcagcagctgccttcccagcagctgatgtccaagga

SEQ ID NO: 147214 - DNA, 4891 bp, Homo sapiens
  Payload ID: 9119
  Gene Symbol: LARP1B
  Gene Name: La ribonucleoprotein domain family, member 1B
  Uniprot ID: Q659C4
  ENST ID: ENST00000326639
  CDS Start-End: 212-2956
gctctcgggccgcccctcttcgccgtctccacgcctccgcgggcagttaccagctttggctgctcgcgcctccccaactcgggtaaagctcctcggcctcggcgtgctgcgcctccgcggctgccctgcgccagaattcggttccctcaaaattataaaggcaggaaagctcaagacaaagaaatccaacaaggctagtgatttcagtgatatggagaattggccaacaccaagtgaattagtgaacactggatttcagagcgtcctcagccaaggaaataaaaagccacaaaatagaaaagaaaaagaagagaaggttgaaaagagaagtaacagtgacagcaaagaaaaccgggaaacaaaattaaatggtcctggtgaaaacgtcagtgaggatgaggctcagtcaagtaatcaacgtaagagagctaataagcacaagtgggtaccactccacttagatgttgtaagatcagagagtcaagaaagacctggatcccggaacagctcaagatgtcaacctgaagcaaataaaccaacacataacaataggagaaatgatacacgaagttggaagcgagatagagaaaaaagggatgatcaagatgacgtttccagtgtgagaagtgagggtggtaatatccgaggttcctttagaggtcgaggaagaggccgaggacggggaagaggacgaggcagaggaaatcctcgattgaactttgattattcatatggttatcaagaacatggtgaaaggactgatcaaccatttcaaacagaacttaataccagtatgatgtattactatgatgatggtacaggtgtacaggtgtatcctgtggaagaagcattgcttaaagagtatattaagcgtcaaattgaatattacttcagtgtagaaaatttggaacgagacttctttcttcggggaaagatggatgaacaaggtttcttgcctatttccctgattgctggttttcagcgtgttcaggctctcactacaaaccttaatctcatcttagaggcactgaaggatagcacagaagtagaaattgtggatgagaaaatgagaaaaaagatagaaccagaaaaatggccaattccaggccctcctccacgcagtgtgccaccaacagacttctctcaactgattgattgtccagagtttgtaccaggccaagccttttgctcacatacagagtctgccccaaattctccaagaattggaagcccattgagcccaaagaaaaacagtgaaacaagtattcttcaagcaatgtctagaggtttgtctaccagtttgcctgacttggactcagaaccttggatagaagttaaaaaaagacatcagccagccccagtgaaattgagggaatcagtgtctgtccctgaagggtcattaaatcagctatgttcttcagaagaaccagaacaagaagaacttgattttttgtttgatgaagagattgaacaaataggacgaaaaaacacatttactgattggtctgataatgattcagattatgaaattgatgaccaagacttaaacaagattttgattgtaactcagacaccaccttatgtgaaaaaacatcctggaggagatcgaacaggcacccacatgtctcgggcaaaaatcacatctgaacttgctaaagttatcaatgatggcttatactattatgaacaggatctatggatggaagaagatgaaaacaaacacacagccataaagcaagaagttgagaactttaagaagctaaatctcattagtaaagagcagtttgaaaacctaacacctgaacttccttttgagccaaaccaagaagttcctgtagcaccttcacagtccaggcaaggaggtgttcaaggagtgcttcacattcccaagaaagatttgactgatgaattagctcagaagttatttgatgtttcagaaataacttcagcagcaatggttcattcgttgcctacagcagttccagaatctcctagaattcatcctacaagaacacccaaaacacctcgaacacctaggttacaagatcctaacaaaacaccaagattttatcctgttgttaaagaaccaaaagccattgatgtaaagagtccaagaaagagaaaaacaaggcatagcacaaatccccctctagagtgtcatgttggttgggtaatggattccagagaccgtgggccaggaacatcctctgtcagcacttcaaatgcttcaccttcagaaggcgcaccactagcaggaagttatggatgtactcctcattcattcccaaagttccagcatccttctcatgaacttttgaaggaaaatggctttacccaacaagtgtaccacaagtatcgtcgaagatgcctaagtgagagaaaacgcttgggaattggtcagtcccaagaaatgaataccctctttcgtttctggtcctttttcctcagagatcacttcaataaaaaaatgtatgaggaatttagacaacttgcttgggaagatgcaaaagaaaattacaggtatgggttagaatgtctgttcaggttttatagttatggactggaaaaaaaattcaggcgagaaatttttcaggatttccaagaagaaaccaaaaaagactacgaatctggtcagctgtatggactagaaaagttttgggcttatttgaaatattctcaatctaagacacagtctattgacccaaaacttcaggaatacctctgtagttttaagaggttagaagacttccgtgttgatccccctattagtgatgaatttggaagaaaaagacattcctctacttctggtgaggagagtaatcgtcatagacttccacctaattcctctacaaagccaccaaatgctgctaaacctacatctaccagtgagcttcaggtaccaataaactctcccagaaggaatatttcaccggagtccagtgacaattcacattaaacagtgctgcctgtgtcctgtggtctcaagaaatggtgaaatgcctgagaaatagactcttatgaaagttctttgtccttgaagtcaacatttacatcagtatttatttggggaaaatcttctggtgtttaattgtgataataagaaagaagaaaaagaaagaaaagtggtagcattttttctaacaagataaattctaaaaatgttttccctgatttcacaaacaaggatagtcttggtgaccttttatagagatcttctagtaatgtattttgatctcagatttctttttcaaagccatggttttacaaaaacagcattccttaaatatatttaaaaaacaatacaaggaatgcctaacatttcagctcatacttcttaaagaagatatagtatgttgtattctcttcttagagctttcttaaagaatccacaatccaattaccccactgtcaattcatatttgaacttaccaaaacaaaggaggattacgtatatgttttttaaattcaaaaaagaatatgaaattatacctttagtatccctttgagacatatagtttaaagaaaactttttttaaaacaaaagtaggaatatatagtaagattgtagttacaatgagtatatgcacttttgatgctaggttttgcttttctccccccagtcatatctcatgatttccacagttgttgtattggtgtggagttttctgaattggctataagctgattacatattagaggtttatttttatgattctatataaacgtgcacgagtaatttaaaacctgcattgggattgattggaatattgtcctaaattaattaaatcttgcactgttttgaatgcatctgctatttatacatctgcaagtgggtatgtcataaggagtcagattatctttaatttaaaatgaatacttagttttacctttttgtttattttttgtttaattttgtttttataaatgttttcaagagttatagcaaattgatttctaatttttattgctattacaactgatgtaaatggtagtttcagtttttgtgagatttaaaaaaataaagcacttattctgaattttttgaattgatttttaattatttttatttagaatatagttgaaaagctgtaatattcagttttgctagtaaaagaccatttttttgtgtgaatgaagtttcaattataaacttacattcactttattgagcactacataatttacagatattttgttgtattggcaaaagcaagtggtttccatatgctaaattaattgtattttctttttgagcagattggatatcttgttcttataaattataatattgaaatacatataatctttggatggatgggctgttaatttgtaaataggttttcattaagttatttctcatgataagtaataatcagcagttttataatatttactatttggagggtcattttgatgctttaaattgcagaaatagtcaaatttgaatattcagaaaataaatttatttagatatattgtaaagagggtgcaaaacaagcaatgggttagaataatagatcttcaagtcttttcttaaatggggtatgtagttccagcttttcagtgagaaatttccaaaccgtgcttattagctttaaatggtctcttgaaatgatcataaatttttctcagtgtcctttttgtgttgaacacatatatctgaaacctgtatttaaccagatatttctactcaactgaatatacaagtgtaaatttgattggaaaattgtatattataaatgaaaatacaataatcaggagttttgtggtttgtattaattagtagttttatcatatttttattataaaagtaatacatgtacattgggaaatttagaaaagcacaaagaagaaaataaagtacttgttataaaaagaagaaaaaccaaaa

SEQ ID NO: 147215 - DNA, 2151 bp, Homo sapiens
  Payload ID: 9119
  Gene Symbol: LARP1B
  Gene Name: La ribonucleoprotein domain family, member 1B
  Uniprot ID: Q659C4
  ENST ID: ENST00000394288
  CDS Start-End: 145-1152
gcctccccaactcgggtaaagctcctcggcctcggcgtgctgcgcctccgcggctgccctgcgccagaattcggttccctcaaaattataaaggcaggaaagctcaagacaaagaaatccaacaaggctagtgatttcagtgatatggagaattggccaacaccaagtgaattagtgaacactggatttcagagcgtcctcagccaaggaaataaaaagccacaaaatagaaaagaaaaagaagagaaggttgaaaagagaagtaacagtgacagcaaagaaaaccgggaaacaaaattaaatggtcctggtgaaaacgtcagtgaggatgaggctcagtcaagtaatcaacgtaagagagctaataagcacaagtgggtaccactccacttagatgttgtaagatcagagagtcaagaaagacctggatcccggaacagctcaagatgtcaacctgaagcaaataaaccaacacataacaataggagaaatgatacacgaagttggaagcgagatagagaaaaaagggatgatcaagatgacgtttccagtgtgagaagtgagggtggtaatatccgaggttcctttagaggtcgaggaagaggccgaggacggggaagaggacgaggcagaggaaatcctcgattgaactttgattattcatatggttatcaagaacatggtgaaaggactgatcaaccatttcaaacagaacttaataccagtatgatgtattactatgatgatggtacaggtgtacaggtgtatcctgtggaagaagcattgcttaaagagtatattaagcgtcaaattgaatattacttcagtgtagaaaatttggaacgagacttctttcttcggggaaagatggatgaacaaggtttcttgcctatttccctgattgctggttttcagcgtgttcaggctctcactacaaaccttaatctcatcttagaggcactgaaggatagcacagaagtagaaattgtggatgagaaaatgagaaaaaagatagaaccagaaaaatggccaattccaggccctcctccacgcagtgtgccaccaacagacttctctcaactgattgattgtccagagtttgtaccaggccaagccttttgctcacatacagtcagggtgatgatcttctgaagctcttggatgtcatttgatcggaatatgcagtggaataggtgactcactgaaatgcctttataaatactggaacaaatcctgctgcaaaaatgaaagcgatcagactgtcttctgttcaagaatgtctattcccacctcttggtggaggaagttgggccaacactgcagtggagataaccacctttgcgataatgagagacagaccagaggactgctactctttttataggagctgcctatttctgtgtaattggcctgggctgcatgggctgcttttattcatggtgggaaagttaattattattattctggaaataccgcaagattatgttttctgtttccagggttatgtacttgtgtccagatgaataaagcagaaaaagaggggattgagtagcatttcccagattcttaagtactttgctattcgatttgcctttcagtgtagtgtacattgtaaaactcagatattgtcatgatgtttcacttggacataagacttattaatgtggtcacttaaggggtaaggaatttaagaactggatgaggttatttcttcctttactcttcaaaatgtatttttgatacatcagtatgagaggacgtcccatcaacaaagcatcgatgatggacagtctcacactatttttatcatatgtttctttgtcagccttctgcttctaatcccagtaagcaacttggacaggcattttaaaagctgaagaaaagtgacattattttagctagtggtttttaatttattttttgttaagatataatgggtgattatataagttagatttatttatgatatcaacttgggtccaagatgatagttttagctagcttatgaacattgggttcacaaggcattgggtaagttagataaaatagcatatactttctctgcagggtaggtaagataggtcagtcaagttggtaatgcctgtccattaaccatttatgcatactaataaaattataagaataaaatca

SEQ ID NO: 147216 - DNA, 2707 bp, Homo sapiens
  Payload ID: 9119
  Gene Symbol: LARP1B
  Gene Name: La ribonucleoprotein domain family, member 1B
  ENST ID: ENST00000432347
  CDS Start-End: 132-1208
gggtaaagctcctcggcctcggcgtgctgcgcctccgcggctgccctgcgccagaattcggttccctcaaaattataaaggcaggaaagctcaagacaaagaaatccaacaaggctagtgatttcagtgatatggagaattggccaacaccaagtgaattagtgaacactggatttcagagcgtcctcagccaaggaaataaaaagccacaaaatagaaaagaaaaagaagagaaggttgaaaagagaagtaacagtgacagcaaagaaaaccgggaaacaaaattaaatggtcctggtgaaaacgtcagtgaggatgaggctcagtcaagtaatcaacgtaagagagctaataagcacaagtgggtaccactccacttagatgttgtaagatcagagagtcaagaaagacctggatcccggaacagctcaagatgtcaacctgaagcaaataaaccaacacataacaataggagaaatgatacacgaagttggaagcgagatagagaaaaaagggatgatcaagatgacgtttccagtgtgagaagtgagggtggtaatatccgaggttcctttagaggtcgaggaagaggccgaggacggggaagaggacgaggcagaggaaatcctcgattgaactttgattattcatatggttatcaagaacatggtgaaaggactgatcaaccatttcaaacagaacttaataccagtatgatgtattactatgatgatggtacaggtgtacaggtgtatcctgtggaagaagcattgcttaaagagtatattaagcgtcaaattgaatattacttcagtgtagaaaatttggaacgagacttctttcttcggggaaagatggatgaacaaggtttcttgcctatttccctgattgctggttttcagcgtgttcaggctctcactacaaaccttaatctcatcttagaggcactgaaggatagcacagaagtagaaattgtggatgagaaaatgagaaaaaagatagaaccagaaaaatggccaattccaggccctcctccacgcagtgtgccaccaacagacttctctcaactgattgattgtccagagtttgtaccaggccaagccttttgctcacatacaggtaacatcttttcttctagagcaaacgatgtaacagtgggttatttggtccaatttacttacttatttatttattttcagtttatttagatttgataggaaaattaaagctaactgaaagacttttgagtcccattttgtattcatattgcctcactcacagagttacaaattaaataaggatttaagaattatgaggaaagctgtcttatgtttcttgttcttaaattatatgtgtactttgtcatgtatggagtttctatcttttatttttactaaataactatagatatgtatcgttttcccctgtaaaattggaatagtatgattggattattctaaaaaggtcttatactcaagagtggggtagtcttcctttaattttgttaccaatacgctttaatcttgtcttggaaagataaaatgacctgcattctaaattagaattggggttctgtttaatttggttgtgtttagaatttccaaaagatttaatgttaataattttttcctggatcatttttaagacattccctcttgggaaaaaatgtgtgcttaaacttttttcagtcagggtgatgatcttctgaagctcttggatgtcatttgatcggaatatgcagtggaataggtgactcactgaaatgcctttataaatactggaacaaatcctgctgcaaaaatgaaagcgatcagactgtcttctgttcaagaatgtctattcccacctcttggtggaggaagttgggccaacactgcagtggagataaccacctttgcgataatgagagacagaccagaggactgctactctttttataggagctgcctatttctgtgtaattggcctgggctgcatgggctgcttttattcatggtgggaaagttaattattattattctggaaataccgcaagattatgttttctgtttccagggttatgtacttgtgtccagatgaataaagcagaaaaagaggggattgagtagcatttcccagattcttaagtactttgctattcgatttgcctttcagtgtagtgtacattgtaaaactcagatattgtcatgatgtttcacttggacataagacttattaatgtggtcacttaaggggtaaggaatttaagaactggatgaggttatttcttcctttactcttcaaaatgtatttttgatacatcagtatgagaggacgtcccatcaacaaagcatcgatgatggacagtctcacactatttttatcatatgtttctttgtcagccttctgcttctaatcccagtaagcaacttggacaggcattttaaaagctgaagaaaagtgacattattttagctagtggtttttaatttattttttgttaagatataatgggtgattatataagttagatttatttatgatatcaacttgggtccaagatgatagttttagctagcttatgaacattgggttcacaaggcattgggtaagttagataaaatagcatatactttctctgcagggtaggtaagataggtcagtcaagttggtaatgcctgtccattaaccatttatgcatactaataaaattataagaataaaatca

SEQ ID NO: 147217 - DNA, 3105 bp, Homo sapiens
  Payload ID: 9119
  Gene Symbol: LARP1B
  Gene Name: La ribonucleoprotein domain family, member 1B
  ENST ID: ENST00000512292
  CDS Start-End: 194-1750
ttcgccgtctccacgcctccgcgggcagttaccagctttggctgctcgcgcctccccaactcgggtaaagctcctcggcctcggcgtgctgcgcctccgcggctgccctgcgccagaattcggttccctcaaaattataaaggcaggaaagctcaagacaaagaaatccaacaaggctagtgatttcagtgatatggagaattggccaacaccaagtgaattagtgaacactggatttcagagcgtcctcagccaaggaaataaaaagccacaaaatagaaaagaaaaagaagagaaggttgaaaagagaagtaacagtgacagcaaagaaaaccgggaaacaaaattaaatggtcctggtgaaaacgtcagtgaggatgaggctcagtcaagtaatcaacgtaagagagctaataagcacaagtgggtaccactccacttagatgttgtaagatcagagagtcaagaaagacctggatcccggaacagctcaagatgtcaacctgaagcaaataaaccaacacataacaataggagaaatgatacacgaagttggaagcgagatagagaaaaaagggatgatcaagatgacgtttccagtgtgagaagtgagggtggtaatatccgaggttcctttagaggtcgaggaagaggccgaggacggggaagaggacgaggcagaggaaatcctcgattgaactttgattattcatatggttatcaagaacatggtgaaaggactgatcaaccatttcaaacagaacttaataccagtatgatgtattactatgatgatggtacaggtgtacaggtgtatcctgtggaagaagcattgcttaaagagtatattaagcgtcaaattgaatattacttcagtgtagaaaatttggaacgagacttctttcttcggggaaagatggatgaacaaggtttcttgcctatttccctgattgctggttttcagcgtgttcaggctctcactacaaaccttaatctcatcttagaggcactgaaggatagcacagaagtagaaattgtggatgagaaaatgagaaaaaagatagaaccagaaaaatggccaattccaggccctcctccacgcagtgtgccaccaacagacttctctcaactgattgattgtccagagtttgtaccaggccaagccttttgctcacatacagagtctgccccaaattctccaagaattggaagcccattgagcccaaagaaaaacagtgaaacaagtattcttcaagcaatgtctagaggtttgtctaccagtttgcctgacttggactcagaaccttggatagaagttaaaaaaagacatcagccagccccagtgaaattgagggaatcagtgtctgtccctgaagggtcattaaatcagctatgttcttcagaagaaccagaacaagaagaacttgattttttgtttgatgaagagattgaacaaataggacgaaaaaacacatttactgattggtctgataatgattcagattatgaaattgatgaccaagacttaaacaagattttgattgtaactcagacaccaccttatgtgaaaaaacatcctggaggagatcgaacaggcacccacatgtctcgggcaaaaatcacatctgaacttgctaaagttatcaatgatggcttatactattatgaacaggatctatggatggaagaagatgaaaacaaacacacagccataaaggtgacaatactgagaacgccctttctcgtatgaaagaataaaaacaagttactgtggacaggcttaatttatatgctcattgcttacctggctctcaccgcagctgtatgagccagtggctttagagagcactcttcttgcctctttctgttttccccacttagtctatggtgcatgatctaaggtagtggaaatggttgtggacaaactataaatgactaaactggatgattatctctcttggtctagtcattactgtggtgctagggttactttttacaatcttgttctaattttttttaacttcttgcatttcatcccagatcctggttcctatcctagttattaaggtaaaatagagaaccagaatagtttatcaggtatctgcattccttcaatatgaattataatggtacagatatggggataaaaggaatctttttctgctattaagtttatcagaaaagccccaatagttaaatatttgttttcagtagagggtataataagggaaaattatataacattatatgccaaataggaaactgatcttggttggaaataaagttgtaggaagaaaagctagccaattagtggctgagtagaggggactgcctgtcggtggggcttcatatcatcaacaagaagtgtgctagccttcttggctcctcatttcttttcttcctggaatccccagtactgcttttagccttctgtaaccactgccttcttggaggacctgcctcaggctatgatagcttgttacgtgacttagagccttagcagttctctgcctgtcctactgctgtgggaaaggaagtgtgtttttataatgcttctcagttgaaagtctttcctagtgtaagcattgctattttatttgtaatacttaggttcggtaagtaatacctatcttaaatccttttagaacagagatactagtacattctactaataatcagttaaaattatccttcccccattctctatccctttacccagctttgtttttcaccatagcatatatcattatctataattctatatattttacttacttttattctcttggagaaaaaactatggatgtaataccaatgacaataggatttttttctatttgttcattactattgtatttctagtgttagaatagtttctggcacaaagaaatgttcaattcatgtttgtgggtaaataaattatggagtaaacattatgcattaaccaaaggaacccaaccattgtgtataatatttgttctgtgggaaatgttttcagtctgccaagtaacaaatttgtaagccaacttgagaaacatcctatttgtaggtgattatttccttaaattatagacaataattaaaagccatgtattgagttcttga

SEQ ID NO: 147218 - DNA, 1513 bp, Homo sapiens
  Payload ID: 9119
  Gene Symbol: LARP1B
  Gene Name: La ribonucleoprotein domain family, member 1B
  ENST ID: ENST00000507259
  CDS Start-End: 1-78
aatgatggcttatactattatgaacaggatctatggatggaagaagatgaaaacaaacacacagccataaagatttgactgatgaattagctcagaagttatttgatgtttcagaaataacttcagcagcaatggttcattcgttgcctacagcagttccagaatctcctagaattcatcctacaagaacacccaaaacacctcgaacacctaggttacaagatcctaacaaaacaccaagattttatcctgttgttaaagaaccaaaagccattgatgtaaagagtccaagaaagagaaaaacaaggcatagcacaaatccccctctagagtgtcatgttggttgggtaatggattccagagaccgtgggccaggaacatcctctgtcagcacttcaaatgcttcaccttcagaaggcgcaccactagcaggaagttatggatgtactcctcattcattcccaaagttccagcatccttctcatgaacttttgaaggaaaatggctttacccaacaagtgtaccacaagtatcgtcgaagatgcctaagtgagagaaaacgcttgggaattggtcagtcccaagaaatgaataccctctttcgtttctggtcctttttcctcagagatcacttcaataaaaaaatgtatgaggaatttagacaacttgcttgggaagatgcaaaagaaaattacaggtatgggttagaatgtctgttcaggttttatagttatggactggaaaaaaaattcaggcgagaaatttttcaggatttccaagaagaaaccaaaaaagactacgaatctggtcagctgtatggactagaaaagttttgggcttatttgaaatattctcaatctaagacacagtctattgacccaaaacttcaggaatacctctgtagttttaagaggttagaagacttccgtgttgataatcaccatgatcgattacttctgctcatcataaacatctagttcctaagcaggatatgagaatctgccttcctgtgacctctcctgggctcagtgacactccagtcgccgccccaccccacatcaatgccacttccaagtttgacttgcatcttacaaaccatatttctgtttactttttttctgccctgggacatttttaataacttttagataacaacttcaacaaaaatttacctcccaccaagagaagttgtctttattgtgagaagttgtctttattcccaagaaggggaataacttactctttaagtcagttttattacaggtaaatttgtaccagctttttcctctacttgtgttaagacctgtctccaatagacattccaattgaggattgtggaaatagcaaattacattggtgtctgcccaccactgaaggcaaaaagctggtttatctaggccacaggcagagcccgcaggggaggcaggtaacttctcggaccaccagattatcttgatcttcagccagctttattgttgttctacattttaataaacactacatgtttatttta

SEQ ID NO: 147219 - DNA, 1593 bp, Homo sapiens
  Payload ID: 9119
  Gene Symbol: LARP1B
  Gene Name: La ribonucleoprotein domain family, member 1B
  ENST ID: ENST00000507377
  CDS Start-End: 1-1474
agaagagaaggttgaaaagagaagtaacagtgacagcaaagaaaaccgggaaacaaaattaaatggtcctggtgaaaacgtcagtgaggatgaggctcagtcaagtaatcaacgtaagagagctaataagcacaagtgggtaccactccacttagatgttgtaagatcagagagtcaagaaagacctggatcccggaacagctcaagatgtcaacctgaagcaaataaaccaacacataacaataggagaaatgatacacgaagttggaagcgagatagagaaaaaagggatgatcaagatgacgtttccagtgtgagaagtgagggtggtaatatccgaggttcctttagaggtcgaggaagaggccgaggacggggaagaggacgaggcagaggaaatcctcgattgaactttgattattcatatggttatcaagaacatggtgaaaggactgatcaaccatttcaaacagaacttaataccagtatgatgtattactatgatgatggtacaggtgtacaggtgtatcctgtggaagaagcattgcttaaagagtatattaagcgtcaaattgaatattacttcagtgtagaaaatttggaacgagacttctttcttcggggaaagatggatgaacaaggtttcttgcctatttccctgattgctggttttcagcgtgttcaggctctcactacaaaccttaatctcatcttagaggcactgaaggatagcacagaagtagaaattgtggatgagaaaatgagaaaaaagatagaaccagaaaaatggccaattccaggccctcctccacgcagtgtgccaccaacagacttctctcaactgattgattgtccagagtttgtaccaggccaagccttttgctcacatacagagtctgccccaaattctccaagaattggaagcccattgagcccaaagaaaaacagtgaaacaagtattcttcaagcaatgtctagaggtttgtctaccagtttgcctgacttggactcagaaccttggatagaagttaaaaaaagacatcagccagccccagtgaaattgagggaatcagtgtctgtccctgaagggtcattaaatcagctatgttcttcagaagaaccagaacaagaagaacttgattttttgtttgatgaagagattgaacaaataggacgaaaaaacacatttactgattggtctgataatgattcagattatgaaattgatgaccaagacttaaacaagattttgattgtaactcagacaccaccttatgtgaaaaaacatcctggaggagatcgaacaggcacccacatgtctcgggcaaaaatcacatctgaacttgctaaagttatcaatgatggcttatactattatgaacaggatctatggatggaagaagatgaaaacaaacacacagccataaaggtaattgtttctggccaacatctttctactgatgctttgttttgattgtatgttgctgtttatattttctcaaacttgaggctctattttatgaaatgttgaatataaatacattgtatttaacttgaaaaattcctggaaatatacctgataattaccacctg

SEQ ID NO: 147220 - DNA, 1891 bp, Homo sapiens
  Payload ID: 9119
  Gene Symbol: LARP1B
  Gene Name: La ribonucleoprotein domain family, member 1B
  ENST ID: ENST00000508819
  CDS Start-End: 168-1891
agttaccagctttggctgctcgcgcctccccaactcgggtaaagctcctcggcctcggcgtgctgcgcctccgcggctgccctgcgccagaattcggttccctcaaaattataaaggcaggaaagctcaagacaaagaaatccaacaaggctagtgatttcagtgatatggagaattggccaacaccaagtgaattagtgaacactggatttcagagcgtcctcagccaaggaaataaaaagccacaaaatagaaaagaaaaagaagagaaggttgaaaagagaagtaacagtgacagcaaagaaaaccgggaaacaaaattaaatggtcctggtgaaaacgtcagtgaggatgaggctcagtcaagtaatcaacgtaagagaggttggaagcgagatagagaaaaaagggatgatcaagatgacgtttccagtgtgagaagtgagggtggtaatatccgaggttcctttagaggtcgaggaagaggccgaggacggggaagaggacgaggcagaggaaatcctcgattgaactttgattattcatatggttatcaagaacatggtgaaaggactgatcaaccatttcaaacagaacttaataccagtatgatgtattactatgatgatggtacaggtgtacaggtgtatcctgtggaagaagcattgcttaaagagtatattaagcgtcaaattgaatattacttcagtgtagaaaatttggaacgagacttctttcttcggggaaagatggatgaacaaggtttcttgcctatttccctgattgctggttttcagcgtgttcaggctctcactacaaaccttaatctcatcttagaggcactgaaggatagcacagaagtagaaattgtggatgagaaaatgagaaaaaagatagaaccagaaaaatggccaattccaggccctcctccacgcagtgtgccaccaacagacttctctcaactgattgattgtccagagtttgtaccaggccaagccttttgctcacatacagagtctgccccaaattctccaagaattggaagcccattgagcccaaagaaaaacagtgaaacaagtattcttcaagcaatgtctagaggtttgtctaccagtttgcctgacttggactcagaaccttggatagaagttaaaaaaagacatcagccagccccagtgaaattgagggaatcagtgtctgtccctgaagggtcattaaatcagctatgttcttcagaagaaccagaacaagaagaacttgattttttgtttgatgaagagattgaacaaataggacgaaaaaacacatttactgattggtctgataatgattcagattatgaaattgatgaccaagacttaaacaagattttgattgtaactcagacaccaccttatgtgaaaaaacatcctggaggagatcgaacaggcacccacatgtctcgggcaaaaatcacatctgaacttgctaaagttatcaatgatggcttatactattatgaacaggatctatggatggaagaagatgaaaacaaacacacagccataaagcaagaagttgagaactttaagaagctaaatctcattagtaaagagcagtttgaaaacctaacacctgaacttccttttgagccaaaccaagaagttcctgtagcaccttcacagtccaggcaagatttgactgatgaattagctcagaagttatttgatgtttcagaaataacttcagcagcaatggttcattcgttgcctacagcagttccagaatctcctagaattcatcctacaagaacacccaaaacacctcgaacacctaggttacaagatcctaacaaaacaccaagattttatcctgttgttaaagaaccaaaagccattgatgtaaagagtcc

SEQ ID NO: 147221 - DNA, 6296 bp, Homo sapiens
  Payload ID: 9120
  Gene Symbol: LARP4
  Gene Name: La ribonucleoprotein domain family, member 4
  Uniprot ID: Q71RC2
  ENST ID: ENST00000293618
  CDS Start-End: 203-2164
agacccggaagcagttgttgtttcaagggaggtgggactgggcgggtcaggccgcagcggctgacggcaggggaggagccgggtccactgccgggtggaggggcaaggcgagtgtgtgtccttatcctagcaattggggcgcgggcctgtgagccagttggagttgcggcggcgggaacgattgggctgagcagaggacgacatgttgcttttcgtggagcaggtagcatctaaaggaactggtttaaatcctaatgccaaagtatggcaagaaattgctcctggaaatactgatgccaccccagtaactcatggaactgaaagctcttggcatgaaatagcagctacatcaggtgctcatcctgagggtaatgcagagctctcagaagatatatgtaaagaatatgaagtaatgtattcttcatcttgtgaaaccacaagaaatactacaggcattgaagaatcaactgatgggatgattttaggaccagaagatctgagttaccaaatatatgatgtttccggagaaagcaattcagcagtttctacagaagacctaaaagaatgtctgaagaaacaattagaattctgtttttcacgagaaaatttgtcaaaggatctttacttgatatctcaaatggatagtgatcagttcatcccaatttggacagttgccaacatggaagaaataaaaaagttgactacagaccctgatctaattcttgaagtgttaagatcttctcccatggtacaagttgatgagaagggtgagaaagtgagaccaagtcataagcgttgtattgtaattcttagagagattcctgaaacaacaccaatagaggaagtgaaaggtttgttcaaaagtgaaaactgccccaaagtgataagctgtgagtttgcacacaatagcaactggtatatcactttccagtcagacacagatgcacaacaggcttttaaatacttaagagaagaagttaaaacatttcagggcaagccaattatggcaaggataaaagccatcaatacattttttgctaagaatggttatcgattaatggattctagtatctatagtcaccccattcaaactcaagcacagtatgcctccccagtctttatgcagcctgtatataatcctcaccaacagtactcggtctatagtattgtgcctcagtcttggtctccaaatcctacaccttactttgaaacaccactggctccctttcccaatggtagttttgtgaatggctttaattcgccaggatcttataaaacaaatgctgctgctatgaatatgggtcgaccattccaaaaaaatcggagaactctcttcagaggtcgaagacgacgagaagatgacaggatctcaagacctcatccttcaacagctgaatcaaaggctccaacaccaaagtttgacttattagcctcaaattttccacctttacctggaagttcatcaagaatgccaggtgaactcgttttggagaataggatgtctgatgttgttaaaggtgtctacaaagaaaaggataatgaagagttgacaattagttgcccagtgcctgcagatgagcagacagaatgcacttctgcccagcaactcaatatgagtaccagttctccatgtgctgctgagcttactgcattaagcacaactcagcaagaaaaggatctaatagaagattcctctgttcagaaggatggtctcaatcagacaactataccagtttctcctccaagtactacaaagccatcgagggcaagtactgcttcaccatgtaataataacataaatgcagctacagctgtggctctacaggaaccccgaaagttaagttatgctgaagtgtgccagaagccccctaaagagccatcttcagttcttgtgcagccactacgggaacttcgctccaatgtggtgtctcccaccaaaaatgaagacaatggagctcctgagaactccgttgagaaaccacatgagaagccagaagcaagggctagtaaggattattctggcttccgaggcaatataatccccaggggagcagcaggaaaaatcagggaacagagacgccagtttagccatagggctatacctcagggagtgactcgacgtaatggcaaagagcaatatgtgccacccagatcaccaaagtaaaaaacaacaaaactattcaaaaacttcactctcttcccattaaacttgaactgtggctatattgaactgttttggaggggagggggtagccaggaaggaaacaagagaaagtacgtccatttcattatggattttggagttgtgagtgataggatcccaaaattcatctctaatgtggtttttaaatgctggaggattccaatcaatataaatatatatatatatatacacacacatatataaaaagtataatttttctatttttgtttttggttttaatttgcagagatttgctgccaggaatcaattttgagggttcagatttagcttggaagaaaaaaaagaaacatacatccttcagtataggagatgagggaatgagagaaaatattttttgaagaagcatttctgtaaaattagaaattactttttttaatctatttaaagtttggcttgaagaatgccatctctgactatatggccttgtattgcaaagcggatcagtggctggggtgcctgttgtgggtgtgagtgtgtacaagagcgattgaagccaaatctgttgtcatgttagtaaatgatttgaaaactgaatgtaatacttgagtagatttttttttctagtttgaaatttagtctgtctttttgaccttactaatatttcatttaacaagttgtaaaactctgattgtacttagagatgtgactaccaatcagtttgatactcaaggaaagggggttattcaagaaattgaaaatttcatcttggacctcagtgcataggtcaaatggatttcagaggtttaaacttccctgtgattcccccgaatacccccaaaatgagaaacaaaattttttttcttactccatttgttactctctgttctttgactgcccacccacagaaaagcaaaataaccaactacctactcaattgtgtgtttgtaattgctttgagcagtctagtcaaatcatataaattgttctaaatttcagaattgaacattgaagtattaactcttctgttcacacatttagaattttagctcccaagatggtagggcagactgaccgtacagtaatttatttgtcgttagtgttaaagattaagcatagtaactgactcttaagtgttaaataatgtagaagtaaaaaaattttttttaaaggcttaatttgggaggggggacttatttctgtttacagtgtattaccttccttccctcctcttctccccccacacccaacaaaatacagtttggaattcactgaaacagtaccagcaagtcatgagattttttagtaaagatgagaaagatggttgaagaaaattagtgcataatttctcagtgaataaagttgtagctctcatatactaaatagacaagtttacatgctgttatttagaaaatgactaaaatattaaaaaccgtgttgtgttaatctgttttaagtcataccatgttcagagttctatgtaaggtgggttttatttttcttttaagggatagtttgtaatagtaagaactgtcccatatgttagtaaattacatatgtacaaattgaaactgtaaattgtgaacactggaaagcaccattgtgacatagagtaaacatcttagtaatatattaaagtgaatgtaaatggtggttaaaattacattactgtgaaattcatcttccaactctaagttaagctttggagatacatgttagtggttaactgttaagagctttgaaaacactgcacatatctgtacaagccagaattactatttctttgacttattattagcttggcagttgcttttgatttgattgttttatgacatggtatactactatatttactcagtttgaaactattcatttctacacactatttttaaaaattgcctactaggtgaaacataacaataaaactacctgtgctgaaatttgggggaagtttaggtcctttaaaaaaacatattaatcattgactacatctatgataaaagtgcttattttggtttactaagataatgcagttggtggaaatgataaacgttttaagtgttaacatcctttgaatgcgttggatttcagagaataaacattttgtaaaaatcacttggtaaggattataaacttaattactgcacttaaaatgaaacattactttttttaaacaatgtgtcacaaatgtaggtctgtattacttgtatgcttgtgtgacttactgttagtccagctctaaaaatttaaaggttgtaattgaaatacaagaaaagagccttcttttagaagaaagcaagtatatttttgcttttacttcaaatgttatttaaagtagaaatttaatttgtagatataacctttaaaaattttctcattaagacaatgtttttaatttaatttgcctcattacatctaatagttcccatttgatggcatgtatagggaagagtgagagagtgtgtgtgtgtgtatgtgtgtgtaatatttatatatattcacagtatgtatttagcatttattttattacagcagatttaaagtttgtatctaaataatgcctatgagttgtgtgaagctcttggcttttttccaacgttactttgtaactaatgagggtggatgttcattgtagtttatttatttggttctttagatggaggaatttaaaaaatcaaatttttctcttcacctttatgacttgacatttccttgatctgttggaggctaaaagtaggtataaatgatattgaatgttgggtatagtgatactctgccatagttcttactgcatgaagagaacaagagtcacacaagttcaccactttgcacttcatagagaaggtacatagagacattgcaaaacctgtctccatttgctatcctgataattaaggttttcataatacctagggcctgtctctgagtaattttaattttgccaaatacactgacatttaaaatagtgatccatctaaatttttttcagctgggttttgaggaatataagagctttcaatgataaaggtttgttgtagttgtcttatgtgctgaatttgcagatgatcagatgctgtgcagaattctgatttatttttgtttcctaaaattaagatagcttgaatattatttcacattcctttttcttttttaaataaacaggtttgctttggaaaggcttaatgatggaatgttagcatcttcactagggtaaagaagaacaaaaagaatgttgctggaacgtaaaatagtatttaaaagttaatgaacacttctctagttttcttagttatggccttaataattagtctcttggcttaaatgtccactggttttactttgacacagttgaacaacactggggttaagtctctggtatttaggctggcaatatatatattaaccatattttaaaagtaccaattttgtttttacagaaaagataaaactcaaaagagaacagtgtattccttctgaggggcttttataaattattaactataatatatgatggattttttcctaattttttatatttccttacaattttggtggccattaatttaactttaggcttttgggcatatgctagtctgagcttccgaaaagatacatatatgtttcccttttcattagctgaatgaggatattttaagaagttgaaagagaatttattttcaagttgtgagtaaatcctcctttgaaattcacctgattattagataacttaaagtttatttttaaaagctgacaactttttatgaatcttcgagttgacagttcctaaaagcgtaactcagatattaatgggctgtgtattaaatggttttattttcagttttgcagcacagaacactgttgaaatatccatatcaacttgatttttttaacctaattcaggtgtcctttgcatctcttaaatgttgggggtgggggtcagagccagttatccggcttctgttttgtcgattgcttagatttgttcctgttgtcaaaactgttacccccaaaattggtgtgacacatgctcatgcataaaatgttaaaatgagtacatccttgtatttgtatttgttttcaacatcgccaaggtgctatgggaaattaacaaaattagaaaaaaaataaaattatt

SEQ ID NO: 147222 - DNA, 3621 bp, Homo sapiens
  Payload ID: 9120
  Gene Symbol: LARP4
  Gene Name: La ribonucleoprotein domain family, member 4
  Uniprot ID: Q71RC2
  ENST ID: ENST00000347328
  CDS Start-End: 27-1988
aacgattgggctgagcagaggacgacatgttgcttttcgtggagcaggtagcatctaaaggaactggtttaaatcctaatgccaaagtatggcaagaaattgctcctggaaatactgatgccaccccagtaactcatggaactgaaagctcttggcatgaaatagcagctacatcaggtgctcatcctgagggtaatgcagagctctcagaagatatatgtaaagaatatgaagtaatgtattcttcatcttgtgaaaccacaagaaatactacaggcattgaagaatcaactgatgggatgattttaggaccagaagatctgagttaccaaatatatgatgtttccggagaaagcaattcagcagtttctacagaagacctaaaagaatgtctgaagaaacaattagaattctgtttttcacgagaaaatttgtcaaaggatctttacttgatatctcaaatggatagtgatcagttcatcccaatttggacagttgccaacatggaagaaataaaaaagttgactacagaccctgatctaattcttgaagtgttaagatcttctcccatggtacaagttgatgagaagggtgagaaagtgagaccaagtcataagcgttgtattgtaattcttagagagattcctgaaacaacaccaatagaggaagtgaaaggtttgttcaaaagtgaaaactgccccaaagtgataagctgtgagtttgcacacaatagcaactggtatatcactttccagtcagacacagatgcacaacaggcttttaaatacttaagagaagaagttaaaacatttcagggcaagccaattatggctccctttcccaatggtagttttgtgaatggctttaattcgccaggatcttataaaacaaatgctgctgctatgaatatgggtcgaccattccaaaaaaatcgtgtgaagcctcagtttaggtcatctggtggttcagaacactcaacagagggctctgtatccttgggggatggacagttgaacagatatagttcaagaaactttccagctgaacggcataaccccacagtaactgggcatcaggagcaaacttaccttcagaaggagacttccactttgcaggtggaacagaatggggactatggtaggggcaggagaactctcttcagaggtcgaagacgacgagaagatgacaggatctcaagacctcatccttcaacagctgaatcaaaggctccaacaccaaagtttgacttattagcctcaaattttccacctttacctggaagttcatcaagaatgccaggtgaactcgttttggagaataggatgtctgatgttgttaaaggtgtctacaaagaaaaggataatgaagagttgacaattagttgcccagtgcctgcagatgagcagacagaatgcacttctgcccagcaactcaatatgagtaccagttctccatgtgctgctgagcttactgcattaagcacaactcagcaagaaaaggatctaatagaagattcctctgttcagaaggatggtctcaatcagacaactataccagtttctcctccaagtactacaaagccatcgagggcaagtactgcttcaccatgtaataataacataaatgcagctacagctgtggctctacaggaaccccgaaagttaagttatgctgaagtgtgccagaagccccctaaagagccatcttcagttcttgtgcagccactacgggaacttcgctccaatgtggtgtctcccaccaaaaatgaagacaatggagctcctgagaactccgttgagaaaccacatgagaagccagaagcaagggctagtaaggattattctggcttccgaggcaatataatccccaggggagcagcaggaaaaatcagggaacagagacgccagtttagccatagggctatacctcagggagtgactcgacgtaatggcaaagagcaatatgtgccacccagatcaccaaagtaaaaaacaacaaaactattcaaaaacttcactctcttcccattaaacttgaactgtggctatattgaactgttttggaggggagggggtagccaggaaggaaacaagagaaagtacgtccatttcattatggattttggagttgtgagtgataggatcccaaaattcatctctaatgtggtttttaaatgctggaggattccaatcaatataaatatatatatatatatacacacacatatataaaaagtataatttttctatttttgtttttggttttaatttgcagagatttgctgccaggaatcaattttgagggttcagatttagcttggaagaaaaaaaagaaacatacatccttcagtataggagatgagggaatgagagaaaatattttttgaagaagcatttctgtaaaattagaaattactttttttaatctatttaaagtttggcttgaagaatgccatctctgactatatggccttgtattgcaaagcggatcagtggctggggtgcctgttgtgggtgtgagtgtgtacaagagcgattgaagccaaatctgttgtcatgttagtaaatgatttgaaaactgaatgtaatacttgagtagatttttttttctagtttgaaatttagtctgtctttttgaccttactaatatttcatttaacaagttgtaaaactctgattgtacttagagatgtgactaccaatcagtttgatactcaaggaaagggggttattcaagaaattgaaaatttcatcttggacctcagtgcataggtcaaatggatttcagaggtttaaacttccctgtgattcccccgaatacccccaaaatgagaaacaaaattttttttcttactccatttgttactctctgttctttgactgcccacccacagaaaagcaaaataaccaactacctactcaattgtgtgtttgtaattgctttgagcagtctagtcaaatcatataaattgttctaaatttcagaattgaacattgaagtattaactcttctgttcacacatttagaattttagctcccaagatggtagggcagactgaccgtacagtaatttatttgtcgttagtgttaaagattaagcatagtaactgactcttaagtgttaaataatgtagaagtaaaaaaattttttttaaaggcttaatttgggaggggggacttatttctgtttacagtgtattaccttccttccctcctcttctccccccacacccaacaaaatacagtttggaattcactgaaacagtaccagcaagtcatgagattttttagtaaagatgagaaagatggttgaagaaaattagtgcataatttctcagtgaataaagttgtagctctcatatactaaatagacaagtttacatgctgttatttagaaaatgactaaaatattaaaaaccgtgttgtgttaatctgttttaagtcataccatgttcagagttctatgtaaggtgggttttatttttcttttaagggatagtttgtaatagtaagaactgtcccatatgttagtaaattacatatgtacaaattgaaactgtaaattgtgaacactggaaagcaccattgtgacatagagtaaacatcttagtaatatattaa

SEQ ID NO: 147223 - DNA, 6427 bp, Homo sapiens
  Payload ID: 9120
  Gene Symbol: LARP4
  Gene Name: La ribonucleoprotein domain family, member 4
  Uniprot ID: Q71RC2
  ENST ID: ENST00000398473
  CDS Start-End: 113-2287
ccgggtggaggggcaaggcgagtgtgtgtccttatcctagcaattggggcgcgggcctgtgagccagttggagttgcggcggcgggaacgattgggctgagcagaggacgacatgttgcttttcgtggagcaggtagcatctaaaggaactggtttaaatcctaatgccaaagtatggcaagaaattgctcctggaaatactgatgccaccccagtaactcatggaactgaaagctcttggcatgaaatagcagctacatcaggtgctcatcctgagggtaatgcagagctctcagaagatatatgtaaagaatatgaagtaatgtattcttcatcttgtgaaaccacaagaaatactacaggcattgaagaatcaactgatgggatgattttaggaccagaagatctgagttaccaaatatatgatgtttccggagaaagcaattcagcagtttctacagaagacctaaaagaatgtctgaagaaacaattagaattctgtttttcacgagaaaatttgtcaaaggatctttacttgatatctcaaatggatagtgatcagttcatcccaatttggacagttgccaacatggaagaaataaaaaagttgactacagaccctgatctaattcttgaagtgttaagatcttctcccatggtacaagttgatgagaagggtgagaaagtgagaccaagtcataagcgttgtattgtaattcttagagagattcctgaaacaacaccaatagaggaagtgaaaggtttgttcaaaagtgaaaactgccccaaagtgataagctgtgagtttgcacacaatagcaactggtatatcactttccagtcagacacagatgcacaacaggcttttaaatacttaagagaagaagttaaaacatttcagggcaagccaattatggcaaggataaaagccatcaatacattttttgctaagaatggttatcgattaatggattctagtatctatagtcaccccattcaaactcaagcacagtatgcctccccagtctttatgcagcctgtatataatcctcaccaacagtactcggtctatagtattgtgcctcagtcttggtctccaaatcctacaccttactttgaaacaccactggctccctttcccaatggtagttttgtgaatggctttaattcgccaggatcttataaaacaaatgctgctgctatgaatatgggtcgaccattccaaaaaaatcgtgtgaagcctcagtttaggtcatctggtggttcagaacactcaacagagggctctgtatccttgggggatggacagttgaacagatatagttcaagaaactttccagctgaacggcataaccccacagtaactgggcatcaggagcaaacttaccttcagaaggagacttccactttgcaggtggaacagaatggggactatggtaggggcaggagaactctcttcagaggtcgaagacgacgagaagatgacaggatctcaagacctcatccttcaacagctgaatcaaaggctccaacaccaaagtttgacttattagcctcaaattttccacctttacctggaagttcatcaagaatgccaggtgaactcgttttggagaataggatgtctgatgttgttaaaggtgtctacaaagaaaaggataatgaagagttgacaattagttgcccagtgcctgcagatgagcagacagaatgcacttctgcccagcaactcaatatgagtaccagttctccatgtgctgctgagcttactgcattaagcacaactcagcaagaaaaggatctaatagaagattcctctgttcagaaggatggtctcaatcagacaactataccagtttctcctccaagtactacaaagccatcgagggcaagtactgcttcaccatgtaataataacataaatgcagctacagctgtggctctacaggaaccccgaaagttaagttatgctgaagtgtgccagaagccccctaaagagccatcttcagttcttgtgcagccactacgggaacttcgctccaatgtggtgtctcccaccaaaaatgaagacaatggagctcctgagaactccgttgagaaaccacatgagaagccagaagcaagggctagtaaggattattctggcttccgaggcaatataatccccaggggagcagcaggaaaaatcagggaacagagacgccagtttagccatagggctatacctcagggagtgactcgacgtaatggcaaagagcaatatgtgccacccagatcaccaaagtaaaaaacaacaaaactattcaaaaacttcactctcttcccattaaacttgaactgtggctatattgaactgttttggaggggagggggtagccaggaaggaaacaagagaaagtacgtccatttcattatggattttggagttgtgagtgataggatcccaaaattcatctctaatgtggtttttaaatgctggaggattccaatcaatataaatatatatatatatatacacacacatatataaaaagtataatttttctatttttgtttttggttttaatttgcagagatttgctgccaggaatcaattttgagggttcagatttagcttggaagaaaaaaaagaaacatacatccttcagtataggagatgagggaatgagagaaaatattttttgaagaagcatttctgtaaaattagaaattactttttttaatctatttaaagtttggcttgaagaatgccatctctgactatatggccttgtattgcaaagcggatcagtggctggggtgcctgttgtgggtgtgagtgtgtacaagagcgattgaagccaaatctgttgtcatgttagtaaatgatttgaaaactgaatgtaatacttgagtagatttttttttctagtttgaaatttagtctgtctttttgaccttactaatatttcatttaacaagttgtaaaactctgattgtacttagagatgtgactaccaatcagtttgatactcaaggaaagggggttattcaagaaattgaaaatttcatcttggacctcagtgcataggtcaaatggatttcagaggtttaaacttccctgtgattcccccgaatacccccaaaatgagaaacaaaattttttttcttactccatttgttactctctgttctttgactgcccacccacagaaaagcaaaataaccaactacctactcaattgtgtgtttgtaattgctttgagcagtctagtcaaatcatataaattgttctaaatttcagaattgaacattgaagtattaactcttctgttcacacatttagaattttagctcccaagatggtagggcagactgaccgtacagtaatttatttgtcgttagtgttaaagattaagcatagtaactgactcttaagtgttaaataatgtagaagtaaaaaaattttttttaaaggcttaatttgggaggggggacttatttctgtttacagtgtattaccttccttccctcctcttctccccccacacccaacaaaatacagtttggaattcactgaaacagtaccagcaagtcatgagattttttagtaaagatgagaaagatggttgaagaaaattagtgcataatttctcagtgaataaagttgtagctctcatatactaaatagacaagtttacatgctgttatttagaaaatgactaaaatattaaaaaccgtgttgtgttaatctgttttaagtcataccatgttcagagttctatgtaaggtgggttttatttttcttttaagggatagtttgtaatagtaagaactgtcccatatgttagtaaattacatatgtacaaattgaaactgtaaattgtgaacactggaaagcaccattgtgacatagagtaaacatcttagtaatatattaaagtgaatgtaaatggtggttaaaattacattactgtgaaattcatcttccaactctaagttaagctttggagatacatgttagtggttaactgttaagagctttgaaaacactgcacatatctgtacaagccagaattactatttctttgacttattattagcttggcagttgcttttgatttgattgttttatgacatggtatactactatatttactcagtttgaaactattcatttctacacactatttttaaaaattgcctactaggtgaaacataacaataaaactacctgtgctgaaatttgggggaagtttaggtcctttaaaaaaacatattaatcattgactacatctatgataaaagtgcttattttggtttactaagataatgcagttggtggaaatgataaacgttttaagtgttaacatcctttgaatgcgttggatttcagagaataaacattttgtaaaaatcacttggtaaggattataaacttaattactgcacttaaaatgaaacattactttttttaaacaatgtgtcacaaatgtaggtctgtattacttgtatgcttgtgtgacttactgttagtccagctctaaaaatttaaaggttgtaattgaaatacaagaaaagagccttcttttagaagaaagcaagtatatttttgcttttacttcaaatgttatttaaagtagaaatttaatttgtagatataacctttaaaaattttctcattaagacaatgtttttaatttaatttgcctcattacatctaatagttcccatttgatggcatgtatagggaagagtgagagagtgtgtgtgtgtgtatgtgtgtgtaatatttatatatattcacagtatgtatttagcatttattttattacagcagatttaaagtttgtatctaaataatgcctatgagttgtgtgaagctcttggcttttttccaacgttactttgtaactaatgagggtggatgttcattgtagtttatttatttggttctttagatggaggaatttaaaaaatcaaatttttctcttcacctttatgacttgacatttccttgatctgttggaggctaaaagtaggtataaatgatattgaatgttgggtatagtgatactctgccatagttcttactgcatgaagagaacaagagtcacacaagttcaccactttgcacttcatagagaaggtacatagagacattgcaaaacctgtctccatttgctatcctgataattaaggttttcataatacctagggcctgtctctgagtaattttaattttgccaaatacactgacatttaaaatagtgatccatctaaatttttttcagctgggttttgaggaatataagagctttcaatgataaaggtttgttgtagttgtcttatgtgctgaatttgcagatgatcagatgctgtgcagaattctgatttatttttgtttcctaaaattaagatagcttgaatattatttcacattcctttttcttttttaaataaacaggtttgctttggaaaggcttaatgatggaatgttagcatcttcactagggtaaagaagaacaaaaagaatgttgctggaacgtaaaatagtatttaaaagttaatgaacacttctctagttttcttagttatggccttaataattagtctcttggcttaaatgtccactggttttactttgacacagttgaacaacactggggttaagtctctggtatttaggctggcaatatatatattaaccatattttaaaagtaccaattttgtttttacagaaaagataaaactcaaaagagaacagtgtattccttctgaggggcttttataaattattaactataatatatgatggattttttcctaattttttatatttccttacaattttggtggccattaatttaactttaggcttttgggcatatgctagtctgagcttccgaaaagatacatatatgtttcccttttcattagctgaatgaggatattttaagaagttgaaagagaatttattttcaagttgtgagtaaatcctcctttgaaattcacctgattattagataacttaaagtttatttttaaaagctgacaactttttatgaatcttcgagttgacagttcctaaaagcgtaactcagatattaatgggctgtgtattaaatggttttattttcagttttgcagcacagaacactgttgaaatatccatatcaacttgatttttttaacctaattcaggtgtcctttgcatctcttaaatgttgggggtgggggtcagagccagttatccggcttctgttttgtcgattgcttagatttgttcctgttgtcaaaactgttacccccaaaattggtgtgacacatgctcatgcataaaatgttaaaatgagtacatccttgtatttgtatttgttttcaacatcgccaaggtgctatgggaaattaacaaaattagaaaaaaaataaaattattaaaaagca

SEQ ID NO: 147224 - DNA, 4000 bp, Homo sapiens
  Payload ID: 9120
  Gene Symbol: LARP4
  Gene Name: La ribonucleoprotein domain family, member 4
  Uniprot ID: Q71RC2
  ENST ID: ENST00000429001
  CDS Start-End: 155-2347
aggccgcagcggctgacggcaggggaggagccgggtccactgccgggtggaggggcaaggcgagtgtgtgtccttatcctagcaattggggcgcgggcctgtgagccagttggagttgcggcggcgggaacgattgggctgagcagaggacgacatgttgcttttcgtggagcaggtagcatctaaaggaactggtttaaatcctaatgccaaagtatggcaagaaattgctcctggaaatactgatgccaccccagtaactcatggaactgaaagctcttggcatgaaatagcagctacatcaggtgctcatcctgaggtgtctgtctttaatacaggtaatgcagagctctcagaagatatatgtaaagaatatgaagtaatgtattcttcatcttgtgaaaccacaagaaatactacaggcattgaagaatcaactgatgggatgattttaggaccagaagatctgagttaccaaatatatgatgtttccggagaaagcaattcagcagtttctacagaagacctaaaagaatgtctgaagaaacaattagaattctgtttttcacgagaaaatttgtcaaaggatctttacttgatatctcaaatggatagtgatcagttcatcccaatttggacagttgccaacatggaagaaataaaaaagttgactacagaccctgatctaattcttgaagtgttaagatcttctcccatggtacaagttgatgagaagggtgagaaagtgagaccaagtcataagcgttgtattgtaattcttagagagattcctgaaacaacaccaatagaggaagtgaaaggtttgttcaaaagtgaaaactgccccaaagtgataagctgtgagtttgcacacaatagcaactggtatatcactttccagtcagacacagatgcacaacaggcttttaaatacttaagagaagaagttaaaacatttcagggcaagccaattatggcaaggataaaagccatcaatacattttttgctaagaatggttatcgattaatggattctagtatctatagtcaccccattcaaactcaagcacagtatgcctccccagtctttatgcagcctgtatataatcctcaccaacagtactcggtctatagtattgtgcctcagtcttggtctccaaatcctacaccttactttgaaacaccactggctccctttcccaatggtagttttgtgaatggctttaattcgccaggatcttataaaacaaatgctgctgctatgaatatgggtcgaccattccaaaaaaatcgtgtgaagcctcagtttaggtcatctggtggttcagaacactcaacagagggctctgtatccttgggggatggacagttgaacagatatagttcaagaaactttccagctgaacggcataaccccacagtaactgggcatcaggagcaaacttaccttcagaaggagacttccactttgcaggtggaacagaatggggactatggtaggggcaggagaactctcttcagaggtcgaagacgacgagaagatgacaggatctcaagacctcatccttcaacagctgaatcaaaggctccaacaccaaagtttgacttattagcctcaaattttccacctttacctggaagttcatcaagaatgccaggtgaactcgttttggagaataggatgtctgatgttgttaaaggtgtctacaaagaaaaggataatgaagagttgacaattagttgcccagtgcctgcagatgagcagacagaatgcacttctgcccagcaactcaatatgagtaccagttctccatgtgctgctgagcttactgcattaagcacaactcagcaagaaaaggatctaatagaagattcctctgttcagaaggatggtctcaatcagacaactataccagtttctcctccaagtactacaaagccatcgagggcaagtactgcttcaccatgtaataataacataaatgcagctacagctgtggctctacaggaaccccgaaagttaagttatgctgaagtgtgccagaagccccctaaagagccatcttcagttcttgtgcagccactacgggaacttcgctccaatgtggtgtctcccaccaaaaatgaagacaatggagctcctgagaactccgttgagaaaccacatgagaagccagaagcaagggctagtaaggattattctggcttccgaggcaatataatccccaggggagcagcaggaaaaatcagggaacagagacgccagtttagccatagggctatacctcagggagtgactcgacgtaatggcaaagagcaatatgtgccacccagatcaccaaagtaaaaaacaacaaaactattcaaaaacttcactctcttcccattaaacttgaactgtggctatattgaactgttttggaggggagggggtagccaggaaggaaacaagagaaagtacgtccatttcattatggattttggagttgtgagtgataggatcccaaaattcatctctaatgtggtttttaaatgctggaggattccaatcaatataaatatatatatatatatacacacacatatataaaaagtataatttttctatttttgtttttggttttaatttgcagagatttgctgccaggaatcaattttgagggttcagatttagcttggaagaaaaaaaagaaacatacatccttcagtataggagatgagggaatgagagaaaatattttttgaagaagcatttctgtaaaattagaaattactttttttaatctatttaaagtttggcttgaagaatgccatctctgactatatggccttgtattgcaaagcggatcagtggctggggtgcctgttgtgggtgtgagtgtgtacaagagcgattgaagccaaatctgttgtcatgttagtaaatgatttgaaaactgaatgtaatacttgagtagatttttttttctagtttgaaatttagtctgtctttttgaccttactaatatttcatttaacaagttgtaaaactctgattgtacttagagatgtgactaccaatcagtttgatactcaaggaaagggggttattcaagaaattgaaaatttcatcttggacctcagtgcataggtcaaatggatttcagaggtttaaacttccctgtgattcccccgaatacccccaaaatgagaaacaaaattttttttcttactccatttgttactctctgttctttgactgcccacccacagaaaagcaaaataaccaactacctactcaattgtgtgtttgtaattgctttgagcagtctagtcaaatcatataaattgttctaaatttcagaattgaacattgaagtattaactcttctgttcacacatttagaattttagctcccaagatggtagggcagactgaccgtacagtaatttatttgtcgttagtgttaaagattaagcatagtaactgactcttaagtgttaaataatgtagaagtaaaaaaattttttttaaaggcttaatttgggaggggggacttatttctgtttacagtgtattaccttccttccctcctcttctccccccacacccaacaaaatacagtttggaattcactgaaacagtaccagcaagtcatgagattttttagtaaagatgagaaagatggttgaagaaaattagtgcataatttctcagtgaataaagttgtagctctcatatactaaatagacaagtttacatgctgttatttagaaaatgactaaaatattaaaaaccgtgttgtgttaatctgttttaagtcataccatgttcagagttctatgtaaggtgggttttatttttcttttaagggatagtttgtaatagtaagaactgtcccatatgttagtaaattacatatgtacaaattgaaactgtaaattgtgaacactggaaagcaccattgtgacatagagtaaacatcttagtaatatattaaagtgaatgtaaatggtggtt

SEQ ID NO: 147225 - DNA, 559 bp, Homo sapiens
  Payload ID: 9120
  Gene Symbol: LARP4
  Gene Name: La ribonucleoprotein domain family, member 4
  ENST ID: ENST00000517559
  CDS Start-End: 307-559
actttccgggccgtacacgccgcggaaccggcagataggctgacacagcacctgggccgagcaggcctgcagcttccctctgcgcgctcacaacactctaggaagctatgggagcaggtagcatctaaaggaactggtttaaatcctaatgccaaagtatggcaagaaattgctcctggaaatactgatgccaccccagtaactcatggaactgaaagctcttggcatgaaatagcagctacatcaggtgctcatcctgagggtaatgcagagctctcagaagatatatgtaaagaatatgaagtaatgtattcttcatcttgtgaaaccacaagaaatactacaggcattgaagaatcaactgatgggatgattttaggaccagaagatctgagttaccaaatatatgatgtttccggagaaagcaattcagcagtttctacagaagacctaaaagaatgtctgaagaaacaattagaattctgtttttcacgagaaaatttgtcaaaggatctttacttgatatctcaaatggatagtgatcagttcatcccaattt

SEQ ID NO: 147226 - DNA, 2853 bp, Homo sapiens
  Payload ID: 9120
  Gene Symbol: LARP4
  Gene Name: La ribonucleoprotein domain family, member 4
  Uniprot ID: Q71RC2
  ENST ID: ENST00000518444
  CDS Start-End: 83-2254
cttatcctagcaattggggcgcgggcctgtgagccagttggagttgcggcggcgggaacgattgggctgagcagaggacgacatgttgcttttcgtggaggtagcatctaaaggaactggtttaaatcctaatgccaaagtatggcaagaaattgctcctggaaatactgatgccaccccagtaactcatggaactgaaagctcttggcatgaaatagcagctacatcaggtgctcatcctgagggtaatgcagagctctcagaagatatatgtaaagaatatgaagtaatgtattcttcatcttgtgaaaccacaagaaatactacaggcattgaagaatcaactgatgggatgattttaggaccagaagatctgagttaccaaatatatgatgtttccggagaaagcaattcagcagtttctacagaagacctaaaagaatgtctgaagaaacaattagaattctgtttttcacgagaaaatttgtcaaaggatctttacttgatatctcaaatggatagtgatcagttcatcccaatttggacagttgccaacatggaagaaataaaaaagttgactacagaccctgatctaattcttgaagtgttaagatcttctcccatggtacaagttgatgagaagggtgagaaagtgagaccaagtcataagcgttgtattgtaattcttagagagattcctgaaacaacaccaatagaggaagtgaaaggtttgttcaaaagtgaaaactgccccaaagtgataagctgtgagtttgcacacaatagcaactggtatatcactttccagtcagacacagatgcacaacaggcttttaaatacttaagagaagaagttaaaacatttcagggcaagccaattatggcaaggataaaagccatcaatacattttttgctaagaatggttatcgattaatggattctagtatctatagtcaccccattcaaactcaagcacagtatgcctccccagtctttatgcagcctgtatataatcctcaccaacagtactcggtctatagtattgtgcctcagtcttggtctccaaatcctacaccttactttgaaacaccactggctccctttcccaatggtagttttgtgaatggctttaattcgccaggatcttataaaacaaatgctgctgctatgaatatgggtcgaccattccaaaaaaatcgtgtgaagcctcagtttaggtcatctggtggttcagaacactcaacagagggctctgtatccttgggggatggacagttgaacagatatagttcaagaaactttccagctgaacggcataaccccacagtaactgggcatcaggagcaaacttaccttcagaaggagacttccactttgcaggtggaacagaatggggactatggtaggggcaggagaactctcttcagaggtcgaagacgacgagaagatgacaggatctcaagacctcatccttcaacagctgaatcaaaggctccaacaccaaagtttgacttattagcctcaaattttccacctttacctggaagttcatcaagaatgccaggtgaactcgttttggagaataggatgtctgatgttgttaaaggtgtctacaaagaaaaggataatgaagagttgacaattagttgcccagtgcctgcagatgagcagacagaatgcacttctgcccagcaactcaatatgagtaccagttctccatgtgctgctgagcttactgcattaagcacaactcagcaagaaaaggatctaatagaagattcctctgttcagaaggatggtctcaatcagacaactataccagtttctcctccaagtactacaaagccatcgagggcaagtactgcttcaccatgtaataataacataaatgcagctacagctgtggctctacaggaaccccgaaagttaagttatgctgaagtgtgccagaagccccctaaagagccatcttcagttcttgtgcagccactacgggaacttcgctccaatgtggtgtctcccaccaaaaatgaagacaatggagctcctgagaactccgttgagaaaccacatgagaagccagaagcaagggctagtaaggattattctggcttccgaggcaatataatccccaggggagcagcaggaaaaatcagggaacagagacgccagtttagccatagggctatacctcagggagtgactcgacgtaatggcaaagagcaatatgtgccacccagatcaccaaagtaaaaaacaacaaaactattcaaaaacttcactctcttcccattaaacttgaactgtggctatattgaactgttttggaggggagggggtagccaggaaggaaacaagagaaagtacgtccatttcattatggattttggagttgtgagtgataggatcccaaaattcatctctaatgtggtttttaaatgctggaggattccaatcaatataaatatatatatatatatacacacacatatataaaaagtataatttttctatttttgtttttggttttaatttgcagagatttgctgccaggaatcaattttgagggttcagatttagcttggaagaaaaaaaagaaacatacatccttcagtataggagatgagggaatgagagaaaatattttttgaagaagcatttctgtaaaattagaaattactttttttaatctatttaaagtttggcttgaagaatgccatctctgactatatggccttgtattgcaaagcggatcagtggctggggtgcctgttgtgggtgtgagtgtgtacaagagcgattgaagccaaatctgttgtcatgttagtaaatgatttgaaaactgaatgtaa

SEQ ID NO: 147227 - DNA, 2068 bp, Homo sapiens
  Payload ID: 9120
  Gene Symbol: LARP4
  Gene Name: La ribonucleoprotein domain family, member 4
  ENST ID: ENST00000520064
  CDS Start-End: 1-1476
gaagtgaaaggtttgttcaaaagtgaaaactgccccaaagtgataagctgtgagtttgcacacaatagcaactggtatatcactttccagtcagacacagatgcacaacaggcttttaaatacttaagagaagaagttaaaacatttcagggcaagccaattatggcaaggataaaagccatcaatacattttttgctaagaatggttatcgattaatggattctagtatctatagtcaccccattcaaactcaagcacagtatgcctccccagtctttatgcagcctgtatataatcctcaccaacagtactcggtctatagtattgtgcctcagtcttggtctccaaatcctacaccttactttgaaacaccactggctccctttcccaatggtagttttgtgaatggctttaattcgccaggatcttataaaacaaatgctgctgctatgaatatgggtcgaccattccaaaaaaatcgtgtgaagcctcagtttaggtcatctggtggttcagaacactcaacagagggctctgtatccttgggggatggacagttgaacagatatagttcaagaaactttccagctgaacggcataaccccacagtaactgggcatcaggagcaaacttaccttcagaaggagacttccactttgcaggtggaacagaatggggactatggtaggggcaggagaactctcttcagaggtcgaagacgacgagaagatgacaggatctcaagacctcatccttcaacagctgaatcaaaggctccaacaccaaagtttgacttattagcctcaaattttccacctttacctggaagttcatcaagaatgccaggtgaactcgttttggagaataggatgtctgatgttgttaaaggtgtctacaaagaaaaggataatgaagagttgacaattagttgcccagtgcctgcagatgagcagacagaatgcacttctgcccagcaactcaatatgagtaccagttctccatgtgctgctgagcttactgcattaagcacaactcagcaagaaaaggatctaatagaagattcctctgttcagaaggatggtctcaatcagacaactataccagtttctcctccaagtactacaaagccatcgagggaaccccgaaagttaagttatgctgaagtgtgccagaagccccctaaagagccatcttcagttcttgtgcagccactacgggaacttcgctccaatgtggtgtctcccaccaaaaatgaagacaatggagctcctgagaactccgttgagaaaccacatgagaagccagaagcaagggctagtaaggattattctggcttccgaggcaatataatccccaggggagcagcaggaaaaatcagggaacagagacgccagtttagccatagggctatacctcagggagtgactcgacgtaatggcaaagagcaatatgtgccacccagatcaccaaagtaaaaaacaacaaaactattcaaaaacttcactctcttcccattaaacttgaactgtggctatattgaactgttttggaggggagggggtagccaggaaggaaacaagagaaagtacgtccatttcattatggattttggagttgtgagtgataggatcccaaaattcatctctaatgtggtttttaaatgctggaggattccaatcaatataaatatatatatatatatacacacacatatataaaaagtataatttttctatttttgtttttggttttaatttgcagagatttgctgccaggaatcaattttgagggttcagatttagcttggaagaaaaaaaagaaacatacatccttcagtataggagatgagggaatgagagaaaatattttttgaagaagcatttctgtaaaattagaaattactttttttaatctatttaaagtttggcttgaagaatgccatctctgactatatggccttgtattgcaaagcggatcagtggctggggtgcctgttgtgggtgtgagtgtgtacaagagcgattgaagccaaatctgttgtcatgttagtaaatgatttgaaaactg

SEQ ID NO: 147228 - DNA, 1577 bp, Homo sapiens
  Payload ID: 9120
  Gene Symbol: LARP4
  Gene Name: La ribonucleoprotein domain family, member 4
  Uniprot ID: Q71RC2
  ENST ID: ENST00000522085
  CDS Start-End: 104-1441
ggggcaaggcgagtgtgtgtccttatcctagcaattggggcgcgggcctgtgagccagttggagttgcggcggcgggaacgattgggctgagcagaggacgacatgttgcttttcgtggagcaggtagcatctaaaggaactggtttaaatcctaatgccaaagtatggcaagaaattgctcctggaaatactgatgccaccccagtaactcatggaactgaaagctcttggcatgaaatagcagctacatcaggtgctcatcctgagggtaatgcagagctctcagaagatatatgtaaagaatatgaagtaatgtattcttcatcttgtgaaaccacaagaaatactacaggcattgaagaatcaactgatgggatgattttaggaccagaagatctgagttaccaaatatatgatgtttccggagaaagcaattcagcagtttctacagaagacctaaaagaatgtctgaagaaacaattagaattctgtttttcacgagaaaatttgtcaaaggatctttacttgatatctcaaatggatagtgatcagttcatcccaatttggacagttgccaacatggaagaaataaaaaagttgactacagaccctgatctaattcttgaagtgttaagatcttctcccatggtacaagttgatgagaagggtgagaaagtgagaccaagtcataagcgttgtattgtaattcttagagagattcctgaaacaacaccaatagaggaagtgaaaggtttgttcaaaagtgaaaactgccccaaagtgataagctgtgagtttgcacacaatagcaactggtatatcactttccagtcagacacagatgcacaacaggcttttaaatacttaagagaagaagttaaaacatttcagggcaagccaattatggcaaggataaaagccatcaatacattttttgctaagaatggttatcgattaatggattctagtatctatagtcaccccattcaaactcaagcacagtatgcctccccagtctttatgcagcctgtatataatcctcaccaacagtactcggtctatagtattgtgcctcagtcttggtctccaaatcctacaccttactttgaaacaccactggctccctttcccaatggtagttttgtgaatggctttaattcgccaggatcttataaaacaaatgctgctgctatgaatatgggtcgaccattccaaaaaaatcgtgtgaagcctcagtttaggtcatctggtggttcagaacactcaacagagggctctgtatccttgggggatggacagttgaacagatatagttcaagaaactttccagctgaacggcataaccccacagtaactgggcatcaggagcaaacttaccttcagaaggagacttccactttgcaggtggaacagaatggggactatggtaggggcaggtaagaaaataaagtacctgaaaacctttgataataatgtgatcatcctgaataattgaagaacatgatcttcataataattaaatgagcatttaattattggtatatggttatattaaataaatacgttattttcagaa

SEQ ID NO: 147229 - DNA, 588 bp, Homo sapiens
  Payload ID: 9120
  Gene Symbol: LARP4
  Gene Name: La ribonucleoprotein domain family, member 4
  ENST ID: ENST00000523389
  CDS Start-End: 478-588
cgggcctgtgagccagttggagttgcggcggcgggaacgattgggctgagcagaggacgacatgttgcttttcgtggagatgacaaaaccgagccccagaggttaaagtaactttacttagtaaaagtaaagtagtttaactgggatttagatccaggtcatgctgatgtcaaatcatggacgggatgttagcaattcaggcctgtccgactccccagcatttatggggttaagtggcatgggatttctgtttctgatagtaaatagcaggtagcatctaaaggaactggtttaaatcctaatgccaaagtatggcaagaaattgctcctggaaatactgatgccaccccagtaactcatggaactgaaagctcttggcatgaaatagcagctacatcaggtgctcatcctgaggtgtctgtctttaatacaggtaatgcagagctctcagaagatatatgtaaagaatatgaagtaatgtattcttcatcttgtgaaaccacaagaaatactacaggcattgaagaatcaactgatgggatgattttaggaccagaagatctgagttaccaaatatatgatgtttcc

SEQ ID NO: 147230 - DNA, 1578 bp, Homo sapiens
  Payload ID: 9120
  Gene Symbol: LARP4
  Gene Name: La ribonucleoprotein domain family, member 4
  ENST ID: ENST00000518561
  CDS Start-End: 315-1442
tgtgagccagttggagttgcggcggcgggaacgattgggctgagcagaggacgacatgttgcttttcgtggagcatttatggggttaagtggcatgggatttctgtttctgatagtaaatagcaggtagcatctaaaggaactggtttaaatcctaatgccaaagtatggcaagaaattgctcctggaaatactgatgccaccccagtaactcatggaactgaaagctcttggcatgaaatagcagctacatcaggtgctcatcctgagggtaatgcagagctctcagaagatatatgtaaagaatatgaagtaatgtattcttcatcttgtgaaaccacaagaaatactacaggcattgaagaatcaactgatgggatgattttaggaccagaagatctgagttaccaaatatatgatgtttccggagaaagcaattcagcagtttctacagaagacctaaaagaatgtctgaagaaacaattagaattctgtttttcacgagaaaatttgtcaaaggatctttacttgatatctcaaatggatagtgatcagttcatcccaatttggacagttgccaacatggaagaaataaaaaagttgactacagaccctgatctaattcttgaagtgttaagatcttctcccatggtacaagttgatgagaagggtgagaaagtgagaccaagtcataagcgttgtattgtaattcttagagagattcctgaaacaacaccaatagaggaagtgaaaggtttgttcaaaagtgaaaactgccccaaagtgataagctgtgagtttgcacacaatagcaactggtatatcactttccagtcagacacagatgcacaacaggcttttaaatacttaagagaagaagttaaaacatttcagggcaagccaattatggcaaggataaaagccatcaatacattttttgctaagaatggttatcgattaatggattctagtatctatagtcaccccattcaaactcaagcacagtatgcctccccagtctttatgcagcctgtatataatcctcaccaacagtactcggtctatagtattgtgcctcagtcttggtctccaaatcctacaccttactttgaaacaccactggctccctttcccaatggtagttttgtgaatggctttaattcgccaggatcttataaaacaaatgctgctgctatgaatatgggtcgaccattccaaaaaaatcgtgtgaagcctcagtttaggtcatctggtggttcagaacactcaacagagggctctgtatccttgggggatggacagttgaacagatatagttcaagaaactttccagctgaacggcataaccccacagtaactgggcatcaggagcaaacttaccttcagaaggagacttccactttgcaggtggaacagaatggggactatggtaggggcaggtaagaaaataaagtacctgaaaacctttgataataatgtgatcatcctgaataattgaagaacatgatcttcataataattaaatgagcatttaattattggtatatggttatattaaataaatacgttattttcagaa

SEQ ID NO: 147231 - DNA, 584 bp, Homo sapiens
  Payload ID: 9120
  Gene Symbol: LARP4
  Gene Name: La ribonucleoprotein domain family, member 4
  ENST ID: ENST00000548174
  CDS Start-End: 238-584
gggtccactgccgggtggaggggcaaggcgagtgtgtgtccttatcctagcaattggggcgcgggcctgtgagccagttggagttgcggcggcgggaacgattgggctgagcagaggacgacatgttgcttttcgtggagatgacaaaaccgagccccagaggttaaagtaactttacttagtaaaagtaaagtagtttaactgggatttagatccaggtcatgctgatgtcaaatcatggacgggatgttagcaattcaggcctgtccgactccccagcaggtagcatctaaaggaactggtttaaatcctaatgccaaagtatggcaagaaattgctcctggaaatactgatgccaccccagtaactcatggaactgaaagctcttggcatgaaatagcagctacatcaggtgctcatcctgagggtaatgcagagctctcagaagatatatgtaaagaatatgaagtaatgtattcttcatcttgtgaaaccacaagaaatactacaggcattgaagaatcaactgatgggatgattttaggaccagaagatctgagttaccaaatatatgatgtttccgg

SEQ ID NO: 147232 - DNA, 790 bp, Homo sapiens
  Payload ID: 9120
  Gene Symbol: LARP4
  Gene Name: La ribonucleoprotein domain family, member 4
  ENST ID: ENST00000548993
  CDS Start-End: 415-790
ctgccgggtggaggggcaaggcgagtgtgtgtccttatcctagcaattggggcgcgggcctgtgagccagttggagttgcggcggcgggaacgattgggctgagcagaggacgacatgttgcttttcgtggagtgagaatcagagcgtctactgcacctttcagatgaccgggtgccgtggctcaacacctataatcccagcacttgggatgggaggctaagcaggtagcatctaaaggaactggtttaaatcctaatgccaaagtatggcaagaaattgctcctggaaatactgatgccaccccagtaactcatggaactgaaagctcttggcatgaaatagcagctacatcaggtgctcatcctgagggtaatgcagagctctcagaagatatatgtaaagaatatgaagtaatgtattcttcatcttgtgaaaccacaagaaatactacaggcattgaagaatcaactgatgggatgattttaggaccagaagatctgagttaccaaatatatgatgtttccggagaaagcaattcagcagtttctacagaagacctaaaagaatgtctgaagaaacaattagaattctgtttttcacgagaaaatttgtcaaaggatctttacttgatatctcaaatggatagtgatcagttcatcccaatttggacagttgccaacatggaagaaataaaaaagttgactacagaccctgatctaattcttgaagtgttaagatcttctcccatggtacaagttgatgagaagggtgagaaagtgagaccaagtc

SEQ ID NO: 147233 - DNA, 722 bp, Homo sapiens
  Payload ID: 9120
  Gene Symbol: LARP4
  Gene Name: La ribonucleoprotein domain family, member 4
  ENST ID: ENST00000552445
  CDS Start-End: 540-722
gctcacaacactctaggaagctatgggaggtgaggcccgtagtggagaagaattgaaggagaaaaacggagggctgttctggtgtggcgcatttatggggttaagtggcatgggatttctgtttctgatagtaaatagacgggctcactttgttaccccggctggagtgcggtgtcacgatctcggctcactgtaacctccacctcccaggttcaagcattcctcctgtctcagctctccaagtggctgggactacagtgagaatcagagcgtctactgcacctttcagatgaccgggtgccgtggctcaacacctataatcccagcacttgggatgggaggctaagcaggtagcatctaaaggaactggtttaaatcctaatgccaaagtatggcaagaaattgctcctggaaatactgatgccaccccagtaactcatggaactgaaagctcttggcatgaaatagcagctacatcaggtgctcatcctgagggtaatgcagagctctcagaagatatatgtaaagaatatgaagtaatgtattcttcatcttgtgaaaccacaagaaatactacaggcattgaagaatcaactgatgggatgattttaggaccagaagatctgagttaccaaatatatgatgtttccggagaaagcaattcagcagtttctacagaagacctaaaagaatgtctgaagaaacaattagaattctgtttt

SEQ ID NO: 147234 - DNA, 586 bp, Homo sapiens
  Payload ID: 9120
  Gene Symbol: LARP4
  Gene Name: La ribonucleoprotein domain family, member 4
  ENST ID: ENST00000551886
  CDS Start-End: 80-586
atcctagcaattggggcgcgggcctgtgagccagttggagttgcggcggcgggaacgattgggctgagcagaggacgacatgttgcttttcgtggagcaggtagcatctaaaggaactggtttaaatcctaatgccaaagtatggcaagaaattgctcctggaaatactgatgccaccccagtaactcatggaactgaaagctcttggcatgaaatagcagctacatcaggtgctcatcctgagggtaatgcagagctctcagaagatatatgtaaagaatatgaagtaatgtattcttcatcttgtgaaaccacaagaaatactacaggcattgaagaatcaactgatgggatgattttaggaccagaagatctgagttaccaaatatatgatgtttccgaaagcaattcagcagtttctacagaagacctaaaagaatgtctgaagaaacaattagaattctgtttttcacgagaaaatttgtcaaaggatctttacttgatatctcaaatggatagtgatcagttcatcccaatttggacagttgccaacatggaagaaataaaaaagttgactacagaccct

SEQ ID NO: 147235 - DNA, 567 bp, Homo sapiens
  Payload ID: 9120
  Gene Symbol: LARP4
  Gene Name: La ribonucleoprotein domain family, member 4
  ENST ID: ENST00000550522
  CDS Start-End: 399-567
attctcctgcctcagcctcccgagtagctgggactacaggcgcccgccaccacgcccggctaattttttgtatttttagtggagacaggggtttcaccgtgttagccaggatggtctcgatctcctgaccttgtaatacgcccgcctcggccccccaaaatgctgggattacaggcgtgagccaccgcgcccagccggtttcacagcaggtagcatctaaaggaactggtttaaatcctaatgccaaagtatggcaagaaattgctcctggaaatactgatgccaccccagtaactcatggaactgaaagctcttggcatgaaatagcagctacatcaggtgctcatcctgagggtaatgcagagctctcagaagatatatgtaaagaatatgaagtaatgtattcttcatcttgtgaaaccacaagaaatactacaggcattgaagaatcaactgatgggatgattttaggaccagaagatctgagttaccaaatatatgatgtttccggagaaagcaattcagcagtttctacagaagacctaaaagaatgtctgaagaaacaat

SEQ ID NO: 147236 - DNA, 583 bp, Homo sapiens
  Payload ID: 9120
  Gene Symbol: LARP4
  Gene Name: La ribonucleoprotein domain family, member 4
  ENST ID: ENST00000550260
  CDS Start-End: 11-583
agaggacgacatgttgcttttcgtggaggtagcatctaaaggaactggtttaaatcctaatgccaaagtatggcaagaaattgctcctggaaatactgatgccaccccagtaactcatggaactgaaagctcttggcatgaaatagcagctacatcaggtgctcatcctgagggtaatgcagagctctcagaagatatatgtaaagaatatgaagtaatgtattcttcatcttgtgaaaccacaagaaatactacaggcattgaagaatcaactgatgggatgattttaggaccagaagatctgagttaccaaatatatgatgtttccgaaagcaattcagcagtttctacagaagacctaaaagaatgtctgaagaaacaattagaattctgtttttcacgagaaaatttgtcaaaggatctttacttgatatctcaaatggatagtgatcagttcatcccaatttggacagttgccaacatggaagaaataaaaaagttgactacagaccctgatctaattcttgaagtgttaagatcttctcccatggtacaagttgatgagaagggtgagaaagtgaga

SEQ ID NO: 147237 - DNA, 587 bp, Homo sapiens
  Payload ID: 9120
  Gene Symbol: LARP4
  Gene Name: La ribonucleoprotein domain family, member 4
  ENST ID: ENST00000548697
  CDS Start-End: 480-587
actgccgggtggaggggcaaggcgagtgtgtgtccttatcctagcaattggggcgcgggcctgtgagccagttggagttgcggcggcgggaacgattgggctgagcagaggacgacatgttgcttttcgtggagcatttatggggttaagtggcatgggatttctgtttctgatagtaaataggtaagcggtaaatgattccgaagaaaactccgagatgcaagaaagaacgatgaacaaagaaaatggtcaacattcatcatgtaaatttaagtaaatgttgacagcaggtagcatctaaaggaactggtttaaatcctaatgccaaagtatggcaagaaattgctcctggaaatactgatgccaccccagtaactcatggaactgaaagctcttggcatgaaatagcagctacatcaggtgctcatcctgagggtaatgcagagctctcagaagatatatgtaaagaatatgaagtaatgtattcttcatcttgtgaaaccacaagaaatactacaggcattgaagaatcaactgatgggatgattttaggaccagaagatctgagttaccaaatatatgatgtt

SEQ ID NO: 147238 - DNA, 1572 bp, Homo sapiens
  Payload ID: 9120
  Gene Symbol: LARP4
  Gene Name: La ribonucleoprotein domain family, member 4
  ENST ID: ENST00000616828
  CDS Start-End: 104-1228
ggggcaaggcgagtgtgtgtccttatcctagcaattggggcgcgggcctgtgagccagttggagttgcggcggcgggaacgattgggctgagcagaggacgacatgttgcttttcgtggagcaggtagcatctaaaggaactggtttaaatcctaatgccaaagtatggcaagaaattgctcctggaaatactgatgccaccccagtaactcatggaactgaaagctcttggcatgaaatagcagctacatcaggtgctcatcctgagggtaatgcagagctctcagaagatatatgtaaagaatatgaagtaatgtattcttcatcttgtgaaaccacaagaaatactacaggcattgaagaatcaactgatgggatgattttaggaccagaagatctgagttaccaaatatatgatgtttccggagaaagcaattcagcagtttctacagaagacctaaaagaatgtctgaagaaacaattagaattctgtttttcacgagaaaatttgtcaaaggatctttacttgatatctcaaatggatagtgatcagttcatcccaatttggacagttgccaacatggaagaaataaaaaagttgactacagaccctgatctaattcttgaagtgttaagatcttctcccatggtacaagttgatgagaagggtgagaaagtgagaccaagtcataagcgttgtattgtaattcttagagagattcctgaaacaacaccaatagaggaagtgaaaggtttgttcaaaagtgaaaactgccccaaagtgataagctgtgagtttgcacacaatagcaactggtatatcactttccagtcagacacagatgcacaacaggcttttaaatacttaagagaagaagttaaaacatttcagggcaagccaattatggcaaggataaaagccatcaatacattttttgctaagaatggttatcgattaatggattctagtatctatagtcaccccattcaaactcaagcacagtatgcctccccagtctttatgcagcctgtatataatcctcaccaacagtactcggtctatagtattgtgcctcagtcttggtctccaaatcctacaccttactttgaaacaccactggctccctttcccaatggtagttttgtgaatggctttaattcgccaggatcttataaaacaaatgctgctgctatgaatatgggtcgaccattccaaaaaatcgtgtgaagcctcagtttaggtcatctggtggttcagaacactcaacagagggctctgtatccttgggggatggacagttgaacagatatagttcaagaaactttccagctgaacggcataaccccacagtaactgggcatcaggagcaaacttaccttcagaaggagacttccactttgcaggtggaacagaatggggactatggtaggggcaggtaagaaaataaagtacctgaaaacctttgataataatgtgatcatcctgaataattgaagaacatgatcttcataataattaaatgagcatttaattattggtatatggttatattaaataaatacgttattttc

SEQ ID NO: 147239 - DNA, 856 bp, Homo sapiens
  Payload ID: 9120
  Gene Symbol: LARP4
  Gene Name: La ribonucleoprotein domain family, member 4
  ENST ID: ENST00000615080
  CDS Start-End: 290-856
cttatcctagcaattggggcgcgggcctgtgagccagttggagttgcggcggcgggaacgattgggctgagcagaggacgacatgttgcttttcgtggaggtagcatctaaaggaactggtttaaatcctaatgccaaagtatggcaagaaattgctcctggaaatactgatgccaccccagtaactcatggaactgaaagctcttggcatgaaatagcagctacatcaggtgctcatcctgagggtaatgcagagctctcagaagatatatgtaaagaatatgaagtaatgtattcttcatcttgtgaaaccacaagaaatactacaggcattgaagaatcaactgatgggatgattttaggaccagaagatctgagttaccaaatatatgatgtttccggagaaagcaattcagcagtttctacagaagacctaaaagaatgtctgaagaaacaattagaattctgtttttcacgagaaaatttgtcaaaggatctttacttgatatctcaaatggatagtgatcagttcatcccaatttggacagttgccaacatggaagaaataaaaaagttgactacagaccctgatctaattcttgaagtgttaagatcttctcccatggtacaagttgatgagaagggtgagaaagtgagaccaagtcataagcgttgtattgtaattcttagagagattcctgaaacaacaccaatagaggaagtgaaaggtttgttcaaaagtgaaaactgccccaaagtgataagctgtgagtttgcacacaatagcaactggtatatcactttccagtcagacacagatgcacaacagcaatttattattaagagaagaagttaa

SEQ ID NO: 147240 - DNA, 1949 bp, Homo sapiens
  Payload ID: 9120
  Gene Symbol: LARP4
  Gene Name: La ribonucleoprotein domain family, member 4
  ENST ID: ENST00000614335
  CDS Start-End: 315-881
aggggcaaggcgagtgtgtgtccttatcctagcaattggggcgcgggcctgtgagccagttggagttgcggcggcgggaacgattgggctgagcagaggacgacatgttgcttttcgtggagcaggtagcatctaaaggaactggtttaaatcctaatgccaaagtatggcaagaaattgctcctggaaatactgatgccaccccagtaactcatggaactgaaagctcttggcatgaaatagcagctacatcaggtgctcatcctgagggtaatgcagagctctcagaagatatatgtaaagaatatgaagtaatgtattcttcatcttgtgaaaccacaagaaatactacaggcattgaagaatcaactgatgggatgattttaggaccagaagatctgagttaccaaatatatgatgtttccggagaaagcaattcagcagtttctacagaagacctaaaagaatgtctgaagaaacaattagaattctgtttttcacgagaaaatttgtcaaaggatctttacttgatatctcaaatggatagtgatcagttcatcccaatttggacagttgccaacatggaagaaataaaaaagttgactacagaccctgatctaattcttgaagtgttaagatcttctcccatggtacaagttgatgagaagggtgagaaagtgagaccaagtcataagcgttgtattgtaattcttagagagattcctgaaacaacaccaatagaggaagtgaaaggtttgttcaaaagtgaaaactgccccaaagtgataagctgtgagtttgcacacaatagcaactggtatatcactttccagtcagacacagatgcacaacaggcttttatacttaagagaagaagttaaaacatttcagggcaagccaattatggctccctttcccaatggtagttttgtgaatggctttaattcgccaggatcttataaaacaaatgctgctgctatgaatatgggtcgaccattccaaaaaaatcggagaactctcttcagaggtcgaagacgacgagaagatgacaggatctcaagacctcatccttcaacagctgaatcaaaggctccaacaccaaagtttgacttattagcctcaaattttccacctttacctggaagttcatcaagaatgccaggtgaactcgttttggagaataggatgtctgatgttgttaaaggtgtctacaaagaaaaggataatgaagagttgacaattagttgcccagtgcctgcagatgagcagacagaatgcacttctgcccagcaactcaatatgagtaccagttctccatgtgctgctgagcttactgcattaagcacaactcagcaagaaaaggatctaatagaagattcctctgttcagaaggatggtctcaatcagacaactataccagtttctcctccaagtactacaaagccatcgagggcaagtactgcttcaccatgtaataataacataaatgcagctacagctgtggctctacaggaaccccgaaagttaagttatgctgaagtgtgccagaagccccctaaagagccatcttcagttcttgtgcagccactacgggaacttcgctccaatgtggtgtctcccaccaaaaatgaagacaatggagctcctgagaactccgttgagaaaccacatgagaagccagaagcaagggctagtaaggattattctggcttccgaggcaatataatccccaggggagcagcaggaaaaatcagggaacagagacgccagtttagccatagggctatacctcagggagtgactcgacgtaatggcaaagagcaatatgtgccacccagatcaccaaagtaaaaaacaacaaaactattcaaaaacttcactctcttcccattaaacttgaactgtggctatattgaactgttttggaggggagggggtagccaggaagg

SEQ ID NO: 147241 - DNA, 5642 bp, Homo sapiens
  Payload ID: 9121
  Gene Symbol: LARP4B
  Gene Name: La ribonucleoprotein domain family, member 4B
  Uniprot ID: Q92615
  ENST ID: ENST00000316157
  CDS Start-End: 42-2258
agcatcctgaggttagcattacacttctcccagtggagcccatgacttctgatcaggacgctaaggttgtggctgaaccgcagacgcagagagtccaggagggcaaggacagcgctcatctgatgaatggtcctatatctcaaaccacttctcagacaagttccatcccacctttgagtcaggtaccagcaactaaggtttcagagctgaaccctaatgcagaagtgtggggggctcctgtgttacatctggaagcaagcagtgctgctgacggtgtgagtgctgcatgggaggaggtggctggccaccacgcagaccgtggcccgcagggatcggatgccaatggtgatggtgaccagggccatgagaatgccgcattgccagacccgcaggagtcggacccagcagacatgaacgctctcgctctgggtccctcagaatatgactctctgcctgaaaatagcgagacaggaggaaatgagtctcaaccagacagccaggaagacccccgagaagtacttaaaaaaacattggaattctgcttatctagggagaaccttgctagtgacatgtatcttatatcacagatggatagtgaccagtatgtgccaatcacaacggtggctaacctcgaccacatcaagaagctcagcactgatgtggacttgattgtggaagtgctaagatctttacctttagtccaagtggatgaaaagggagaaaaagtaaggccaaatcaaaatcgctgcatagtaatattgcgtgaaatatctgaatctacccccgtggaagaagtagaagcactatttaaaggagataatttaccaaaatttataaactgtgaatttgcatataatgataattggtttattacatttgaaacagaagctgatgcacaacaggcttacaaataccttcgagaagaagtcaaaacttttcaaggaaaaccaattaaggcacggataaaagcaaaggcaatagctataaacacatttttgccaaagaatggatttagacccctggacgtgagcctgtatgcccagcagcgctacgcgacgtcgttctacttccctcccatgtacagcccccagcagcagttccccctgtacagcctgatcactccccagacgtggtcagcaacgcacagctatcttgacccacccttggtaactccatttccaaatactggatttataaatgggtttacgtctccagcgttcaagcctgcggcgtctcctctgacttctctcagacagtatcctcctcgaagcaggaatcctagtaaatctcatctgcggcatgcgattcctagtgcagagaggggacctgggttattagaaagtccttcaatatttaacttcactgcagatcgattaattaatggtgtccggagtccacaaacaaggcaagcaggtcaaactagaacacggattcaaaacccttcagcatatgccaagagagaggctgggcctgggcgtgtggagccaggcagtctcgaatcctctcctggtttagggaggggaaggaagaattcctttggctaccggaagaaaagggaggagaagtttacaagcagccagacacagtctccaacgccaccaaagcctccgtcgccaagcttcgagctggggctgtccagcttccctccattacctggagctgccggcaatttgaagacagaggacttgtttgaaaacaggctatctagcttgataataggaccatccaaagaaaggaccctcagtgcagacgcaagcgtgaacacccttcctgtagtggtctccagagagccctcggtgccggcttcttgtgctgtatcagcaacgtacgagcgatccccctccccagctcatttacccgatgatcccaaggtggcggagaaacagagggaaacccacagtgtggacagacttccttccgccctcactgcgaccgcgtgtaaatcggtgcaggtgaacggagccgccacggaattgcgaaagcccagctacgcagagatttgtcagagaacgagtaaagagcctccttcttccccattgcaaccccaaaaagaacaaaagccaaacactgttggttgtgggaaggaggaaaagaagctggcagagcccgcagagagataccgggagcccccagccctcaagtccacacctggagcccccagagaccagaggcggccggcggggggccggccctcgccctcggccatggggaagcgtctcagccgagagcagagcactccccccaagtctcctcagtgaaaaccgtacgtctgggaggggtcgcagagcgctgtgttaaccacaaacgagacactctcccactcagtgcgagggcgagccgctggttaggagcttgcagtgtctgaggcctgtgggatcctcaagttggttttcttctgtgagttggattctccccctcttgaaaaaaaatcgatttttcaggatttaattaatacaaaccttattttaggttggtgcttaactggaggtgatgcataagtctgatttttttttccaagatagaaaaagcatttatcctaacaaattggtattttttattaagcctccatgtggctctgaatgcaagctatatatagtgagtttttctaaattaagggaactctgctttttttttttttttttaagtaactggtctgtaagtgcatatctctagaacgtccccgcagatgaatgagggccagtggccttggcagaggcaggtgtggcctcgtagaggcagtgctggccgcgccagggcatcagtgctgatgtgggagctgtgcttccacctaagccgttggtaggggactgtggcatttaagaatgtagagagcgcatcctttttgatctcctgggcggagtgaacctgcaggggccaccccagaaaccttggttctgatgcactgcaagcaagtaaccagcttctcactccagtttcaagtggctattatgtaatataaattcaaagcacattgtgaatagaacctacatgaaaacatacactttgttgcccactgacatgttaccagaagttgtaccatgatgttgttttgacccctgtgagctgatggccccggccctgctctgtgcacatttctgtccgtgttccccagcactctggttggagagagtccacatcttcagctccgtgtggacatctccctgtacctctgcatcagcacatggatttaagagttatgtaatcgtgagagaatggtgtttgtggtttttccccctctttggctggtggaggataaagttcctgctcttttacctccaagacgagggcctcattgattcacttccagaagtgctgcacttctgaagaacaaggatgcactaaagttagcaagtttataataaagttaaatataaattattttgttttaaaatgcctcaaatttttctttattctaagcagcaaacattaaaataagaatatttcctgctaaatgtaaccatacactttattccacaaaatgttatttaacaagactgagggttttttttaagaaaaaattatttccatccaatatttaaagacttgaattttatttaaacttgaaaatgactttgccttaacttttgtataagacagcttagagtccatggagcccggccctgggttggcgtgagtgggtcagagttactcagttactgcgtggatctcctgtcgctagttttactgagtaagcatactgtagtacaagagctagtagtagtttttgtaatataccttaaagatcttcaacagttgatcttttttcagaatgttggaaaatcctgtaaatgcaaatagtcaatactgtattaaatacgtgcacttggagtgtgcttcgcttgtacagttgtaaataatcagaacatatgaaaaaggtaccctacagagaaaattctgatacagattattgatatattataaatgttgctgttgagcgggatgtagataaactaaatgttgtggtttgaatattattttgatttgttgagattttcttttttctcttacatcggtgtgttgaactgattctgcctctttgctgcaaaagggaattggaaagtcttattaaaagcctccagatgttttcatactcttttaaaatgtatgtaaatgcatactaatcatatctaatgtgaaagagttttaaagtatatagagagcaaaaactggcaggatcgtaagtgaaggtgactagtaatctaatttaaatcacctgcagctaagcatgattgaccctgccagaggaaaacatgcctatttgaccatttcctttaaagcagttgccattattcaaatacagagaaatagccacagggctagtgtttttcaaatgcattttaaagaacatggggatttttttttgtagttgtcagttcactgaccaaaaaaaaaaaaaaaatcagaaataattgatctgtgaaacccaaactctcaatactcagaaagctgggaggcaacctcgaggcctgggcctacgagctgcatcttcgctacggaagggccagggcgccatcagccattcccaaaacacaaggcctgcccgtccgccagtgagtccttggtttttaataatgagaagtcctttcccccaaggtgtgagcattgcagcgcagtgtgtgtgtgtggttagagccagcttagtccttcactttgtcgaccgaagtgggagctcaacagctgcatgaggagggcagcgcgtgcattagccagtcgccactggagggctctgctgccctccggtcaatacactgtagttactgcctagccagcagcagtcttctgcatcaagaactgaaacgttgctcggaggtgatttttatagcatcctttttaattaaaggtgaaatacagattgctatataatgtctgaaaaaacctgatactacttcaagagtttctgctcagaagaaaatgagagttatcataataggaagctgtggcggtccatgccaactgtgctgtgtcacatacagcgatgagagtggctttcatactttttttttttttaagttaacaccctcctttacccccagcagtatctcaggttatagaatcagagatgcagcagtgacaaatggcattttaacttgtaaaatcgtgtgatgatgcttatcattttgaaatagaagaataaaaacctggtcccgtttcaccagacatgaatttcaagtggagtcgtcgttctctgagagtgagtgtcttgacattttcacccaggccctcctgtcatcacatcaccggctgtcactggcgggtggccgtaaacgtcctgcgttgctatattaggatctctgcagttcaggcttcaaaaccagttcagtgtatccgggcgacgggtagtggtggtgcatgcctgtctgtgtgccccgctggcgagctgtagttgcggcttgcgtgcctcgcggcccactacagggctgcagacaatcgaggcgagggcgctggccgccagcagctcacagcgcgggggtcatgtggtcgctcctcgagggtttcgtttttgttctgcttcattaagactggaatcaagcttacatgtaaactattggtaatttaagtttccttttgtgtcattcagtgtaaaactgtctaatttgaaaaaaaatgtaggttatgaaaataaagatttaggcactgttcaa

SEQ ID NO: 147242 - DNA, 681 bp, Homo sapiens
  Payload ID: 9121
  Gene Symbol: LARP4B
  Gene Name: La ribonucleoprotein domain family, member 4B
  ENST ID: ENST00000406525
  CDS Start-End: 288-681
ggaagaatccgccgccgccgccgccgccagctcgcgcccgccctctcccctacctccggcccggcccggcccggccgcgccgcctctccctgccgtctctctcctcgccgtccccgcgtgtggcgcggccgccgggccccggggttgaggcgaggagcccgcgggcggccggtcgggcggggcggcggcgctgacagagtcgtgtggaagcagggagtggtcacatgtgggtgttactgggcggcaagcatcctgaggttagcattacacttctcccagtggagcccatgacttctgatcaggacgctaaggttgtggctgaaccgcagacgcagagagtccaggagggcaaggacagcgctcatctgatgaatggtcctatatctcaaaccacttctcagacaagttccatcccacctttgagtcaggtaccagcaactaaggtttcagagctgaaccctaatgcagaagtgtggggggctcctgtgttacatctggaagcaagcagtgctgctgacggtgtgagtgctgcatgggaggaggtggctggccaccacgcagaccgtggcccgcagggatcggatgccaatggtgatggtgaccagggccatgagaatgccgcattgccagacccgcaggagtcggacccagcagacatgaacgctctcgctctgggtccct

SEQ ID NO: 147243 - DNA, 432 bp, Homo sapiens
  Payload ID: 9121
  Gene Symbol: LARP4B
  Gene Name: La ribonucleoprotein domain family, member 4B
  ENST ID: ENST00000412411
  CDS Start-End: 262-432
tgtaaatgagaggaagcaaagatttttatggagactatcaataatctcaagaaaatacatattcaaaatggaattaaagccgtgcagtaagattgcatgtgaaacatcaacaggaagttgccttttcctcctctggactctgggtatactttgtttgccatctgcgagatcagtccatggctgagagatggcataagtgagcctgagtgcagcagtgagcagcatcctgaggttagcattacacttctcccagtggagcccatgacttctgatcaggacgctaaggttgtggctgaaccgcagacgcagagagtccaggagggcaaggacagcgctcatctgatgaatggtcctatatctcaaaccacttctcagacaagttccatcccacctttgagtcaggtaccagcaactaaggtttcagagctgaac

SEQ ID NO: 147244 - DNA, 1438 bp, Homo sapiens
  Payload ID: 9121
  Gene Symbol: LARP4B
  Gene Name: La ribonucleoprotein domain family, member 4B
  ENST ID: ENST00000448368
  CDS Start-End: 1-1018
ttcaatatttaacttcactgcagatcgattaattaatggtgtccggagtccacaaacaaggcaagcaggtcaaactagaacacggattcaaaacccttcagcatatgccaagagagaggctgggcctgggcgtgtggagccaggcagtctcgaatcctctcctggtttagggaggggaaggaagaattcctttggctaccggaagaaaagggaggagaagtttacaagcagccagacacagtctccaacgccaccaaagcctccgtcgccaagcttcgagctggggctgtccagcttccctccattacctggagctgccggcaatttgaagacagaggacttgtttgaaaacaggctatctagcttgataataggaccatccaaagaaaggaccctcagtgcagacgcaagcgtgaacacccttcctgtagtggtctccagagagccctcggtgccggcttcttgtgctgtatcagcaacgtacgagcgatccccctccccagctcatttacccgatgatcccaaggtggcggagaaacagagggaaacccacagtgtggacagacttccttccgccctcactgcgaccgcgtgtaaatcggtgcaggtgaacggagccgccacggtacgtacctcgtgcctgccttcctgcacgacagccgcgaggctctggtgtgaacagacgctgcgcactcctgcacctgctcgttttttaatcacatctaatttggaattgcgaaagcccagctacgcagagatttgtcagagaacgagtaaagagcctccttcttccccattgcaaccccaaaaagaacaaaagccaaacactgttggttgtgggaaggaggaaaagaagctggcagagcccgcagagagataccgggagcccccagccctcaagtccacacctggagcccccagagaccagaggcggccggcggggggccggccctcgccctcggccatggggaagcgtctcagccgagagcagagcactccccccaagtctcctcagtgaaaaccgtacgtctgggaggggtcgcagagcgctgtgttaaccacaaacgagacactctcccactcagtgcgagggcgagccgctggttaggagcttgcagtgtctgaggcctgtgggatcctcaagttggttttcttctgtgagttggattctccccctcttgaaaaaaaatcgatttttcaggatttaattaatacaaaccttattttaggttggtgcttaactggaggtgatgcataagtctgatttttttttccaagatagaaaaagcatttatcctaacaaattggtattttttattaagcctccatgtggctctgaatgcaagctatatatagtgagtttttctaaattaagggaactctgctttttttttttttttttaagtaactggtctgtaagtgcatatctctagaacgt

SEQ ID NO: 147245 - DNA, 656 bp, Homo sapiens
  Payload ID: 9121
  Gene Symbol: LARP4B
  Gene Name: La ribonucleoprotein domain family, member 4B
  ENST ID: ENST00000440895
  CDS Start-End: 1-572
caagcttcgagctggggctgtccagcttccctccattacctggagctgccggcaatttgaagacagaggacttgtttgaaaacaggctatctagcttgataataggaccatccaaagaaaggaccctcagtgcagacgcaagcgtgaacacccttcctgtagtggtctccagagagccctcggtgccggcttcttgtgctgtatcagcaacgtacgagcgatccccctccccagctcatttacccgatgatcccaaggtggcggagaaacagagggaaacccacagtgtggacagacttccttccgccctcactgcgaccgcgtgtaaatcggtgcaggtgaacggagccgccacggtacgtacctcgtgcctgccttcctgcacgacagccgcgaggctctggtgtgaacagacgctgcgcactcctgcacctgctcgttttttaatcacatctaatttggtgggtttttatttgcgtctgtctgtgttgtgttttctgtacaaaatacctttaatatttgctaataattttccactaactactctagttctttctcagaccaccatgtagtccttttatttcagtgttggtcaatagaggtttcttgagtagtaacaagaccccagctcctgtttctccatagactttaggatc

SEQ ID NO: 147246 - DNA, 613 bp, Homo sapiens
  Payload ID: 9121
  Gene Symbol: LARP4B
  Gene Name: La ribonucleoprotein domain family, member 4B
  ENST ID: ENST00000476529
  CDS Start-End: 113-352
gcggccgccgggccccggggttgaggcgaggagcccgcgggcggccggtcgggcggggcggcggcgctgacagcatcctgaggttagcattacacttctcccagtggagcccatgacttctgatcaggacgctaaggttgtggctgaaccgcagacgcagagagtccaggagggcaaggacagcgctcatctgatgaatggtcctatatctcaaaccacttctcagacaagttccatcccacctttgagtcagaaaacactcctcagctaccggtgtcagaggacggtgttgtttggggatggcatgatagagacggacagttcgtaccagcaactaaggtttcagagctgaaccctaatgcagaagtgtggggggctcctgtgttacatctggaagcaagcagtgctgctgacggtgtgagtgctgcatgggaggaggtggctggccaccacgcagaccgtggcccgcagggatcggatgccaatggtgatggtgaccagggccatgagaatgccgcattgccagacccgcaggagtcggacccagcagacatgaacgctctcgctctgggtccctcagaatatgactctctgcctgaaaatagcgagacag

SEQ ID NO: 147247 - DNA, 8546 bp, Homo sapiens
  Payload ID: 9121
  Gene Symbol: LARP4B
  Gene Name: La ribonucleoprotein domain family, member 4B
  Uniprot ID: Q92615
  ENST ID: ENST00000612396
  CDS Start-End: 318-2534
gagctgtgtgttctcatgcgaacgggaaggagcgttggggatctggagtcccggggttgagacattttcgggcccgaaaggggaagaatccgccgccgccgccgccgccagctcgcgcccgccctctcccctacctccggcccggcccggcccggccgcgccgcctctccctgccgtctctctcctcgccgtccccgcgtgtggcgcggccgccgggccccggggttgaggcgaggagcccgcgggcggccggtcgggcggggcggcggcgctgacagcatcctgaggttagcattacacttctcccagtggagcccatgacttctgatcaggacgctaaggttgtggctgaaccgcagacgcagagagtccaggagggcaaggacagcgctcatctgatgaatggtcctatatctcaaaccacttctcagacaagttccatcccacctttgagtcaggtaccagcaactaaggtttcagagctgaaccctaatgcagaagtgtggggggctcctgtgttacatctggaagcaagcagtgctgctgacggtgtgagtgctgcatgggaggaggtggctggccaccacgcagaccgtggcccgcagggatcggatgccaatggtgatggtgaccagggccatgagaatgccgcattgccagacccgcaggagtcggacccagcagacatgaacgctctcgctctgggtccctcagaatatgactctctgcctgaaaatagcgagacaggaggaaatgagtctcaaccagacagccaggaagacccccgagaagtacttaaaaaaacattggaattctgcttatctagggagaaccttgctagtgacatgtatcttatatcacagatggatagtgaccagtatgtgccaatcacaacggtggctaacctcgaccacatcaagaagctcagcactgatgtggacttgattgtggaagtgctaagatctttacctttagtccaagtggatgaaaagggagaaaaagtaaggccaaatcaaaatcgctgcatagtaatattgcgtgaaatatctgaatctacccccgtggaagaagtagaagcactatttaaaggagataatttaccaaaatttataaactgtgaatttgcatataatgataattggtttattacatttgaaacagaagctgatgcacaacaggcttacaaataccttcgagaagaagtcaaaacttttcaaggaaaaccaattaaggcacggataaaagcaaaggcaatagctataaacacatttttgccaaagaatggatttagacccctggacgtgagcctgtatgcccagcagcgctacgcgacgtcgttctacttccctcccatgtacagcccccagcagcagttccccctgtacagcctgatcactccccagacgtggtcagcaacgcacagctatcttgacccacccttggtaactccatttccaaatactggatttataaatgggtttacgtctccagcgttcaagcctgcggcgtctcctctgacttctctcagacagtatcctcctcgaagcaggaatcctagtaaatctcatctgcggcatgcgattcctagtgcagagaggggacctgggttattagaaagtccttcaatatttaacttcactgcagatcgattaattaatggtgtccggagtccacaaacaaggcaagcaggtcaaactagaacacggattcaaaacccttcagcatatgccaagagagaggctgggcctgggcgtgtggagccaggcagtctcgaatcctctcctggtttagggaggggaaggaagaattcctttggctaccggaagaaaagggaggagaagtttacaagcagccagacacagtctccaacgccaccaaagcctccgtcgccaagcttcgagctggggctgtccagcttccctccattacctggagctgccggcaatttgaagacagaggacttgtttgaaaacaggctatctagcttgataataggaccatccaaagaaaggaccctcagtgcagacgcaagcgtgaacacccttcctgtagtggtctccagagagccctcggtgccggcttcttgtgctgtatcagcaacgtacgagcgatccccctccccagctcatttacccgatgatcccaaggtggcggagaaacagagggaaacccacagtgtggacagacttccttccgccctcactgcgaccgcgtgtaaatcggtgcaggtgaacggagccgccacggaattgcgaaagcccagctacgcagagatttgtcagagaacgagtaaagagcctccttcttccccattgcaaccccaaaaagaacaaaagccaaacactgttggttgtgggaaggaggaaaagaagctggcagagcccgcagagagataccgggagcccccagccctcaagtccacacctggagcccccagagaccagaggcggccggcggggggccggccctcgccctcggccatggggaagcgtctcagccgagagcagagcactccccccaagtctcctcagtgaaaaccgtacgtctgggaggggtcgcagagcgctgtgttaaccacaaacgagacactctcccactcagtgcgagggcgagccgctggttaggagcttgcagtgtctgaggcctgtgggatcctcaagttggttttcttctgtgagttggattctccccctcttgaaaaaaaatcgatttttcaggatttaattaatacaaaccttattttaggttggtgcttaactggaggtgatgcataagtctgatttttttttccaagatagaaaaagcatttatcctaacaaattggtattttttattaagcctccatgtggctctgaatgcaagctatatatagtgagtttttctaaattaagggaactctgctttttttttttttttttaagtaactggtctgtaagtgcatatctctagaacgtccccgcagatgaatgagggccagtggccttggcagaggcaggtgtggcctcgtagaggcagtgctggccgcgccagggcatcagtgctgatgtgggagctgtgcttccacctaagccgttggtaggggactgtggcatttaagaatgtagagagcgcatcctttttgatctcctgggcggagtgaacctgcaggggccaccccagaaaccttggttctgatgcactgcaagcaagtaaccagcttctcactccagtttcaagtggctattatgtaatataaattcaaagcacattgtgaatagaacctacatgaaaacatacactttgttgcccactgacatgttaccagaagttgtaccatgatgttgttttgacccctgtgagctgatggccccggccctgctctgtgcacatttctgtccgtgttccccagcactctggttggagagagtccacatcttcagctccgtgtggacatctccctgtacctctgcatcagcacatggatttaagagttatgtaatcgtgagagaatggtgtttgtggtttttccccctctttggctggtggaggataaagttcctgctcttttacctccaagacgagggcctcattgattcacttccagaagtgctgcacttctgaagaacaaggatgcactaaagttagcaagtttataataaagttaaatataaattattttgttttaaaatgcctcaaatttttctttattctaagcagcaaacattaaaataagaatatttcctgctaaatgtaaccatacactttattccacaaaatgttatttaacaagactgagggttttttttaagaaaaaattatttccatccaatatttaaagacttgaattttatttaaacttgaaaatgactttgccttaacttttgtataagacagcttagagtccatggagcccggccctgggttggcgtgagtgggtcagagttactcagttactgcgtggatctcctgtcgctagttttactgagtaagcatactgtagtacaagagctagtagtagtttttgtaatataccttaaagatcttcaacagttgatcttttttcagaatgttggaaaatcctgtaaatgcaaatagtcaatactgtattaaatacgtgcacttggagtgtgcttcgcttgtacagttgtaaataatcagaacatatgaaaaaggtaccctacagagaaaattctgatacagattattgatatattataaatgttgctgttgagcgggatgtagataaactaaatgttgtggtttgaatattattttgatttgttgagattttcttttttctcttacatcggtgtgttgaactgattctgcctctttgctgcaaaagggaattggaaagtcttattaaaagcctccagatgttttcatactcttttaaaatgtatgtaaatgcatactaatcatatctaatgtgaaagagttttaaagtatatagagagcaaaaactggcaggatcgtaagtgaaggtgactagtaatctaatttaaatcacctgcagctaagcatgattgaccctgccagaggaaaacatgcctatttgaccatttcctttaaagcagttgccattattcaaatacagagaaatagccacagggctagtgtttttcaaatgcattttaaagaacatggggatttttttttgtagttgtcagttcactgaccaaaaaaaaaaaaaaaatcagaaataattgatctgtgaaacccaaactctcaatactcagaaagctgggaggcaacctcgaggcctgggcctacgagctgcatcttcgctacggaagggccagggcgccatcagccattcccaaaacacaaggcctgcccgtccgccagtgagtccttggtttttaataatgagaagtcctttcccccaaggtgtgagcattgcagcgcagtgtgtgtgtgtggttagagccagcttagtccttcactttgtcgaccgaagtgggagctcaacagctgcatgaggagggcagcgcgtgcattagccagtcgccactggagggctctgctgccctccggtcaatacactgtagttactgcctagccagcagcagtcttctgcatcaagaactgaaacgttgctcggaggtgatttttatagcatcctttttaattaaaggtgaaatacagattgctatataatgtctgaaaaaacctgatactacttcaagagtttctgctcagaagaaaatgagagttatcataataggaagctgtggcggtccatgccaactgtgctgtgtcacatacagcgatgagagtggctttcatactttttttttttttaagttaacaccctcctttacccccagcagtatctcaggttatagaatcagagatgcagcagtgacaaatggcattttaacttgtaaaatcgtgtgatgatgcttatcattttgaaatagaagaataaaaacctggtcccgtttcaccagacatgaatttcaagtggagtcgtcgttctctgagagtgagtgtcttgacattttcacccaggccctcctgtcatcacatcaccggctgtcactggcgggtggccgtaaacgtcctgcgttgctatattaggatctctgcagttcaggcttcaaaaccagttcagtgtatccgggcgacgggtagtggtggtgcatgcctgtctgtgtgccccgctggcgagctgtagttgcggcttgcgtgcctcgcggcccactacagggctgcagacaatcgaggcgagggcgctggccgccagcagctcacagcgcgggggtcatgtggtcgctcctcgagggtttcgtttttgttctgcttcattaagactggaatcaagcttacatgtaaactattggtaatttaagtttccttttgtgtcattcagtgtaaaactgtctaatttgaaaaaaaatgtaggttatgaaaataaagatttaggcactgttcaatttttcttttgattttttttaaattaaaatttcttcaataatgcatcttttctaaacatagttttttgtctgttcccataagtgcatgagaaagaaacacgggcctcatatatgattggatcctaaagccttctcacctacgtgggggctggctgtggcacacggggctcaccctttgtgttttagtggttcagagtgagcattaacatcagatgctcatgcggagacagccattactgtgactgccaagatgtactgcaaaaatacatgttcctgtatcaggactttgattttgttaaaatggcactctctccaaagctgtgtccatgaagctgtttggagctaacgttgggtcttcatggtgatggactcatccttaggcagcagtgatgtctgcactaggaagaggctggcgggaggcggggcccctcctgtgccaggcaccgagtggatgggggactgattaacatgttgctgccttcctcctctgtgcattgccttttcatgtcgtcttcccatttttactctttttctgatggaattaatattcttgatctgttaaggctattaatcctttgtcatatatgttacaaatattttctttcaatctaccatttgtcttaactctttatttagaatagtatcttttacggtgtttaattattgtgtagtaaaatctatcaatcttctcctttgttgagtgtcttggacttgcttaagaagcctttccctactccagggtcataaagttaatagtgtgtgtgtatgtgtgcgtgtgtgtgtgtgtgtgcgtgcacacgcacacacacacacacacgcttttaatccagctgggcctaatcgtgtgtgtggtgtgcgtgcttaggcaggaacccagttttactttatgccatgtggaaagtttctttttccagtatcaccagtgagttcactgtctctccactggtctgcagtgctgcttctgttacttgcagacttcccacgtgtgcatggatctccacctggggtctctagggtctctattctacactgcctatttccctttctgtcctaacaccatagcatttaactcacccgtcatcctgtgttgctgagaatttccttcatagaactcatcaaagtatgattaactgtgctccctgagggcaggaattatgccatctggatcaccagcctctcccttgtccttagcacgccatctgcaaattagcagatactcggtaaatgtgtattaactcgaagtatattttgtgtcttctctgtgcacagcactgccctgggaagaactaggatgaggtattgacttgctgttgccacataacaaaccctgccagaactccctggatggaagtgaccaccgtgtatctgtggattgtctgcagggctctgctggggtcagcaggtcccacaagagagccagggctcggtctcctcatggctgtcagaggtttacgtattccgcctccacccaccaaagtctgaagttgttgtattccattccttgctatatccacatcttttaataatgctaaaatcccgtgtttctctaaagcattggattgaaccaactgaagaaggaccacgtgtgttgctgggcctgcttgggcacaagccgtttccgatccaagtcaactgctggtctgcttagacgaaggtgtgtgggtgtctccaccacggagaggagggacagcaggtgagaccataggccaggaaggaagggcacagcctaagcgtgcagtggcttagccagagaccctcgtgcaccagccttcaggtgcttatggaacttatgtcagcccaggccatatccaagtgtgtgatgtctcggagcatatatgccaggccagccggagaggcttagccctgccctggtggagctggagggccgcagggccgcccggtggggtcaggaggttgtgaagaggatcctgatacaggctgggcctccctgcaggcgtgagccccggagcacggggtgagcagctccacccagaggggcttgcaggaccaagctgggacagcaaccaccaggccctggggcagatcagtgagcgtccaggagatgcagatgcagaagacagccaaattcattcacctctgcgtgggcctgtgagggcccacagagatgcattttcattcacgaccaggatttcctcggccggagcagccgcttttcccagccgaagctcactgtgtttactacataggatgtgagtgtatagaaagactctctctaacgttagctacgcgtgcagaaatgtggggcgcttacaagtgtgggcagccgcagcctgttcctcacccctgtcctaacgggacatactccacgcatgcacatttaggatcaccgtgtcttctcgttggactgatctgtcattaggaccctggacccaagtaattgtctttgctctgaagttttgacagtaacaaaggcattccagctctttctttttcactcctgtcggtgtaacgtgccgtttttcatcctttgacttttagcccgcctgtgccctgtctgaagggagttgtctgtggacagcacggagtggtgggtgtttgtaatccactctgccagcctcagtcttctaactgttgcgtatggaccaattacatctgccctttctcttc

SEQ ID NO: 147248 - DNA, 1826 bp, Homo sapiens
  Payload ID: 9121
  Gene Symbol: LARP4B
  Gene Name: La ribonucleoprotein domain family, member 4B
  ENST ID: ENST00000614908
  CDS Start-End: 1-462
gtgccggcttcttgtgctgtatcagcaacgtacgagcgatccccctccccagctcatttacccgatgatcccaaggtggcggagaaacagagggaaacccacagtgtggacagacttccttccgccctcactgcgaccgcgtgtaaatcggtgcaggtgaacggagccgccacggaattgcgaaagcccagctacgcagagatttgtcagagaacgagtaaagagcctccttcttccccattgcaaccccaaaaagaacaaaagccaaacactgttggttgtgggaaggaggaaaagaagctggcagagcccgcagagagataccgggagcccccagccctcaagtccacacctggagcccccagagaccagaggcggccggcggggggccggccctcgccctcggccatggggaagcgtctcagccgagagcagagcactccccccaagtctcctcagtgaaaacccactgccctgggaagaactaggatgaggtattgacttgctgttgccacataacaaaccctgccagaactccctggatggaagtgaccaccgtgtatctgtggattgtctgcagggctctgctggggtcagcaggtcccacaagagagccagggctcggtctcctcatggctgtcagaggtttacgtattccgcctccacccaccaaagtctgaagttgttgtattccattccttgctatatccacatcttttaataatgctaaaatcccgtgtttctctaaagcattggattgaaccaactgaagaaggaccacgtgtgttgctgggcctgcttgggcacaagccgtttccgatccaagtcaactgctggtctgcttagacgaaggtgtgtgggtgtctccaccacggagaggagggacagcaggtgagaccataggccaggaaggaagggcacagcctaagcgtgcagtggcttagccagagaccctcgtgcaccagccttcaggtgcttatggaacttatgtcagcccaggccatatccaagtgtgtgatgtctcggagcatatatgccaggccagccggagaggcttagccctgccctggtggagctggagggccgcagggccgcccggtggggtcaggaggttgtgaagaggatcctgatacaggctgggcctccctgcaggcgtgagccccggagcacggggtgagcagctccacccagaggggcttgcaggaccaagctgggacagcaaccaccaggccctggggcagatcagtgagcgtccaggagatgcagatgcagaagacagccaaattcattcacctctgcgtgggcctgtgagggcccacagagatgcattttcattcacgaccaggatttcctcggccggagcagccgcttttcccagccgaagctcactgtgtttactacataggatgtgagtgtatagaaagactctctctaacgttagctacgcgtgcagaaatgtggggcgcttacaagtgtgggcagccgcagcctgttcctcacccctgtcctaacgggacatactccacgcatgcacatttaggatcaccgtgtcttctcgttggactgatctgtcattaggaccctggacccaagtaattgtctttgctctgaagttttgacagtaacaaaggcattccagctctttctttttcactcctgtcggtgtaacgtgccgtttttcatcctttgacttttagcccgcctgtgccctgtctgaagggagttgtctgtggacagcacggagtggtgggtgtttgtaatccactctgccagcctcagtcttctaactgttgcgtatggaccaattacatctgccctttctcttc

SEQ ID NO: 147249 - DNA, 4469 bp, Homo sapiens
  Payload ID: 9122
  Gene Symbol: LARP6
  Gene Name: La ribonucleoprotein domain family, member 6
  Uniprot ID: Q9BRS8
  ENST ID: ENST00000299213
  CDS Start-End: 72-1547
gcagtcgctgccgaccggctggctgggccttgcggcgtgaggaccccggcggcgccgcagtcccgcgagccatggcccagtccggcggggaggctcggcccgggcccaagacggcggtgcagatccgcgtcgccatccaggaggccgaggacgtggacgagttggaggacgaggaggagggggcggagactcggggcgccggggacccggcccggtacctcagccccggctggggcagcgcgagcgaggaggagccgagccgcgggcacagtggcaccactgcaagtggaggtgagaacgagcgtgaggacctggagcaggagtggaagcccccggatgaggagttgatcaagaaactggtggatcagatcgaattctacttttctgatgaaaacctggagaaggacgcctttttgctaaaacacgtgaggaggaacaagctgggatatgtgagcgttaagctactcacatccttcaaaaaggtgaaacatcttacacgggactggagaaccacagcacatgctttgaagtattcagtggtccttgagttgaatgaggaccaccggaaggtgaggaggaccacccccgtcccactgttccccaacgagaacctccccagcaagatgctcctggtctatgatctctacttgtctcctaagctgtgggctctggccaccccccagaagaatggaagggtgcaagagaaggtgatggaacacctgctcaagctttttgggacttttggagtcatctcatcagtgcggatcctcaaacctgggagagagctgccccctgacatccggaggatcagcagccgctacagccaagtggggacccaggagtgcgccatcgtggagttcgaggaggtggaagcagccatcaaagcccatgagttcatgatcacagaatctcagggcaaagagaacatgaaagctgtcctgattggtatgaagccacccaaaaagaaacctgccaaagacaaaaatcatgacgaggagcccactgcgagcatccacctgaacaagtccctgaacaagagagtcgaggagcttcagtacatgggtgatgagtcttctgccaacagctcctctgaccccgagagcaaccccacatcccctatggcgggccgacggcacgcggccaccaacaagctcagcccgtctggccaccagaatctctttctgagtccaaatgcctccccgtgcacaagtccttggagcagccccttggcccaacgcaaaggcgtttccagaaagtccccactggcggaggaaggtagactgaactgcagcaccagccctgagatcttccgcaagtgtatggattattcctctgacagcagcgtcactccctctggcagcccctgggtccggaggcgtcgccaagccgagatggggacccaggagaaaagccccggtacgagtcccctgctctcccggaagatgcagactgcagatgggctacccgtaggggtgctgaggttgcccaggggtcctgacaacaccagaggatttcatggccatgagaggagcagggcctgtgtataaataccttctatttttaatacaagctccactgaaaaccaccttcgttttcaaggttctgacaaacacctggcatgacagaatggaattcgttcccctttgagagattttttattcatgtagacctcttaatttatctatctgtaatatacataaatcggtacgccatggtttgaagaccaccttctagttcaggactcctgttcttcccagcatggccactattttgatgatggctgatgtgtgtgagtgtgatggccctgaagggctgtaggacggaggttccctgggggaagtctgttctttggtatggaatttttctctcttctttggtatggaatttttcccttcagtgactgagctgtcctcgataggccatgcaagggcttcctgagagttcaggaaagttctcttgtgcaacagcaagtagctaagcctatagcatggtgtcttgtaggaccaaatcgatgttacctgtcaagtaaataaataataaaacacccaactgggagtgctgactttgaggttatagattgtgcctgacaaaagtctgtgcctgtctgacagagctgtgggtggtatgtcatgaggccctgaggagcttagcagagacatctttcttttctttaagagaacatttaaaaatttttttatttgtacacatttatgggctacatgagaaactttgttacatgtttataatgcatagtgatcaagtcagggcatttagggtttctcactgtaccccagggcagccccagggctctccttgggcttctggcagcctgagtggtgtctcatcacagggaattttactgagcaaaggcagcttggcgtatactgagggtgtacagtccaggacccacagcattgatctcacctgggaacttattagaaatccagattctcaggccaaccctaggcccactgaattagaaagtctgggagaaaggcctggaatttgggttttaacaaacgctgcaggtgattctgatgcacgctggagaaccactggatggacaaaggctgcaggacttgaggtcagtccatttgacccccaatctctcactattttgtgaccttgggaaggttactaagccccgtgaacctcatcatctccctgtgaattgctttgttacgatgtccatgtctggaatgcagctggccctccataaatgttagctctctttccttctcacttgggttaatgtttgttatcatcaggagctgccttggtgtagcagaaagagcattggcctagattccagtgttggcttatgctctggctatttggcaggatttaatagagcttgttaataattattgaacagtgattaggtgccagggactatgctaagagctttccatgcattatctcatttaatctgcccaaaaactacaagagaaatgttcaggtattatctctattttattccagaaaaaaacagactttacttgggtaattaacttgtctaaggcttaacagctaaattggtagagttgggcttgaaactagtggtctggctttggagcccacactgtttaaccactaagtggtactcaacatttctgatctttactatccatattcaaaaaagaatccaccataaaaggtgctaatatttattcagcaccttcctacgtgctaggcattgggttagacacatttcacttactctcagtgtccatcataaggaattattatgccagtatcacacatgcagctgctgaagtaggaaaataatatcccaaacttgtgaaaatggacaaagatagtatatcctaaatgatatggctctatacaaattagcaggtgattgtgatctggatagtaagatgctttgtcccttaagatgcagaagagttcgtgttaactggcaaatgcctccagcaatgttctggatttgccatttccagcactaccagctgtaggtagcctgaaggcttgtgcctagaccaccaggactcctgaccttgggcaatgtcagggccccctccagccccgccctatgcttccctccctgactctgctcccatcaccccctgcctgctccttccctgcagccactccacctgctccttggccatcgggccatctgggcttcaccagctcttcttggcctgtgacattcaaggctgttccaccctattatgcctgttacacaagtcacagctctatttttagattaaccctcgtggatcatagttacttttaaaaatacctacaccctcacctttacatgtgaatacagatgaacttggccttcctttggtcgtattgccctgtgtgacattataaaagaaccctgaagtgggggtcagcagatctgaggtcgagtcgtggcttttctactaagcaactgtgaccttcagcaagtcatttattttattggttcacagttcttcccacaaaccagtggataacaagaagatgttccttaaataaggtcatatatgtgcaagtgctttctgaatggaaaagtgctttgcaggcattagtcactacttatcctgctgtctgatcatcacctccaaaggcaagcctccttttgctgcaattcttaaccctggcctcacattagagtcacctaaagagcttttaaaaactgcctatggggctgggcacggtggctcacgcctgtaatcccagcacttcaggagactgaggcgggcagatcatgaggtcaggagattgagactatcctggctaatgtggtaaaaccctgtctctactaaaaatacaaaaaaattagccgggcatggtggcacgcacctgtaatcccagctacttgggaggcggaggcaggagaattgcttgaacctgggaggcggaggttgcagtgagccgagatcacgccgctgcattccagcctgggcaacagaatgagactccatctcaaaaaaataaaaataaaaataaacaaa

SEQ ID NO: 147250 - DNA, 527 bp, Homo sapiens
  Payload ID: 9122
  Gene Symbol: LARP6
  Gene Name: La ribonucleoprotein domain family, member 6
  Uniprot ID: Q9BRS8
  ENST ID: ENST00000344870
  CDS Start-End: 34-315
gaggaccccggcggcgccgcagtcccgcgagccatggcccagtccggcggggaggctcggcccgggcccaagacggcggtgcagatccgcgtcgccatccaggaggccgaggacgtggacgagttggaggacgaggaggagggggcggagactcggggcgccggggacccggcccggtacctcagccccggctggggcagcgcgagcgaggaggagccgagccgcgggcacaggaataggagctcggtgaattcaaggaccatgcttgcttcgttcattgtatcttcagcacctagcacagcacccagcacataggacatgtttgttgactgaatgcgtatctctatcatcacactcactcaatggtgttgagatatttgtgtttccccttccctagacagtgagatccttgaaggcagctgccttatcttattcctttttgtatttccatacctagcctaatacctagcttatataagggaacagaataaatgaacaataaagaaaagtctttacagcctctaaaa

SEQ ID NO: 147251 - DNA, 964 bp, Homo sapiens
  Payload ID: 9122
  Gene Symbol: LARP6
  Gene Name: La ribonucleoprotein domain family, member 6
  ENST ID: ENST00000559140
  CDS Start-End: 1-235
cgtggacgagttggaggacgaggaggagggggcggagactcggggcgccggggacccggcccggtacctcagccccggctggggcagcgcgagcgaggaggagccgagccgcgggcacagaactgcccagctcccgtggcttgagtctcagcaagtgttcagtctgaagcccttcctgctgcccactggcatagagttgaccccagaaaatccctggggttcttcggtgagctgacagagcccagtgggcaggcacccagagcaggaggagatgtagccaagaacaggatccacactatcccctgtttggacccaggctcgcatggcagcagccatcacccgatgtgaatgttctcagctcctggagcctacaggagaaaacccagattcctcaatctgctcattaagatgtgacacccactcacatcatctcctcagcccattgcctcaacagttcacgctgtcaacagttcacgctcccgtgattccagctagttccctgagcatagggggctattttgtgtctacatgcctctgcacccccacctctaggtcctctgattgactgatttctagtcagcctttaaaacttcgctgcctcttctccaccacccccaatccccaccccagagctggctgtgtttcctttcttctctgttgctgtagtactctgtacattttatgcctagcaccttccacaattgtgattctatcattgtgtctccctcacaggaataggagctcggtgaattcaaggaccatgcttgcttcgttcattgtatcttcagcacctagcacagcacccagcacataggacatgtttgttgactgaatgcgtatctctatcatcacactcactcaatggtgttgagatatttgtgtttccccttccctagacagtgagatccttgaaggcagctgccttatcttattcctttttgtatttccatacctagcctaatac

SEQ ID NO: 147252 - DNA, 558 bp, Homo sapiens
  Payload ID: 9122
  Gene Symbol: LARP6
  Gene Name: La ribonucleoprotein domain family, member 6
  ENST ID: ENST00000559316
  CDS Start-End: 465-558
atcatcgccctgcctttcccagtcctgctggctgcgctcagtctttaggtggtagcaggccaggtacagcggacacttgctgatgggggattccaggaggtgggatttcaagtggcaccactgcaagtggaggtgagaacgagcgtgaggacctggagcaggagtggaagcccccggatgaggagttgatcaagaaactggtggatcagatcgaattctacttttctgatgaaaacctggagaaggacgcctttttgctaaaacacgtgaggaggaacaagctgggatatgtgagcgttaagctactcacatccttcaaaaaggtgaaacatcttacacgggactggagaaccacagcacatgctttgaagtattcagtggtccttgagttgaatgaggaccaccggaaggtgaggaggaccacccccgtcccactgttccccaacgagaacctccccagcaagatgctcctggtctatgatctctacttgtctcctaagctgtgggctctggccaccccccagaagaatggaagggtgcaagagaaggtgatggaac

SEQ ID NO: 147253 - DNA, 2164 bp, Homo sapiens
  Payload ID: 9123
  Gene Symbol: LARP7
  Gene Name: La ribonucleoprotein domain family, member 7
  Uniprot ID: Q4G0J3
  ENST ID: ENST00000324052
  CDS Start-End: 151-1899
ggggcccggcgtggggaggtttggggcgcgcccggcctatgacggcgtccttgcggaagtacgggtgccgagagaagcagtagtcaataaagagagtgccgtatttcgcagattggagctgagctgtggctgccagaagatagcgaacgaatggaaactgaaagtggaaatcaggaaaaggtaatggaagaagaaagcactgaaaagaaaaaagaagttgaaaaaaagaaacggtcacgagttaaacaggtgcttgcagatattgctaagcaagtggacttctggtttggggatgcaaatcttcacaaggatagatttcttcgagaacagatagaaaaatctagagatggatatgttgatatatcactacttgtgtcttttaacaaaatgaaaaaattgactactgatgggaagttaattgccagagcattgagaagttcagctgttgtagagcttgatttggaaggcaccagaatccggaggaaaaaacctctgggggaaagaccaaaggatgaggatgaacgcacagtgtatgtggagttacttcccaaaaatgttaatcacagctggattgaaagagtatttgggaaatgtggcaatgttgtttatataagtataccacattataagtctactggagatccaaagggatttgcgtttgtggaatttgaaacaaaagaacaagcagcaaaagcaattgagtttcttaacaacccaccagaagaagcaccaagaaaacctggcatatttcctaaaacagtgaaaaataagcccattccagccttaagagttgtggaagagaagaaaaagaaaaagaagaagaaaggccgaatgaaaaaggaagacaatatccaagccaaagaagaaaacatggacacaagcaacaccagcatcagtaaaatgaaaagatccagacccacatctgagggctctgacattgagtccactgaaccccaaaagcagtgctcaaagaaaaagaaaaaacgggacagagttgaagcatctagcttacctgaagtcagaacagggaagaggaagagaagcagctctgaagatgcagaatccctagctccccgatcaaaagtaaagaaaattattcagaaagacatcattaaggaagcatcagaagcttccaaggaaaatagagatatagaaatctctactgaagaggaaaaggatactggagatctaaaagatagctctctcttgaaaacaaaaaggaaacataagaaaaaacataaagagagacataaaatgggagaagaagttataccattaagagtgctatcaaagagcgaatggatggatttgaaaaaagagtatttagcgctacaaaaagctagcatggcttctttaaaaaaaacaatatcccaaataaaatcagagtcagaaatggaaacagacagtggagtacctcaaaacactggaatgaaaaatgaaaaaacagccaacagggaagagtgtcgcacccaggagaaagttaatgcaacaggaccacagttcgtgagtggagtgattgtgaagatcattagcacagagcctctacctggcaggaaacaagtccgggatactttggcagcaatctcagaagttctttatgttgatttgctagaaggggatacagaatgccatgctagatttaaaactcctgaggatgctcaagcagtaataaatgcctatacagaaattaacaagaaacactgctggaaactcgagatcctttctggtgatcacgaacaaaggtattggcagaagattttggttgatagacaggcaaaacttaatcagcctcgggaaaagaaaagaggcactgaaaagttaatcaccaaagctgaaaagattagactggcaaagactcaacaagcgagtaaacatataagattttctgaatatgattgaaaaaaaaaacagttcacctcttaatacttcacaagatacttgagctgttcttgggagattcacttttattatggtagcactgcataattaatgtgtttttaattaaaagaaatatctttgttcctcaacttgtaaataagacttttttctagagacaaatatgatgtataccacaatttttcttaaacattttatttgttgaaattatcttagatgtcagtgtcaggtgatttagtaaataaatgtgttttgaacattatttgga

SEQ ID NO: 147254 - DNA, 2286 bp, Homo sapiens
  Payload ID: 9123
  Gene Symbol: LARP7
  Gene Name: La ribonucleoprotein domain family, member 7
  Uniprot ID: Q4G0J3
  ENST ID: ENST00000344442
  CDS Start-End: 279-2027
aagccaaaaaccgccgctttcaaatcgccaatcaaattcttccttggcttcgagtctctcagccggccgcgctctccgatgcccagccctcctggaaccacctcgcctgtgacgtaggtggagcgcgcactgcctccgggcccgtctttctcaattgggaccggaaaacgttgtcgctcatcctatgacgcgaaagtaaccgagactatcaggatccggagacggaaatgtccgaaggccgcagtacttgaccctgtattttgggagtcgaacggagaatggaaactgaaagtggaaatcaggaaaaggtaatggaagaagaaagcactgaaaagaaaaaagaagttgaaaaaaagaaacggtcacgagttaaacaggtgcttgcagatattgctaagcaagtggacttctggtttggggatgcaaatcttcacaaggatagatttcttcgagaacagatagaaaaatctagagatggatatgttgatatatcactacttgtgtcttttaacaaaatgaaaaaattgactactgatgggaagttaattgccagagcattgagaagttcagctgttgtagagcttgatttggaaggcaccagaatccggaggaaaaaacctctgggggaaagaccaaaggatgaggatgaacgcacagtgtatgtggagttacttcccaaaaatgttaatcacagctggattgaaagagtatttgggaaatgtggcaatgttgtttatataagtataccacattataagtctactggagatccaaagggatttgcgtttgtggaatttgaaacaaaagaacaagcagcaaaagcaattgagtttcttaacaacccaccagaagaagcaccaagaaaacctggcatatttcctaaaacagtgaaaaataagcccattccagccttaagagttgtggaagagaagaaaaagaaaaagaagaagaaaggccgaatgaaaaaggaagacaatatccaagccaaagaagaaaacatggacacaagcaacaccagcatcagtaaaatgaaaagatccagacccacatctgagggctctgacattgagtccactgaaccccaaaagcagtgctcaaagaaaaagaaaaaacgggacagagttgaagcatctagcttacctgaagtcagaacagggaagaggaagagaagcagctctgaagatgcagaatccctagctccccgatcaaaagtaaagaaaattattcagaaagacatcattaaggaagcatcagaagcttccaaggaaaatagagatatagaaatctctactgaagaggaaaaggatactggagatctaaaagatagctctctcttgaaaacaaaaaggaaacataagaaaaaacataaagagagacataaaatgggagaagaagttataccattaagagtgctatcaaagagcgaatggatggatttgaaaaaagagtatttagcgctacaaaaagctagcatggcttctttaaaaaaaacaatatcccaaataaaatcagagtcagaaatggaaacagacagtggagtacctcaaaacactggaatgaaaaatgaaaaaacagccaacagggaagagtgtcgcacccaggagaaagttaatgcaacaggaccacagttcgtgagtggagtgattgtgaagatcattagcacagagcctctacctggcaggaaacaagtccgggatactttggcagcaatctcagaagttctttatgttgatttgctagaaggggatacagaatgccatgctagatttaaaactcctgaggatgctcaagcagtaataaatgcctatacagaaattaacaagaaacactgctggaaactcgagatcctttctggtgatcacgaacaaaggtattggcagaagattttggttgatagacaggcaaaacttaatcagcctcgggaaaagaaaagaggcactgaaaagttaatcaccaaagctgaaaagattagactggcaaagactcaacaagcgagtaaacatataagattttctgaatatgattgaaaaaaaaaacagttcacctcttaatacttcacaagatacttgagctgttcttgggagattcacttttattatggtagcactgcataattaatgtgtttttaattaaaagaaatatctttgttcctcaacttgtaaataagacttttttctagagacaaatatgatgtataccacaatttttcttaaacattttatttgttgaaattatcttagatgtcagtgtcaggtgatttagtaaataaatgtgttttgaacatta

SEQ ID NO: 147255 - DNA, 1047 bp, Homo sapiens
  Payload ID: 9123
  Gene Symbol: LARP7
  Gene Name: La ribonucleoprotein domain family, member 7
  ENST ID: ENST00000505034
  CDS Start-End: 151-1047
ggggcccggcgtggggaggtttggggcgcgcccggcctatgacggcgtccttgcggaagtacgggtgccgagagaagcagtagtcaataaagagagtgccgtatttcgcagattggagctgagctgtggctgccagaagatagcgaacgaatggaaactgaaagtggaaatcaggaaaaggtaatggaagaagaaagcactgaaaagaaaaaagaagttgaaaaaaagaaacggtcacgagttaaacaggtgcttgcagatattgctaagcaagtggacttctggtttggggatgcaaatcttcacaaggatagatttcttcgagaacagatagaaaaatctagagatggatatgttgatatatcactacttgtgtcttttaacaaaatgaaaaaattgactactgatgggaagttaattgccagagcattgagaagttcagctgttgtagagcttgatttggaaggcaccagaatccggaggaaaaaacctctgggggaaagaccaaaggatgaggatgaacgcacagtgtatgtggagttacttcccaaaaatgttaatcacagctggattgaaagagtatttgggaaatgtggcaatgttgtttatataagtataccacattataagtctactggagatccaaagggatttgcgtttgtggaatttgaaacaaaagaacaagcagcaaaagcaattgagtttcttaacaacccaccagaagaagcaccaagaaaacctggcatatttcctaaaacagtgaaaaataagcccattccagccttaagagttgtggaagagaagaaaaagaaaaagaagaagaaaggccgaatgaaaaaggaagacaatatccaagccaaagaagaaaacatggacacaagcaacaccagcatcagtaaaatgaaaagatccagacccacatctgagggctctgacattgagtccactgaaccccaaaagcagtgctcaaagaaaaagaaaaaacgggacagagttgaagcatctagcttacctgaagtcagaacagggaagaggaagagaagcagc

SEQ ID NO: 147256 - DNA, 753 bp, Homo sapiens
  Payload ID: 9123
  Gene Symbol: LARP7
  Gene Name: La ribonucleoprotein domain family, member 7
  ENST ID: ENST00000507443
  CDS Start-End: 367-753
gatggagaggagggggtgttgcgatggagagtgtccacgtcccttaatcttacacttttcacttactgacttaaaagtgcagcttagtgagataaaggtgtaattttttatattattctaggataatctggccctgtgttttaaaaggtacaaagaaactaaagctatgatccctaacatagaaggtaaattatttttaaatttaatttattaaatataaaaatgaatgttctttctgtttgtcttctgatggccaaatgtgagtccattattctctcagacagttaaaggctaatctaaatatttaactatattagctattgtggtgatttaaatatttacatctttttcttgtaattcacaggaatggaaactgaaagtggaaatcaggaaaaggtaatggaagaagaaagcactgaaaagaaaaaagaagttgaaaaaaagaaacggtcacgagttaaacaggtgcttgcagatattgctaagcaagtggacttctggtttggggatgcaaatcttcacaaggatagatttcttcgagaacagatagaaaaatctagagatggatatgttgatatatcactacttgtgtcttttaacaaaatgaaaaaattgactactgatgggaagttaattgccagagcattgagaagttcagctgttgtagagcttgatttggaaggcaccagaatccggaggaaaaaacctctgggggaaagaccaaaggatgaggatgaacgcacagtgtatgtg

SEQ ID NO: 147257 - DNA, 528 bp, Homo sapiens
  Payload ID: 9123
  Gene Symbol: LARP7
  Gene Name: La ribonucleoprotein domain family, member 7
  ENST ID: ENST00000513553
  CDS Start-End: 62-528
ggagacggaaatgtccgaaggccgcagtacttgaccctgtattttgggagtcgaacggagaatggaaactgaaagtggaaatcaggaaaaggatactggagatctaaaagatagctctctcttgaaaacaaaaaggaaacataagaaaaaacataaagagagacataaaatgggagaagaagttataccattaagagtgctatcaaagagcgaatggatggatttgaaaaaagagtatttagcgctacaaaaagctagcatggcttctttaaaaaaaacaatatcccaaataaaatcagagtcagaaatggaaacagacagtggagtacctcaaaacactggaatgaaaaatgaaaaaacagccaacagggaagagtgtcgcacccaggagaaagttaatgcaacaggaccacagttcgtgagtggagtgattgtgaagatcattagcacagagcctctacctggcaggaaacaagtccgggatactttggcagcaatctcagaagttctttatgttgatttgctaga

SEQ ID NO: 147258 - DNA, 2020 bp, Homo sapiens
  Payload ID: 9123
  Gene Symbol: LARP7
  Gene Name: La ribonucleoprotein domain family, member 7
  ENST ID: ENST00000509622
  CDS Start-End: 116-253
gaaaacgttgtcgctcatcctatgacgcgaaagtaaccgagactatcaggatccggagacggaaatgtccgaaggccgcagtacttgaccctgtattttgggagtcgaacggagaatggaaactgaaagtggaaatcaggaaaaggtaatggaagaagaaagcactgaaaagaaaaaagaagttgaaaaaaagaaacggtcacgagttaaacagatgttgatatatcactacttgtgtcttttaacaaaatgaaaaaattgactactgatgggaagttaattgccagagcattgagaagttcagctgttgtagagcttgatttggaaggcaccagaatccggaggaaaaaacctctgggggaaagaccaaaggatgaggatgaacgcacagtgtatgtggagttacttcccaaaaatgttaatcacagctggattgaaagagtatttgggaaatgtggcaatgttgtttatataagtataccacattataagtctactggagatccaaagggatttgcgtttgtggaatttgaaacaaaagaacaagcagcaaaagcaattgagtttcttaacaacccaccagaagaagcaccaagaaaacctggcatatttcctaaaacagtgaaaaataagcccattccagccttaagagttgtggaagagaagaaaaagaaaaagaagaagaaaggccgaatgaaaaaggaagacaatatccaagccaaagaagaaaacatggacacaagcaacaccagcatcagtaaaatgaaaagatccagacccacatctgagggctctgacattgagtccactgaaccccaaaagcagtgctcaaagaaaaagaaaaaacgggacagagttgaagcatctagcttacctgaagtcagaacagggaagaggaagagaagcagctctgaagatgcagaatccctagctccccgatcaaaagtaaagaaaattattcagaaagacatcattaaggaagcatcagaagcttccaaggaaaatagagatatagaaatctctactgaagaggaaaaggatactggagatctaaaagatagctctctcttgaaaacaaaaaggaaacataagaaaaaacataaagagagacataaaatgggagaagaagttataccattaagagtgctatcaaagagcgaatggatggatttgaaaaaagagtatttagcgctacaaaaagctagcatggcttctttaaaaaaaacaatatcccaaataaaatcagagtcagaaatggaaacagacagtggagtacctcaaaacactggaatgaaaaatgaaaaaacagccaacagggaagagtgtcgcacccaggagaaagttaatgcaacaggaccacagttcgtgagtggagtgattgtgaagatcattagcacagagcctctacctggcaggaaacaagtccgggatactttggcagcaatctcagaagttctttatgttgatttgctagaaggggatacagaatgccatgctagatttaaaactcctgaggatgctcaagcagtaataaatgcctatacagaaattaacaagaaacactgctggaaactcgagatcctttctggtgatcacgaacaaaggtattggcagaagattttggttgatagacaggcaaaacttaatcagcctcgggaaaagaaaagaggcactgaaaagttaatcaccaaagctgaaaagattagactggcaaagactcaacaagcgagtaaacatataagattttctgaatatgattgaaaaaaaaaacagttcacctcttaatacttcacaagatacttgagctgttcttgggagattcacttttattatggtagcactgcataattaatgtgtttttaattaaaagaaatatctttgttcctcaacttgtaaataagacttttttctagagacaaatatgatgtataccacaatttttcttaaacattttatttgttgaaattatcttagatgtcagtgtcaggtgatttagtaaataaatgtgttttgaacatta

SEQ ID NO: 147259 - DNA, 2332 bp, Homo sapiens
  Payload ID: 9123
  Gene Symbol: LARP7
  Gene Name: La ribonucleoprotein domain family, member 7
  Uniprot ID: Q4G0J3
  ENST ID: ENST00000509061
  CDS Start-End: 304-2073
ggaaaacgttgtcgctcatcctatgacgcgaaagtaaccgagactatcaggatccggagacggaaatgtccgaaggccgcagtacttgaccctgtattttgggagtcgaacggagactctgccatcgtcctcaaagagtaaaaaatccagttacggaagggaactaacacttgctagatatggtgtgcagagtgcgtttgcaaagaaacttaagagaaaacaaatgataggacacagggtggtggaagatctcaaagagataatctggccctgtgttttaaaaggtacaaagaaactaaagctatgatccctaacatagaaggaatggaaactgaaagtggaaatcaggaaaaggtaatggaagaagaaagcactgaaaagaaaaaagaagttgaaaaaaagaaacggtcacgagttaaacaggtgcttgcagatattgctaagcaagtggacttctggtttggggatgcaaatcttcacaaggatagatttcttcgagaacagatagaaaaatctagagatggatatgttgatatatcactacttgtgtcttttaacaaaatgaaaaaattgactactgatgggaagttaattgccagagcattgagaagttcagctgttgtagagcttgatttggaaggcaccagaatccggaggaaaaaacctctgggggaaagaccaaaggatgaggatgaacgcacagtgtatgtggagttacttcccaaaaatgttaatcacagctggattgaaagagtatttgggaaatgtggcaatgttgtttatataagtataccacattataagtctactggagatccaaagggatttgcgtttgtggaatttgaaacaaaagaacaagcagcaaaagcaattgagtttcttaacaacccaccagaagaagcaccaagaaaacctggcatatttcctaaaacagtgaaaaataagcccattccagccttaagagttgtggaagagaagaaaaagaaaaagaagaagaaaggccgaatgaaaaaggaagacaatatccaagccaaagaagaaaacatggacacaagcaacaccagcatcagtaaaatgaaaagatccagacccacatctgagggctctgacattgagtccactgaaccccaaaagcagtgctcaaagaaaaagaaaaaacgggacagagttgaagcatctagcttacctgaagtcagaacagggaagaggaagagaagcagctctgaagatgcagaatccctagctccccgatcaaaagtaaagaaaattattcagaaagacatcattaaggaagcatcagaagcttccaaggaaaatagagatatagaaatctctactgaagaggaaaaggatactggagatctaaaagatagctctctcttgaaaacaaaaaggaaacataagaaaaaacataaagagagacataaaatgggagaagaagttataccattaagagtgctatcaaagagcgaatggatggatttgaaaaaagagtatttagcgctacaaaaagctagcatggcttctttaaaaaaaacaatatcccaaataaaatcagagtcagaaatggaaacagacagtggagtacctcaaaacactggaatgaaaaatgaaaaaacagccaacagggaagagtgtcgcacccaggagaaagttaatgcaacaggaccacagttcgtgagtggagtgattgtgaagatcattagcacagagcctctacctggcaggaaacaagtccgggatactttggcagcaatctcagaagttctttatgttgatttgctagaaggggatacagaatgccatgctagatttaaaactcctgaggatgctcaagcagtaataaatgcctatacagaaattaacaagaaacactgctggaaactcgagatcctttctggtgatcacgaacaaaggtattggcagaagattttggttgatagacaggcaaaacttaatcagcctcgggaaaagaaaagaggcactgaaaagttaatcaccaaagctgaaaagattagactggcaaagactcaacaagcgagtaaacatataagattttctgaatatgattgaaaaaaaaaacagttcacctcttaatacttcacaagatacttgagctgttcttgggagattcacttttattatggtagcactgcataattaatgtgtttttaattaaaagaaatatctttgttcctcaacttgtaaataagacttttttctagagacaaatatgatgtataccacaatttttcttaaacattttatttgttgaaattatcttagatgtcagtgtcaggtgatttagtaaataaatgtgttttgaacatta

SEQ ID NO: 147260 - DNA, 477 bp, Homo sapiens
  Payload ID: 9123
  Gene Symbol: LARP7
  Gene Name: La ribonucleoprotein domain family, member 7
  ENST ID: ENST00000505216
  CDS Start-End: 82-219
gagagaagcagtagtcaataaagagagtgccgtatttcgcagattggagctgagctgtggctgccagaagatagcgaacgaatggaaactgaaagtggaaatcaggaaaaggtaatggaagaagaaagcactgaaaagaaaaaagaagttgaaaaaaagaaacggtcacgagttaaacagatgttgatatatcactacttgtgtcttttaacaaaatgaaaaaattgactactgatgggaagttaattgccagagcattgagaagttcagctgttgtagagcttgatttggaaggcaccagaatccggaggaaaaaacctctgggggaaagaccaaaggatgaggatgaacgcacagtgtatgtggagttacttcccaaaaatgttaatcacagctggattgaaagagtatttgggaaatgtggcaatgttgtttatataagtataccacattataagtctactggagatccaaagg

SEQ ID NO: 147261 - DNA, 1003 bp, Homo sapiens
  Payload ID: 9123
  Gene Symbol: LARP7
  Gene Name: La ribonucleoprotein domain family, member 7
  ENST ID: ENST00000511529
  CDS Start-End: 1-1003
agaaaaagaagaagaaaggccgaatgaaaaaggaagacaatatccaagccaaagaagaaaacatggacacaagcaacaccagcatcagtaaaatgaaaagatccagacccacatctgagggctctgacattgagtccactgaaccccaaaagcagtgctcaaagaaaaagaaaaaacgggacagagttgaagcatctagcttacctgaagtcagaacagggaagaggaagagaagcagctctgaagatgcagaatccctagctccccgatcaaaagtaaagaaaattattcagaaagacatcattaaggaagcatcagaagcttccaaggaaaatagagccccatgtcttaacggagagcttttttatttatttcaagatatagaaatctctactgaagaggaaaaggatactggagatctaaaagatagctctctcttgaaaacaaaaaggaaacataagaaaaaacataaagagagacataaaatgggagaagaagttataccattaagagtgctatcaaagagcgaatggatggatttgaaaaaagagtatttagcgctacaaaaagctagcatggcttctttaaaaaaaacaatatcccaaataaaatcagagtcagaaatggaaacagacagtggagtacctcaaaacactggaatgaaaaatgaaaaaacagccaacagggaagagtgtcgcacccaggagaaagttaatgcaacaggaccacagttcgtgagtggagtgattgtgaagatcattagcacagagcctctacctggcaggaaacaagtccgggatactttggcagcaatctcagaagttctttatgttgatttgctagaaggggatacagaatgccatgctagatttaaaactcctgaggatgctcaagcagtaataaatgcctatacagaaattaacaagaaacactgctggaaactcgagatcctttctggtgatcacgaacaaaggtattggcagaagattttggttgatagaca

SEQ ID NO: 147262 - DNA, 579 bp, Homo sapiens
  Payload ID: 9123
  Gene Symbol: LARP7
  Gene Name: La ribonucleoprotein domain family, member 7
  ENST ID: ENST00000508577
  CDS Start-End: 222-579
gagactatcaggatccggagacggaaatgtccgaaggccgcagtacttgaccctgtattttgggagtcgaacggagactctgccatcgtcctcaaagagtaaaaaatccagttacggaagggaactaacacttgctagatatggtgtgcagagtgcgtttgcaaagaaacttaagagaaaacaaatgataggacacagggtggtggaagatctcaaagagaatggaaactgaaagtggaaatcaggaaaaggtaatggaagaagaaagcactgaaaagaaaaaagaagttgaaaaaaagaaacggtcacgagttaaacaggtgcttgcagatattgctaagcaagtggacttctggtttggggatgcaaatcttcacaaggatagatttcttcgagaacagatagaaaaatctagagatggatatgttgatatatcactacttgtgtcttttaacaaaatgaaaaaattgactactgatgggaagttaattgccagagcattgagaagttcagctgttgtagagcttgatttggaaggcaccagaatccggaggaaaaaacctctgggggaaagaccaa

SEQ ID NO: 147263 - DNA, 556 bp, Homo sapiens
  Payload ID: 9123
  Gene Symbol: LARP7
  Gene Name: La ribonucleoprotein domain family, member 7
  ENST ID: ENST00000512589
  CDS Start-End: 136-441
gtctttctcaattgggaccggaaaacgttgtcgctcatcctatgacgcgaaagtaaccgagactatcaggatccggagacggaaatgtccgaaggccgcagtacttgaccctgtattttgggagtcgaacggagaatggaaactgaaagtggaaatcaggaaaaggtaatggaagaagaaagcactgaaaagaaaaaagaagttgaaaaaaagaaacggtcacgagttaaacaggtgcttgcagatattgctaagcaagtggacttctggtttggggatgcaaatcttcacaaggatagatttcttcgagaacagatagaaaaatctagagatggatgcaggaatgcactggctccatgtctgctcactccaacttctgcccccacctccaccccctcagccccacccaagcgatcctccatcagcctccccagtagctgagaacacagatgttgatatatcactacttgtgtcttttaacaaaatgaaaaaattgactactgatgggaagttaattgccagagcattgagaagttcagctgttgtagagcttgat

SEQ ID NO: 147264 - DNA, 560 bp, Homo sapiens
  Payload ID: 9124
  Gene Symbol:
  Gene Name: LA16c-306E5.2
  ENST ID: ENST00000575785
  CDS Start-End: 84-374
aacagcttccggcgtgacgcagtagaaaaggtggcgtggctggcgattcgtgttcgtgagggccttttctggtggccgtttgtatgcaggggcaaaaggtgctcttggagaaaactggatctcagcttggagaacaggaactgccagactttcaaccgcagactcctaggagagatctcagggagagctctccagcagagccttcccaggcaggagcttatgaccggctgagcccccatcattgggagaaatccccactcctccaagaaccaacccccaaattggctgggacagcatacagaaaggctgtacctggaggaaggaagtgcggagccagcctgagttgggagaagagctccagagagtgtgaatgacagaggtggtgccatccagcgcgctcagcgaggtcagcctgcgcctcctctgccacgatgacatagacactgtgaagcacctgtgtggcgactggttccccatcgagtacccagactcatggtatcgtgatatcacatccaacaagaagttcttttcccttgctgcaacctacagaggtgccattg

SEQ ID NO: 147265 - DNA, 2905 bp, Homo sapiens
  Payload ID: 9124
  Gene Symbol:
  Gene Name: LA16c-306E5.2
  ENST ID: ENST00000618352
  CDS Start-End: 797-1132
agaaattagtaatgtttataaatttgtttatagtagtttgtaaattattatcagaaatagtaatgtctataaaccacttactttaagagacaatcaggaactatgatgagggcaataataaaaggagaaatcttacaaaaaattaacctggatgttgtgcttgctctaaggttaagtcacttagggaaacagattcagtattatccaatggcttaaccatccttccttctttctgtttgctttttggtggtggctgggttacaaagagcagtgtcttctgccctgaaggtagcagtattacggtgggtgcctagaggtcaattattggtttagaagagattcaggcccttaacttttacatgtgctttccaggaaaggagacactttctttctcagccctgtgtgaggactatgttagcccagaaagtgttcttggaccactgggtgcccattctcagtgctaggaacaggaagaccctggtttcctggtagaatttatggatcctacagctttctctccatcaaactttaagtcacagtaagataggactctggagtcacaggcacagccaggagaggtcagcgtccttatgctgactcctggtcctagacatgggtcttaagatccagtagtcagtaggtctgttgcaaagtcagggactggctagatctctccacagcagaagaaagctcatacatgctgacctgaggaacttaatctgacagtttaccgacacactcataacgcatctcttccttcctgtgatgagagtactgctttcatgtgtactgtctgatgacgggtgagggcagagttcttagtgaagcctctctcacagtgagaacacctgtaaggcttttcaccagtgtgggtttttcggtgggcactgaagtgggagctattgttgaagattttcccacacactgcacacttgtatgggctctccccagtgtggatgcgccggtgagcactgaactgggaactgttgttgaatctctttccacagacaatgcactggtaaggcttttccccggtatgggtcctctggtggacaatgaggctggaactctggttgaagcttttcccacattgcccacactgatagggcctctcccctgtgtgagttcgtaggtgggcagtgaggttggagcgctcactaaagcccttcccgcactcactgcacttgtgaggcttctcgcctgtgtggattctttgatgccgaacaagataagaacttcggctaaaggttttcccacattcaggacattgagatactttttccagtttgagcgctggcttgtggggagagtgcacactctgagagcagtttttcccacagaggatatgtgtacaggctttgtccctggcacaaaaactctggtgactcatcttctcctgggatggggttttctcctcactctcccctggagaatttctacattgccttcttgatgttggctcactctccaagcctttttgtagctcagagtgccaataaactcctctggactttctctgtaaagccttgtttatttctacttcctctgaatcatcccattttagattttcttttttaatctcgttcttgaactcaaaaccaagtctgtttgggaacagcactggcaggtctagtttcctgacttcctggccaggattcctgaagtccttttcatccctgtctgcaccatccacagtgccatcttctacctccgtgggttccccattctggtgattcagctctccagcctcaatatcacttccttcttggccaggaacagcatcgcttgccataggaggtgcagaggcccaggagcctgaaagagcattcatttcctcataaaagatacaaggctcaggcacacggcctctcctcactttgcggtaactcaactgtaggcttttgaacttggtgcgacactgttctggggtccgcagaaaaccctgctcccagagtccttccgccatggccctgtagatctggctgttctgctgacaggtctggagttttccataaaattgagaactactaagaatagccaggagcgtcttggtctcttcatagccccagggcacacctgttgccagcgagacgtgactgtccttcctctgggtggcacccctgtagagggccctttgtgcagggcctgggcacatccattcttgctgacagagggatacagctctgttgtcacgcatggctggtccctgtaacaacactggagctgctgctaccgataaaatagcaccactctagcctgggacccagctgtccagaccacagcacctgtctcctggtcgtggagacctgtgttttgaggcaggttcctgggagcctgaggagcaagccaggctgttgtccaggagctctctgtacatcctcaaccagagccacagcttcctcgccgttttctggatgctgctccctcacccaggtctggatctcctctggcaagatagtcagaaactgctccaaaaccagcagctccaggatttcctcttttgagtgggtcttcggcctcagccactgacaacagagttcccagagtttgctaaaagcttcatgtgggccagttacctcctggtagcaaaactgcctgaagcgctgacgggaggcctcggagtcagggctgttaccctggagggctgatttctggccctgtgtgggatccttgtttgaggatgggtgtgcctcggtactcttcactgcagccatcatttgcttcaacgaactggcttactctggttgccacttctaccctggagatcagagtccatctttcccacatcactgggaagccatgttctcctgcaaggaatgtctttctgtaatccgtgggacatgagagtgtcagacatgtgtagagactcacagcggaaaaaaagggctcaactttgaaggatgtc

SEQ ID NO: 147266 - DNA, 2062 bp, Homo sapiens
  Payload ID: 9125
  Gene Symbol:
  Gene Name: LA16c-380H5.3
  ENST ID: ENST00000573315
  CDS Start-End: 22-1632
cctcccactctgcctagagtcatgggcgcctgggccttccccgcagcccttttccttctctgcctgacttccgagagcctgcaaggtgggctgccccttctgcctcctggcctggggaaagtctatggcccccacagtggcctgggagcaggctatgatgggggcgtgaagccacagaagccaggattcgtggtcaggcatgggctgggaacccagccagacactgaagggggcatgaaaccccaaaacctagggttcaggaccttcgcaggtgctgcagcccagccaggatatggaaacgggctgggagcagcggccttcccagtggccggagcccagtcaggtcctgccgctcaaaatggctttggaccaggctttggagggggtggaaaaccccagaagccaggccccaccactcaaaatggctatagaccaggctatgtgggggccgtcaaaccccagaagccaggattccagtacagaattgggctgggagcccagccaggctttagaggggacatgaaggcacaggagccaggattagggaatgggaatgggctgagtgctcagccagtcttgacagcccagaaccgatttggatttggagcaggccttggagggaatgtgaagcctctgaagccaggatatgggaaaaggctgagagcaggggccttccctggggctggaacccagccagaatatggccatggaaatggaccgggagtccagccaggcctaggagcggggatgaagcctcagatgccaggcctgggagctccaaacggctatggaccaggaaggggcagggctggggttccaggaggtccagagcggaggccttgggtccctcacttgctccctttctcttcaccaggctatttgggggttatgaaggcccagaagccaggccccttagcccagaatggctacagagcaggtgctggagagggcatgaaacctcagaagccaggcctgcgagggaccttgaagcctcagaagtcaggacacggccatgaaaatgggccctggccaggtccctgcaatgcgagggtcgctccgatgctcctccccaggcttcccactccaggggtcccttcggacaaagagggtggctggggcctgaaatcccagcccccttccgcagtgcagaatggcaagttaccagcaccaatgccagccatccagtggggactgaaacctcagaaagcagggcaccagcctccaaatggctatggaccgggagcagaaccaggttttaatggtggcctcgagccacagaaaattggtttaggttatgggaatggtgtcctgggagccagggtcttccccgaggcccacccacagccagggttccatggggccaatggttttaggaatagggatggggtggaagctctggtgtaccccaaagcagcagctctagcccctgaaggaaatgggcaggccggggtgctgtggaactctcgctggcccaccctccaggcctggggggccggcttgaagcctggatatcaggctggagatgaatatgctgaggccaggagccagccagggggccccgacgtgaagagaggcagcaatggccagctggggaatggctacggaggccgctgccctctggggaaatgctgagcactgcaatgcccctcgcctgcccagcaaggaagacagacccttgggcttggcctctggtgctgcctggccgggggtctcctccatgctagaaccacaaacgtgcttccctgcttgcctccgcgtgccatgcaaggggcttgctgaccagggtgggagtggcatgggcctgcagccaccacccagcacctcattcattcatttggcaaacatcaatgaggccatgtgccagggaccatgttcccaacaggagaaatcatgagaagaaaacagactcgatcaacgcctgccctcagggagggcatcacttggtgaccgcctagcgggggaaccacatccaagttaggggccttgtgcatggaaaagaacacttcattctttgtgttttcatttataatcgatttattaaagttgttagataaaaatctca

SEQ ID NO: 147267 - DNA, 5326 bp, Homo sapiens
  Payload ID: 9126
  Gene Symbol:
  Gene Name: LA16c-431H6.6
  ENST ID: ENST00000454337
  CDS Start-End: 1-367
caagaagaaaggcaagccagcaagcatggtgaagaacaaggagcaggtccgccacttctactaccgcacctggcacaagatcaccaagtacatcgactttgatcatgtgttctctcgaggcctgaagaagtcatcccaggaactgtatggcctgatctgctatggcgagctgcgcaagaagattgggggctgtatggatgacaagaatgcaacaaagctgaatgaactcattcaggttggacggagtttcaccatgttggccaggctggtcttgaactctcgacctcaggaaacctgtcaagggccaccactgtacgttacaaagggcggaacctgcggatcaaagcgcccatgtgccgggccctgaagaagctgtgcgatccagatggcttgagtgatgaagaggaccagaagccagtgcgcctgcctctgaaagtccctatagagctacagccgcggaacaaccacgcctgggcccgtgtgcagagccttgcccagaacccacgcctcaggatgatcgtggagctacatcgaaaggtctccagcctcatcgaattcttgaagcagaagtgggcgctccatgaggtgcgagttcggaagacactcgaggagcggcagctgcaggactcatgctccgcaccgatgcaggagaagacttggcagatgcacctgcggaggagctccaggagaaggggagccccgcggggcctccgccgtctcagggacagcctgccgccaggcccccgaaggaggtccccgccagccggctggctcagcagctccgtgaggagggctggaacctgcagacctccgaaagcctcacgctggccgaagtctacctcatgatgggcaagcccagcaagctgcagctggagtacgactggctggggcccggccgccaggacccccgccccggctccctacccaccgccctccacaagcagcgcctcctcagctgcctcctgaagctcatttccaccgaggtcaaccccaagctggctctggaagcaaacaccatctctacagcctcagtaaggcccgcccaggaggagcagtcgatgacgcccccagggaaggtggtgaccgtcagctctcgcagcccccgctgccctcggaaccaggcctccctccgcagcagcaagaccttcccgcccagctctgcaccctgctcctcaggtttgagaaaccctccaagacccctcttggtgcctggtccctccagcacaggaagcaatgactcagatggaggcctttttgctgtcccgacaaccttgccacccaacagccgacacgggaagctcttctctcccagtaaagaagcagagctgactttccgccagcatctgaactccatcagtatgcagtcggatttcttcctgccaaagccccggaagctgcggaaccggcacctgcggaagccactggtggtccagagaacactgctccctagaccatcggaaaaccagtcccacaacgtttgttccttctccatcctgtctaactcttccgtaactgggagaggttcgttccggcccatccagtcttctctgaccaaagcagctctgtctcggccgatcgtgcccaaggtccttccaccccaggccacgagtcacctggccagtgctatcgacttagcagctacaagtgccggcatcctttccgggaaccccctccctgccttggacaccgagggcttgtctggcatctctccactgtcttcagacgaggtgacgggtgccatctcggggcaggactctactggaactcaccaggatggagacaccctccccaccgtggggggctccgacccatttgtcagcatcccttcgaggcctgagcaggagccagtggcagacagtttccagggctcatctgttctctccttatctgagctgcccaaggcccctctccagaatggcctctccataccgctgtcctcgtcagagagctccagcacccggctgtctccaccagacgtctctgctctgctcgacatctccctgcccggcccacctgaggatgcgctgtcacagggcgagcctgccacacacattagcgactccatcattgagatcgccatcagctccggtgaaggagtccctctttctccagcaaaactgaatggcagtgacagttccaagagccttccctccccgtccagcagcccccagccacactggatcgcctctcccacccacgacccccagtggtaccccagtgactccaccgactcctcgctcagcagcctgtttgcaagcttcatctccccagagaagagccggaagatgttgccgactcccattgggaccaacagtggcacttccttgcttggccccagcttgttggatggaaactcgcgggactcatttgtgtccaggtccctggctgacgttgcagaggttgtggattcccagctggtgtgcatgatgaacgaaaacagcattgattacatttctcggttcaatgacctggcccaagagctgtccatcgctgagcctggccgccgagaagctctgtttgatggtggtggaggcggccccgctgtcagtgacctgtcccagtgaccacacgtcctggtggcggatgaagccctcttcgagctagagaaaaatagataagcccagcagccccagaagatggtctgaacagaggcatctccgcacccaagactgtgcaacgggcaggaacgtggtcacagagctgcttccccacgagcagcaggcaacggcgtccaaggagactaggatgagttcttggcaagggccagcgttagaaatcactgtggtactagagccgttcttcaccacgcctgggcccatgttagggtctgcataatgatcccatttcagcctgtgctctgcctcgattgttgtgttggacattccggtggcatttccttctgagacaagggagtatgtgtgccttggtgtagttgctgtgcactaggagctgtgatctccctctctgcagggaggccccagcccctgctgcttgctttctgccaaacctgtgctatgcatcagctgtgccctctgtggactgtaacgggcaggacagttgggtgtggcctgggctcatgcctggtggtgtcacatcccaaggcagcaagagcatggataccgatcacagggctgctgcggagtcgtggggccctgggctggtgcctcccctccctagaggttttgttcgtactcttaacagggagtgggggcaggaagagtcctgtactatgcaggttgtgtggactttacatgggaccctgctaagctggttgaaaatgtttttcttgtgttttaagaattaggagacatggaagaggaagaacaaagtcccctctgtagttggtttccttcctgtgtccctttgcaagcttccaggcgatctaaggtgtcatttctccctcctggggtgacccttaggcgctaatatgattacagcgaagactttcctgataagttctcaaactcgatgtgtgactgtttggcacttgagacaaacctgcctttgcagggaaagtgtctctcacgggcattggtgtgggcgtgcctgacatacgtgttcagtcccttgcatacctttgccttgagacttctgtgtctccttcccatttgggacacccaggtgagggcccagacatctggatgtggtcagacctcaccaaatatatgccttcgtggtggtctccctccttgcgccctcttgggtggccagcgttcctactgcagacggcccaacatccagtctttccccaggacagagctaacaagggcccctttgccttctcatcctcaggagttccaggcacatgagtcaccgtccatccacatccagtgtggcctggagctgctacagaggtgttgggcaggccatgcctgtgccgccatctctcccttcctgcctcatttcatcccccgcagcagccgggattgattgtgctttcctaacccccttggacctactctccctcctccccaccattcctcttcccccacatgtgtggcacgctgcagccctcaaggccagccctggcccctccactgcttctctccccatccacaatggagaaggtgaaaagaggagggaaaggcctttggtgtggacaagcatgtggacgccctccgtcctgcagtcttgccagcccaccacagccactgtagaccacaggcaggccgtgtactgcaccactgggaggacgtggagaggacagtgaacttccagggccatgaagcccccaggaggagaatcgagcaatctttttggaagtccagaagaagctactccttccagcaggcctaataggatggcatctaatatttttggaccaacagaagaacctcagaacatacccaagaggacaaatcccccaggtgacttgagtagtcttgaattctccatctgttctggagactttggttgaatacaggcactgaggacacaaaagtggacgggggcttctggttcctgccagggagctgctcccaattgttccacggacccccatgagattcctgaaattgcgtgcaaattattgtgcatttaaacatttttcctagggagggagagtgtttttattcagatcgtcagtgggattgaaactcttaacaaggaagaattgatctagcacacatctacatagttcttcagtatttacccaacctcctagtggttacagtaggagggactctttgaaaaaggtttcttggccaggcgcggtggctcatgcctgtaatcccagcactttgggaggccaaggtgtgcagatcacgaggtcaggagatcgagaccatcctggctaacacagtgaaaccccatctctactaaaaaagaaaaaaaattagccgggcgtggtggcgggcacctgtagtcccagctactcaggaggctgaggcaggagaatggcatgaacccaggaggcggagcttgcagtgagccgggatcgcaccactgcattctagcctgggtgacagagcgagactccgtctcaaaaaaaaaaagaaaaagaaaaagaaaaaggtttctcagccgggcgtggtggctcatgcctgtaatcctagcactttgggaggccaaggcaggtgatcatgaggtcaagagtttgagaccagcctggccgacatggcaaaactccatctgtactaaaaatacaaaaattagctgggtgtggtggtgcacgcctataatcccagctactcaggaggctgaggcaggagaatcacttgaacccgggaggtggaggtggcagtgagccaaattcatgccactgcactccagcctgggtgacagctagactccatctcaaaaagaaaaaaaaaaaaaaatagaaaaa

SEQ ID NO: 147268 - DNA, 4099 bp, Homo sapiens
  Payload ID: 9127
  Gene Symbol: LACC1
  Gene Name: laccase (multicopper oxidoreductase) domain containing 1
  Uniprot ID: Q8IV20
  ENST ID: ENST00000325686
  CDS Start-End: 322-1614
aggtgaggcggggcgggtgtcgtcgcgctgggccgagcttacgactccagctgacccgctcgcggctgcccaatttcgttgaggctcaggacgagggacggggcggcaaattgtcacagaggtcgccgtagaccggtgtgcaaccgaaggtgaagagcgggaaggcgaggaccgaatcgcctctggtgtgcgttgtccgacaggaagtcccgaatgggctgtgagccgccggtggaggtgcccgggcaggtgcagagccacagcctgcgccccgtgagccgaggcgggtgatttatttggcataaaagtattctttcaaggatggcagaagctgttttgattgatctttttggtttgaaattgaactctcaaaaaaactgccatcagacattactgaagactttgaatgctgtccaataccaccatgctgccaaggccaagtttctctgtataatgtgttgcagtaacatcagctatgaaagggatggagaacaagataattgtgaaatagaaacaagcaatggattatcagctctcttggaagaatttgagattgttagctgtcccagcatggctgccactttgtataccattaaacagaaaattgatgaaaaaaatctgagcagcattaaggtaattgtacccaggcacaggaagacattaatgaaagcttttattgatcaactcttcactgatgtttacaattttgaatttgaagatttgcaagtgacttttaggggagggctttttaaacagtccattgaaataaacgtaatcacagctcaagaactaagaggaattcagaatgaaatagaaacatttttgagaagtctgccagcactgagaggaaaattaactattatcacttcttctttgatcccagatattttcatacatggatttactacaagaacaggtgggatatcttatataccaactcttagctcattcaatctcttcagtagttccaaacggagagatcccaaggtagtggttcaagaaaatctgcgtaggttggcgaatgctgcaggatttaatgtggagaaattttaccgaataaagactcatcattccaatgacatctggattatgggaagaaaggagcctgactcttatgatggaataaccacaaatcagagaggagtcacaatagcagctcttggtgcagactgtataccgatagtttttgcagatccagtcaaaaaagcatgtggggttgctcacgctggttggaaaggtactttgttgggtgttgctatggctacagtgaatgctatgatagcagaatatggctgcagtttggaagacattgttgttgtacttggaccttcagtaggaccttgctgttttactcttccaagggaatcagcagaggcatttcataatcttcatcctgcatgtgtacaactatttgattcaccaaatccctgtatcgacatccgtaaagccacaaggattcttctagaacagggaggaattcttccacagaatattcaggaccagaaccaagatctcaacctctgtacatcttgccatcctgacaagtttttctcccatgtccgagatggccttaattttggtacacagattggcttcatatcaattaaagaatgagatacttgactggatttttgtataactgcttcctgcctccttccaaactgactgcaagagagaaatttagctgtttgatttacttaaaaccaaatggattacaatggataattcatcttttgggtatatttttactattattcaaagccaaatgattttcatttaattgtaataataactgacaaaaatcagtatgttgtagctaatatgttttatgcatgagaattattcttaaagtttgttctccctgtttattacacagatcaggaatagatttgttcagttcagtatttattggataccctctattggtcaggcattgtgttaagcatatgtgaatcaaaatgaacacaactttttcctttgagtctgatacagtgaaggagataaacacttctacaacttaaatttaattttaatagcagtagaagagaacataaggaatagaggttaattttacccagaagcaggatagagaaaatattacagagaaaatcacatatcacatgggctcgaaagatgtagaggtttttgacaaatgaagaacaaccataacaggtagagggaacaccatgaaccagggcatgaaactgaaagtgcataacatattctagagagagaagggtgtgggcatgagttagggctggaaaaacaggttggaaacagataagtaagggtctcaaatgcaatgtcaaagagcttgcagtttattttccaggcaatgagtaggcagccaaaaaaaaaaaagtaaggatgttttttttttttttcccatggcatcatatttaagaggatggatttaaattgtgtgagaccaaagcatagagactagataagaggcgatcaaaatatttcaaaaagaaataatgaagatccaatgaaggaagtggaaattaaaatagggaagagagtagatggattagagagacatttaagagatggaatcaatagatcctgttactagataatggaagtaagaggtgaggaagagtggaaaagtcattaatgactctaagatttctgcttggctgcttaccaagattggcaacaaagggagggagaaggtttggaaaaagagagaaggataatgagtttgactttacatagaatgaagggcatccagatagaaatctttggttaataattagaaatatagacctagaaattaggaggaaacctgagacagagacaaatatttcaaagcttacaatacagagatgatacctgattctattggagcaggtttgatcatctaggcagaaattaggatgagaaaaaaggagatccaataatacaaccttatagtcacagaagtaagaaaaaaagggtagttgttttgaagaagccaggataggtgtggaaagtactcaaaaagaaatcttcagggataaaataaagtgataatttaaaagaaatcaatggattaaacatattgaaactgttctataggcagtggtcattgagtcagctttcagtgcattaggaagaagatgcataggtgtcaactcttttctgacagcatttactagagaagagaaaaagctggggactacatcttcaaggaagggactttttttggatgagcagttttgagtgtgtttgtcagttaaagagaggaattaggttagttttcatttgggaaaaattgtatatatatttaatgtaagttatcacattgcatcttaaaaatattcttatttaatacatatatttcctacatgtatatgtggtagcatgatagcaaataacatttgtttggtatttccaaaggactttcatgtacattgcctcattttacctttacagctactctgaaatacacaggcattatcccttttattcagctgagaaaactgagcttcattgaggtggaggtcaaaaatcacaaaatttgtgatgaattaagatttgaacatatgttttgtgactccagttttcctttcagattttaaaattaattaaagggatcttcattatacttttattgttaactttttgttaacataatttattcatacattcagtgaaaattttgttgaggtactgggacaggttaaaaaatacagttgtagccctcaggatatttaatatccagtgaaaagtgacagtcagtaaaccaacaatctcaatactttgatatatgttgtgaggttgtgataaccgattcttgtttagtttaattctatatctcccttagaccagtgttaaatttaaataaaacacctcattttttccaattcagggaaggcactaaacataaagcataggatagaaatgttgaactcatccaaaatattattttgtttaatgaaaatgatgaagattaaggaatacttccatgtattgagtaaggttgataattttctaattcttcactgtgcattattttgtttgaagttggtaaatttggagtatcctgcagacacattttgctttatgtactacaacattctacaaccaaataaaaattattttgattatctga

SEQ ID NO: 147269 - DNA, 4262 bp, Homo sapiens
  Payload ID: 9127
  Gene Symbol: LACC1
  Gene Name: laccase (multicopper oxidoreductase) domain containing 1
  Uniprot ID: Q8IV20
  ENST ID: ENST00000441843
  CDS Start-End: 486-1778
agacctgcagctcctgccgccctgcgcccgctcccagggcccgtcgttccgccgccctatccctcctcaaggggcccctagctgcctcctcgcgaccctttccggactcggcctgcccactcctgcccgctaacccgcctggctcccgggcgagagccctcgcgcggctctggttcctgttcctctaacgccgccggggctgcgggatgccgactccgcggaccgcccagacccggaactgctgaggcagcagcgggctcgcggcgcttggctcatcccgggattccccagctctcgcgctgggcccgccgcgttcgcaccaagcacgccaggcggccctggcctacctccctcccgcctcccggcagctggcacgagggaacctggccgtcaggtttcccctgggatcctgggacggtatcaggcggggaatctgtgcggccgcggcgaggtgatttatttggcataaaagtattctttcaaggatggcagaagctgttttgattgatctttttggtttgaaattgaactctcaaaaaaactgccatcagacattactgaagactttgaatgctgtccaataccaccatgctgccaaggccaagtttctctgtataatgtgttgcagtaacatcagctatgaaagggatggagaacaagataattgtgaaatagaaacaagcaatggattatcagctctcttggaagaatttgagattgttagctgtcccagcatggctgccactttgtataccattaaacagaaaattgatgaaaaaaatctgagcagcattaaggtaattgtacccaggcacaggaagacattaatgaaagcttttattgatcaactcttcactgatgtttacaattttgaatttgaagatttgcaagtgacttttaggggagggctttttaaacagtccattgaaataaacgtaatcacagctcaagaactaagaggaattcagaatgaaatagaaacatttttgagaagtctgccagcactgagaggaaaattaactattatcacttcttctttgatcccagatattttcatacatggatttactacaagaacaggtgggatatcttatataccaactcttagctcattcaatctcttcagtagttccaaacggagagatcccaaggtagtggttcaagaaaatctgcgtaggttggcgaatgctgcaggatttaatgtggagaaattttaccgaataaagactcatcattccaatgacatctggattatgggaagaaaggagcctgactcttatgatggaataaccacaaatcagagaggagtcacaatagcagctcttggtgcagactgtataccgatagtttttgcagatccagtcaaaaaagcatgtggggttgctcacgctggttggaaaggtactttgttgggtgttgctatggctacagtgaatgctatgatagcagaatatggctgcagtttggaagacattgttgttgtacttggaccttcagtaggaccttgctgttttactcttccaagggaatcagcagaggcatttcataatcttcatcctgcatgtgtacaactatttgattcaccaaatccctgtatcgacatccgtaaagccacaaggattcttctagaacagggaggaattcttccacagaatattcaggaccagaaccaagatctcaacctctgtacatcttgccatcctgacaagtttttctcccatgtccgagatggccttaattttggtacacagattggcttcatatcaattaaagaatgagatacttgactggatttttgtataactgcttcctgcctccttccaaactgactgcaagagagaaatttagctgtttgatttacttaaaaccaaatggattacaatggataattcatcttttgggtatatttttactattattcaaagccaaatgattttcatttaattgtaataataactgacaaaaatcagtatgttgtagctaatatgttttatgcatgagaattattcttaaagtttgttctccctgtttattacacagatcaggaatagatttgttcagttcagtatttattggataccctctattggtcaggcattgtgttaagcatatgtgaatcaaaatgaacacaactttttcctttgagtctgatacagtgaaggagataaacacttctacaacttaaatttaattttaatagcagtagaagagaacataaggaatagaggttaattttacccagaagcaggatagagaaaatattacagagaaaatcacatatcacatgggctcgaaagatgtagaggtttttgacaaatgaagaacaaccataacaggtagagggaacaccatgaaccagggcatgaaactgaaagtgcataacatattctagagagagaagggtgtgggcatgagttagggctggaaaaacaggttggaaacagataagtaagggtctcaaatgcaatgtcaaagagcttgcagtttattttccaggcaatgagtaggcagccaaaaaaaaaaaagtaaggatgttttttttttttttcccatggcatcatatttaagaggatggatttaaattgtgtgagaccaaagcatagagactagataagaggcgatcaaaatatttcaaaaagaaataatgaagatccaatgaaggaagtggaaattaaaatagggaagagagtagatggattagagagacatttaagagatggaatcaatagatcctgttactagataatggaagtaagaggtgaggaagagtggaaaagtcattaatgactctaagatttctgcttggctgcttaccaagattggcaacaaagggagggagaaggtttggaaaaagagagaaggataatgagtttgactttacatagaatgaagggcatccagatagaaatctttggttaataattagaaatatagacctagaaattaggaggaaacctgagacagagacaaatatttcaaagcttacaatacagagatgatacctgattctattggagcaggtttgatcatctaggcagaaattaggatgagaaaaaaggagatccaataatacaaccttatagtcacagaagtaagaaaaaaagggtagttgttttgaagaagccaggataggtgtggaaagtactcaaaaagaaatcttcagggataaaataaagtgataatttaaaagaaatcaatggattaaacatattgaaactgttctataggcagtggtcattgagtcagctttcagtgcattaggaagaagatgcataggtgtcaactcttttctgacagcatttactagagaagagaaaaagctggggactacatcttcaaggaagggactttttttggatgagcagttttgagtgtgtttgtcagttaaagagaggaattaggttagttttcatttgggaaaaattgtatatatatttaatgtaagttatcacattgcatcttaaaaatattcttatttaatacatatatttcctacatgtatatgtggtagcatgatagcaaataacatttgtttggtatttccaaaggactttcatgtacattgcctcattttacctttacagctactctgaaatacacaggcattatcccttttattcagctgagaaaactgagcttcattgaggtggaggtcaaaaatcacaaaatttgtgatgaattaagatttgaacatatgttttgtgactccagttttcctttcagattttaaaattaattaaagggatcttcattatacttttattgttaactttttgttaacataatttattcatacattcagtgaaaattttgttgaggtactgggacaggttaaaaaatacagttgtagccctcaggatatttaatatccagtgaaaagtgacagtcagtaaaccaacaatctcaatactttgatatatgttgtgaggttgtgataaccgattcttgtttagtttaattctatatctcccttagaccagtgttaaatttaaataaaacacctcattttttccaattcagggaaggcactaaacataaagcataggatagaaatgttgaactcatccaaaatattattttgtttaatgaaaatgatgaagattaaggaatacttccatgtattgagtaaggttgataattttctaattcttcactgtgcattattttgtttgaagttggtaaatttggagtatcctgcagacacattttgctttatgtactacaacattctacaaccaaataaaaattattttgattatctg

SEQ ID NO: 147270 - DNA, 705 bp, Homo sapiens
  Payload ID: 9127
  Gene Symbol: LACC1
  Gene Name: laccase (multicopper oxidoreductase) domain containing 1
  ENST ID: ENST00000425906
  CDS Start-End: 212-705
atcccgggattccccagctctcgcgctgggcccgccgcgttcgcaccaagcacgccaggcggccctggcctacctccctcccgcctcccggcagctggcacgagggaacctggccgtcaggtttcccctgggatcctgggacggtatcaggcggggaatctgtgcggccgcggcgaggtgatttatttggcataaaagtattctttcaaggatggcagaagctgttttgattgatctttttggtttgaaattgaactctcaaaaaaactgccatcagacattactgaagactttgaatgctgtccaataccaccatgctgccaaggccaagtttctctgtataatgtgttgcagtaacatcagctatgaaagggatggagaacaagataattgtgaaatagaaacaagcaatggattatcagctctcttggaagaatttgagattgttagctgtcccagcatggctgccactttgtataccattaaacagaaaattgatgaaaaaaatctgagcagcattaaggtaattgtacccaggcacaggaagacattaatgaaagcttttattgatcaactcttcactgatgtttacaattttgaatttgaagatttgcaagtgacttttaggggagggctttttaaacagtccattgaaataaacgtaatcacagctcaagaactaagaggaattcagaatgaaataga

SEQ ID NO: 147271 - DNA, 551 bp, Homo sapiens
  Payload ID: 9128
  Gene Symbol: LACRT
  Gene Name: lacritin
  Uniprot ID: Q9GZZ8
  ENST ID: ENST00000257867
  CDS Start-End: 55-471
attccccagaccttctgcagattctgtggttatactcactcctcatcccaaagaatgaaatttaccactctcctcttcttggcagctgtagcaggggccctggtctatgctgaagatgcctcctctgactcgacgggtgctgatcctgcccaggaagctgggacctctaagcctaatgaagagatctcaggtccagcagaaccagcttcacccccagagacaaccacaacagcccaggagacttcggcggcagcagttcaggggacagccaaggtcacctcaagcaggcaggaactaaaccccctgaaatccatagtggagaaaagtatcttactaacagaacaagcccttgcaaaagcaggaaaaggaatgcacggaggcgtgccaggtggaaaacaattcatcgaaaatggaagtgaatttgcacaaaaattactgaagaaattcagtctattaaaaccatgggcatgagaagctgaaaagaatgggatcattggacttaaagccttaaatacccttgtagcccagagctattaaaacgaaagcatcca

SEQ ID NO: 147272 - DNA, 504 bp, Homo sapiens
  Payload ID: 9128
  Gene Symbol: LACRT
  Gene Name: lacritin
  ENST ID: ENST00000547511
  CDS Start-End: 40-423
tgcagattctgtggttatactcactcctcatcccaaagaatgaaatttaccactctcctcttcttggcagctgtagcaggggccctggtctatgctgaagatgcctcctctgactcgacgggtgctgatcctgcccaggaagctgggacctctaagcctaatgaagagatctcaggtccagcagaaccagcttcacccccagagacaaccacaacagcccaggagacttcggcggcagcagttcaggggacagccaaggtcacctcaagcaggcaggaactaaaccccctgaaacaagcccttgcaaaagcaggaaaaggaatgcacggaggcgtgccaggtggaaaacaattcatcgaaaatggaagtgaatttgcacaaaaattactgaagaaattcagtctattaaaaccatgggcatgagaagctgaaaagaatgggatcattggacttaaagccttaaatacccttgtagcccagagctattaaaacgaaagcatccaa

SEQ ID NO: 147273 - DNA, 391 bp, Homo sapiens
  Payload ID: 9128
  Gene Symbol: LACRT
  Gene Name: lacritin
  ENST ID: ENST00000546721
  CDS Start-End: 1-258
cctgcccaggaagctgggacctctaagcctaatgaagagatctcaggtccagcagaaccagcttcacccccagagacaaccacaacagcccaggagacttcggcggcagcagttcaggggacagccaaggtcacctcaagcaggcaggaactaaaccccctgaaacaagcccttgcaaaagcaggaaaaggaatgcacggaggcgtgccaggtggaaaacaattcatcgaaagtgagtgcatcccaagatggaagtgaatttgcacaaaaattactgaagaaattcagtctattaaaaccatgggcatgagaagctgaaaagaatgggatcattggacttaaagccttaaatacccttgtagcccagagctattaaaacgaaagcatccaa

SEQ ID NO: 147274 - DNA, 728 bp, Homo sapiens
  Payload ID: 9129
  Gene Symbol: LALBA
  Gene Name: lactalbumin, alpha-
  Uniprot ID: P00709
  ENST ID: ENST00000301046
  CDS Start-End: 27-455
atttcaggttcttgggggtagccaaaatgaggttctttgtccctctgttcctggtgggcatcctgttccctgccatcctggccaagcaattcacaaaatgtgagctgtcccagctgctgaaagacatagatggttatggaggcatcgctttgcctgaattgatctgtaccatgtttcacaccagtggttatgacacacaagccatagttgaaaacaatgaaagcacggaatatggactcttccagatcagtaataagctttggtgcaagagcagccaggtccctcagtcaaggaacatctgtgacatctcctgtgacaagttcctggatgatgacattactgatgacataatgtgtgccaagaagatcctggatattaaaggaattgactactggttggcccataaagccctctgcactgagaagctggaacagtggctttgtgagaagttgtgagtgtctgctgtccttggcacccctgcccactccacactcctggaatacctcttccctaatgccacctcagtttgtttctttctgttcccccaaagcttatctgtctctgagccttgggccctgtagtgacatcaccgaattcttgaagactattttccagggatgcctgagtggtgcactgagctctagacccttactcagtgccttcgatggcactttcactacagcacagatttcacctctgtcttgaataaaggtcccactttgaagtca

SEQ ID NO: 147275 - DNA, 1243 bp, Homo sapiens
  Payload ID: 9129
  Gene Symbol: LALBA
  Gene Name: lactalbumin, alpha-
  ENST ID: ENST00000549817
  CDS Start-End: 47-418
tgaaactgagtgatgcttccatttcaggttcttgggggtagccaaaatgaggttctttgtccctctgttcctggtgggcatcctgttccctgccatcctggccaagcaattcacaaaatgtgagctgtcccagctgctgaaagacatagatggttatggaggcatcgctttgcctgaattgatctgtaccatgtttcacaccagtggttatgacacacaagccatagttgaaaacaatgaaagcacggaatatggactcttccagatcagtaataagctttggtgcaagagcagccaggtccctcagtcaaggaacatctgtgacatctcctgtgacaagttcctggatgatgacattactgatgacataatgtgtgccaagaagatcctggatattaaaggaattgactactggtgaatccttattctattttctatttccccatcctccttctccttaccccattagcccagcacccctttcctcttaccctatctcttggtcatttaatctagaatacagtgtctgaaacaaagcttacctagagactcaggtttctgttattaagcctctctcgctccgctccttggtagcaattttcctaataaggggttgcctaatggagggctcagacccaggcctcctttcacttagacttggacatctaattccacttgtttagttctatgccctaaagcaagctgttggtaacattgcatctcttttttaaccctacaattttcttggatattttttatggactgtattccacttgatggcttgtgtcgcttgacatcaggccaggaatgtctttctgtaattctcgtccacgctcttccacttcagccctcctgggaatgaatgtaaagattcagtcagctaactcaccttgtcccccttctccattatcaggttggcccataaagccctctgcactgagaagctggaacagtggctttgtgagaagttgtgagtgtctgctgtccttggcacccctgcccactccacactcctggaatacctcttccctaatgccacctcagtttgtttctttctgttcccccaaagcttatctgtctctgagccttgggccctgtagtgacatcaccgaattcttgaagactattttccagggatgcctgagtggtgcactgagctctagacccttactcagtgccttcgatggcactttcactacagcacagatttcacctctgtcttgaataaaggtcccactttgaa

SEQ ID NO: 147276 - DNA, 1972 bp, Homo sapiens
  Payload ID: 9130
  Gene Symbol: LACTB
  Gene Name: lactamase, beta
  Uniprot ID: P83111
  ENST ID: ENST00000261893
  CDS Start-End: 73-1716
cttccctccgccccgcgccgcggctggcagggtgtgcgtgagtttggtggcggccggctgtgcagagacgccatgtaccggctcatgtcagcagtgactgcccgggctgccgcccccgggggcttggcctcaagctgcggacgacgcggggtccatcagcgcgccgggctgccgcctctcggccacggctgggtcgggggcctcgggctggggctggggctggcgctcggggtgaagctggcaggtgggctgaggggcgcggccccggcgcagtcccccgcggcccccgaccctgaggcgtcgcctctggccgagccgccacaggagcagtccctcgccccgtggtctccgcagaccccggcgccgccctgctccaggtgcttcgccagagccatcgagagcagccgcgacctgctgcacaggatcaaggatgaggtgggcgcaccgggcatagtggttggagtttctgtagatggaaaagaagtctggtcagaaggtttaggttatgctgatgttgagaaccgtgtaccatgtaaaccagagacagttatgcgaattgctagcatcagcaaaagtctcaccatggttgctcttgccaaattgtgggaagcagggaaactggatcttgatattccagtacaacattatgttcccgaattcccagaaaaagaatatgaaggtgaaaaggtttctgtcacaacaagattactgatttcccatttaagtggaattcgtcattatgaaaaggacataaaaaaggtgaaagaagagaaagcttataaagccttgaagatgatgaaagagaatgttgcatttgagcaagaaaaagaaggcaaaagtaatgaaaagaatgattttactaaatttaaaacagagcaggagaatgaagccaaatgccggaattcaaaacctggcaagaaaaagaatgattttgaacaaggcgaattatatttgagagaaaagtttgaaaattcaattgaatccctaagattatttaaaaatgatcctttgttcttcaaacctggtagtcagtttttgtattcaacttttggctataccctactggcagccatagtagagagagcttcaggatgtaaatatttggactatatgcagaaaatattccatgacttggatatgctgacgactgtgcaggaagaaaacgagccagtgatttacaatagagcaagattttatgtttacaataaaaagaaacgtcttgtcaacacaccttacgtggataactcctataaatgggctggtggtggatttctgtctacagtgggtgaccttctgaaatttgggaatgcaatgctttatggttaccaagttgggctgtttaagaactcaaatgaaaatcttttacctggatacctcaaaccagaaacaatggttatgatgtggaccccagtccctaacacagagatgtcttgggataaagagggtaaatatgcaatggcgtggggtgttgtggaaaggaaacaaacgtatggttcgtgtagaaagcaacggcattatgcttcacatactggaggggcagtgggtgccagtagtgtcctgctggtccttcctgaagaactggatacagagactataaataacaaggttcccccaagaggaatcattgtttctatcatatgtaacatgcaatctgttggcctcaatagcaccgctttgaagattgcccttgaatttgataaagacagatcagactgataaccttaacaccataggtgcaaaatgagttgttctgaggtttttttgaaacattaaagttccaaaacatgacatttttaagaataaatttgaaatagagtataactgaatgcagagaattatgtacctctaattgcttaattttgtaatggtcttttattgtagaattggttctttatactcagggaagtaattatattgtttttactttttgaaaaaagtgttaactcttgaaataaaatattctgataaaata

SEQ ID NO: 147277 - DNA, 2978 bp, Homo sapiens
  Payload ID: 9130
  Gene Symbol: LACTB
  Gene Name: lactamase, beta
  Uniprot ID: P83111
  ENST ID: ENST00000413507
  CDS Start-End: 40-1161
gtgcgtgagtttggtggcggccggctgtgcagagacgccatgtaccggctcatgtcagcagtgactgcccgggctgccgcccccgggggcttggcctcaagctgcggacgacgcggggtccatcagcgcgccgggctgccgcctctcggccacggctgggtcgggggcctcgggctggggctggggctggcgctcggggtgaagctggcaggtgggctgaggggcgcggccccggcgcagtcccccgcggcccccgaccctgaggcgtcgcctctggccgagccgccacaggagcagtccctcgccccgtggtctccgcagaccccggcgccgccctgctccaggtgcttcgccagagccatcgagagcagccgcgacctgctgcacaggatcaaggatgaggtgggcgcaccgggcatagtggttggagtttctgtagatggaaaagaagtctggtcagaaggtttaggttatgctgatgttgagaaccgtgtaccatgtaaaccagagacagttatgcgaattgctagcatcagcaaaagtctcaccatggttgctcttgccaaattgtgggaagcagggaaactggatcttgatattccagtacaacattatgttcccgaattcccagaaaaagaatatgaaggtgaaaaggtttctgtcacaacaagattactgatttcccatttaagtggaattcgtcattatgaaaaggacataaaaaaggtgaaagaagagaaagcttataaagccttgaagatgatgaaagagaatgttgcatttgagcaagaaaaagaaggcaaaagtaatgaaaagaatgattttactaaatttaaaacagagcaggagaatgaagccaaatgccggaattcaaaacctggcaagaaaaagaatgattttgaacaaggcgaattatatttgagagaaaagtttgaaaattcaattgaatccctaagattatttaaaaatgatcctttgttcttcaaacctggtagtcagtttttgtattcaacttttggctataccctactggcagccatagtagagagagcttcaggatgtaaatatttggactatatgcagaaaatattccatgacttggatatgctgacgactgtgcaggaagaaaacgagccagtgatttacaatagagcaaggtaaatgaataccttctgctgtgtctagctatatcgcatcttaacactattttattaattaaaagtcaaattttctttgtttccattccaaaatcaacctgccacattttgggagcttttctacatgtctgttttctcatctgtaaagtgaaggaagtaaaacatgtttataaagtacactaagaccctttgatgaaagatagcaataatattaataattcaaacatgaataactaaaccaaaattgcacccaccatgagcatctgtaatttgctctttaaccattccttttttaggttttaactaatactttgtttacgtgttattagtttttaattgttttcatactgttttgaaataattttatacttatagaaaagttgcaagagtagtacaaaggattcacatatcctctttactcagattcccttaatgttagtttaccgcatttgcattacctttctgtctacatatgtgtttgtttctgaaccatttggaaataagttgtagacgtgatacccctttacctataaatatttacatgtgtattttctaaaaacaaggacattcagggccgggtgcagtggctcacgcctgtaatcccaacactttggaaggccgaggtgggtggatcacctgaggtcaggagttcaagaccagcctggccaatgtggtgaaatcaaccctctctctactaaaaatgcaaaaattagccaggtgtggtggcgggtgcctataatcccagccacgcgggaggctgaggcaggagaatcgcttgaacccaggaggtggagttgcagtaagccaagatcgtgcccctgcacttcaggctgggcgaaagagtgagactccatgtcaaaaaaggaaaaaaaaaaaaaaaaaaaggacatttgggaaattaacatagatacaatgcttttattaaatctacagaccttactcaaattttgccagttgttccaataatgtcctttatagcaaaagagcagaaaaacttttttttctggtctaggatctaatccatgatctcacattgcatttacttgtcatatctatcagaagtcacttgacatcagtttgtcccattattgctgatggtattttaatcactttttgaggtggtgcctgtcaggttattgtaaagttactatttttactttataattaacaagtatatttggaggagataatttgagatgatgtaaaaatcctctttctcatcaaactttctactagttttagcatctatcagtgattcatgactgaatcagttattacagtgatggttgtcaaatggtgattttctaattccatcatccattctgtatttatcagttggcattctattataagaaggtgcgggccggggcggtggctcacgcctgtaatcccatcactttgggaggctgaggtgggcggatcacatgagaccaagtttgagaccagcctggccaacatggcgaaaccccatctctactgaaaatacaaaaaatcagccgggcatggtggcatacacttgtaatctcggctgctcgggagtctgaggcaggagaatctcttgaacccaggaggcagaggttgcagtgagccaagatcatgccactgcactccagcctgggcgacaaagtgagactccatctcagaaaaaaaagtgctttcccttctctcttatttatttattcataccagtatgcactcatggattcttattttagtcaatgagttataatctgtcactgtcattatttaatatgttgcttttaaaatagtatatgaaataataaaactgtaacagtaaatggttattagattgcttaccta

SEQ ID NO: 147278 - DNA, 552 bp, Homo sapiens
  Payload ID: 9130
  Gene Symbol: LACTB
  Gene Name: lactamase, beta
  ENST ID: ENST00000557972
  CDS Start-End: 174-552
ctgggctttttcagcaggcccgtaactgtcggttctttccccttcggtcttaggatgaggtgggcgcaccgggcatagtggttggagtttctgtagatggaaaagaagtctggtcagaaggtttaggttatgctgatgttgagaaccgtgtaccatgtaaaccagagacagttatgcgaattgctagcatcagcaaaagtctcaccatggttgctcttgccaaattgtgggaagcagggaaactggatcttgatattccagtacaacattatgttcccgaattcccagaaaaagaatatgaaggtgaaaaggtttctgtcacaacaagattactgatttcccatttaagtggaattcgtcattatgaaaaggacataaaaaaggtgaaagaagagaaagcttataaagccttgaagatgatgaaagagaatgttgcatttgagcaagaaaaagaaggcaaaagtaatgaaaagaatgattttactaaatttaaaacagagcaggagaatgaagccaaatgccggaattcaaaacctggcaagaaaaagaatg

SEQ ID NO: 147279 - DNA, 1508 bp, Homo sapiens
  Payload ID: 9131
  Gene Symbol: LACTB2
  Gene Name: lactamase, beta 2
  Uniprot ID: Q53H82
  ENST ID: ENST00000276590
  CDS Start-End: 38-904
cagataggcgacacgccggcgggcggctgaggcgggaatggctgctgtactgcagcgcgtcgagcggctgtccaatcgagtcgtgcgtgtgttgggctgtaacccgggtcccatgaccctccaaggcaccaacacctacctagtggggaccggccccaggagaatcctcattgacactggagaaccagcaattccagaatacatcagctgtttaaagcaggctctaactgaatttaacacagcaatccaggaaattgtagtgactcactggcaccgagatcattctggaggcataggagatatttgtaaaagcatcaataatgacactacctattgcattaaaaaactcccacggaatcctcagagagaagaaattataggaaatggagagcaacaatatgtttatctgaaagatggagatgtgattaagactgagggagccactctaagagttctatatacccctggccacactgatgatcacatggctctactcttagaagaggaaaatgctatcttttctggagattgcatcctaggggaaggaacaacggtatttgaagacctctatgattatatgaactctttaaaagagttattgaaaatcaaagctgatattatatatccaggacatggcccagtaattcataatgctgaagctaaaattcaacaatacatttctcacagaaatattcgagagcagcaaattcttacattatttcgtgagaactttgagaaatcatttacagtaatggagcttgtaaaaattatttacaagaatactcctgagaatttacatgaaatggctaaacataatctcttacttcatttgaaaaaactagaaaaagaaggaaaaatatttagcaacacagatcctgacaagaaatggaaagctcatctttagtttcagattaaagaaagctttgttttattttgctttcagagaatggtatgttttcttaactataggttattttatagagaatataaaagtataaaacattaaaaataaccctagatatactttaaaataatgttatatttatgctaaaatatgtaaattacactatacaaccatatgataggttatttctctaaccttgtcttctaacgttttaccaaaaattcataatctaatagtttatcagttttcaatagattaaataaaatgattactttaaaaataataaaatttatctaatttaaagttgatattatttttggccgttagttatctattactagtgatcagttatactgttttctatagctactttatttaacagcacagatttctatgcacctttactctttcctcaacccttgtctctatctgtacataattgctttgtcttgatgtttctatcaactatatcatgactatctattggttccataactctgtatcatgtgtattttcttattctggtataccacaaatgattcatgcaaatgaatttttggtgattgaaaaatattaaattcccaatttaaagtattatatgata

SEQ ID NO: 147280 - DNA, 1034 bp, Homo sapiens
  Payload ID: 9131
  Gene Symbol: LACTB2
  Gene Name: lactamase, beta 2
  Uniprot ID: Q53H82
  ENST ID: ENST00000522447
  CDS Start-End: 55-921
ttccgcgctggagtatccagataggcgacacgccggcgggcggctgaggcgggaatggctgctgtactgcagcgcgtcgagcggctgtccaatcgagtcgtgcgtgtgttgggctgtaacccgggtcccatgaccctccaaggcaccaacacctacctagtggggaccggccccaggagaatcctcattgacactggagaaccagcaattccagaatacatcagctgtttaaagcaggctctaactgaatttaacacagcaatccaggaaattgtagtgactcactggcaccgagatcattctggaggcataggagatatttgtaaaagcatcaataatgacactacctattgcattaaaaaactcccacggaatcctcagagagaagaaattataggaaatggagagcaacaatatgtttatctgaaagatggagatgtgattaagactgagggagccactctaagagttctatatacccctggccacactgatgatcacatggctctactcttagaagaggaaaatgctatcttttctggagattgcatcctaggggaaggaacaacggtatttgaagacctctatgattatatgaactctttaaaagagttattgaaaatcaaagctgatattatatatccaggacatggcccagtaattcataatgctgaagctaaaattcaacaatacatttctcacagaaatattcgagagcagcaaattcttacattatttcgtgagaactttgagaaatcatttacagtaatggagcttgtaaaaattatttacaagaatactcctgagaatttacatgaaatggctaaacataatctcttacttcatttgaaaaaactagaaaaagaaggaaaaatatttagcaacacagatcctgacaagaaatggaaagctcatctttagtttcagattaaagaaagctttgttttattttgctttcagagaatgaatctcactgtgttgcccaggctagagtgcggtggtgcgatttcagctcacagcaacctctgcctcct

SEQ ID NO: 147281 - DNA, 1641 bp, Homo sapiens
  Payload ID: 9132
  Gene Symbol: LACTBL1
  Gene Name: lactamase, beta-like 1
  ENST ID: ENST00000426928
  CDS Start-End: 1-1641
atgactggctgcttcctgtggcagtatcacctccccaagctgaagaccggttccctgggaccagaggagacctctgcccctgtgaggatgtgtccccggcaccctgagcccgtgcccctggctcacccactccccgtgttgaaggaggccctggaaaaggtggaccagatcctgcgccaggcaatgtctgccccaggcgtggctgccatgtctgcagttgtcatccacaatgatactgtgctctggacagggaactttgggaagaagaatggctcagacccggcttctggggcccccaatgagtacaccatgtacaggatctccagcatctccaagatctttcctgtcctcatgctgtaccgtctgtgggaggagggcatcgtggcctccctagatgaccctctggagcggtatgccagcaccttcaccattaacaacccgctgggcctggcatcagccgaacagcagggcctgatggacgggctggagcaggtgggccccgccccaaggccttcacctgtcacccttcgaaggatggccagccagctctcagggctgcccagaaggctgcgctccacttcactgctgtggaagggcagcacccaggaggccctgaacctgctcaaggacgatgtgctggtagtggacccgggaaccagatgccattacagcacgctggccttctcgctcctggcccacgtcctggcagctcacaccgcccagggcgactaccagcgctgggtctcggagaacgtgctggagccgctggggatggcagacacgggctttgacctcacgcccgacgtgcgcgcgcgcctggccgcgggcttctacggcagcgggcggccggcgccactctatgacctgggctggtaccggccgtcgggccagatgtactctaccgccgccgacctggccaagctggccgtggcgctcctgggcggcgggccccggcggctcctgcggcccgacgcggccaagacgctgctggcgccgctgctggcctgcccgggcgcctacttcgccaacgagacgggcacgccgtgggagttccacgcgcagcggggctaccgcgtggtgcgcaaggacggcgatctggacggctacgccgccaccttctcgctggtgcccccgctgcgtctgggcctggtgctgctgctggcagggccacggccgcccgggcccgacctggtggcgcgggcctacgatgagctcctgcccgccctggagcgcgccctccgggaggccgagcccggcccggctccgccgcccaccgcgcaccccttcgccggctacttcaccttcgccaacctgaccttctacgaggtgcgcgccgggccggcgggcgagctgcgcctgcgccagttcgggccgcgcgtggaggcgctggtgcctccagcgttccgcaccctggcgctgcgccacctgcacggccgcgtcttccagctgcacgtggcccacgagttcccctgcgcactgccactcggcgacgcgtggctctcgctcgaggcccagcacgggcagctggtcaacttctaccccttggatcaccacgggctgtcacccggcttcgacgtgcccggcctcaacacgtacagagtgctgcggctgcggggcaagccggtgttcaagacccagtga

SEQ ID NO: 147282 - DNA, 1500 bp, Homo sapiens
  Payload ID: 9132
  Gene Symbol: LACTBL1
  Gene Name: lactamase, beta-like 1
  Uniprot ID: A8MY62
  ENST ID: ENST00000618559
  CDS Start-End: 1-1500
atgtgtccccggcaccctgagcccgtgcccctggctcacccactccccgtgttgaaggaggccctggaaaaggtggaccagatcctgcgccaggcaatgtctgccccaggcgtggctgccatgtctgcagttgtcatccacaatgatactgtgctctggacagggaactttgggaagaagaatggctcagacccggcttctggggcccccaatgagtacaccatgtacaggatctccagcatctccaagatctttcctgtcctcatgctgtaccgtctgtgggaggagggcatcgtggcctccctagatgaccctctggagcggtatgccagcaccttcaccattaacaacccgctgggcctggcatcagccgaacagcagggcctgatccttcgaaggatggccagccagctctcagggctgcccagaaggctgcgctccacttcactgctgtggaagggcagcacccaggaggccctgaacctgctcaaggacgatgtgctggtagtggacccgggaaccagatgccattacagcacgctggccttctcgctcctggcccacgtcctggcagctcacaccgcccagggcgactaccagcgctgggtctcggagaacgtgctggagccgctggggatggcagacacgggctttgacctcacgcccgacgtgcgcgcgcgcctggccgcgggcttctacggcagcgggcggccggcgccactctatgacctgggctggtaccggccgtcgggccagatgtactctaccgccgccgacctggccaagctggccgtggcgctcctgggcggcgggccccggcggctcctgcggcccgacgcggccaagacgctgctggcgccgctgctggcctgcccgggcgcctacttcgccaacgagacgggcacgccgtgggagttccacgcgcagcggggctaccgcgtggtgcgcaaggacggcgatctggacggctacgccgccaccttctcgctggtgcccccgctgcgtctgggcctggtgctgctgctggcagggccacggccgcccgggcccgacctggtggcgcgggcctacgatgagctcctgcccgccctggagcgcgccctccgggaggccgagcccggcccggctccgccgcccaccgcgcaccccttcgccggctacttcaccttcgccaacctgaccttctacgaggtgcgcgccgggccggcgggcgagctgcgcctgcgccagttcgggccgcgcgtggaggcgctggtgcctccagcgttccgcaccctggcgctgcgccacctgcacggccgcgtcttccagctgcacgtggcccacgagttcccctgcgcactgccactcggcgacgcgtggctctcgctcgaggcccagcacgggcagctggtcaacttctaccccttggatcaccacgggctgtcacccggcttcgacgtgcccggcctcaacacgtacagagtgctgcggctgcggggcaagccggtgttcaagacc

SEQ ID NO: 147283 - DNA, 6279 bp, Homo sapiens
  Payload ID: 9133
  Gene Symbol: LCT
  Gene Name: lactase
  Uniprot ID: P09848
  ENST ID: ENST00000264162
  CDS Start-End: 12-5795
gttcctagaaaatggagctgtcttggcatgtagtctttattgccctgctaagtttttcatgctgggggtcagactgggagtctgatagaaatttcatttccaccgctggtcctctaaccaatgacttgctgcacaacctgagtggtctcctgggagaccagagttctaactttgtagcaggggacaaagacatgtatgtttgtcaccagccactgcccactttcctgccagaatacttcagcagtctccatgccagtcagatcacccattataaggtatttctgtcatgggcacagctcctcccagcaggaagcacccagaatccagacgagaaaacagtgcagtgctaccggcgactcctcaaggccctcaagactgcacggcttcagcccatggtcatcctgcaccaccagaccctccctgccagcaccctccggagaaccgaagcctttgctgacctcttcgccgactatgccacattcgccttccactccttcggggacctagttgggatctggttcaccttcagtgacttggaggaagtgatcaaggagcttccccaccaggaatcaagagcgtcacaactccagaccctcagtgatgcccacagaaaagcctatgagatttaccacgaaagctatgcttttcagggcggaaaactctctgttgtcctgcgagctgaagatatcccggagctcctgctagaaccacccatatctgcgcttgcccaggacacggtcgatttcctctctcttgatttgtcttatgaatgccaaaatgaggcaagtctgcggcagaagctgagtaaattgcagaccattgagccaaaagtgaaagttttcatcttcaacctaaaactcccagactgcccctccaccatgaagaacccagccagtctgctcttcagcctttttgaagccataaataaagaccaagtgctcaccattgggtttgatattaatgagtttctgagttgttcatcaagttccaagaaaagcatgtcttgttctctgactggcagcctggcccttcagcctgaccagcagcaggaccacgagaccacggactcctctcctgcctctgcctatcagagaatctgggaagcatttgccaatcagtccagggcggaaagggatgccttcctgcaggatactttccctgaaggcttcctctggggtgcctccacaggagcctttaacgtggaaggaggctgggccgagggtgggagaggggtgagcatctgggatccacgcaggcccctgaacaccactgagggccaagcgacgctggaggtggccagcgacagttaccacaaggtagcctctgacgtcgccctgctttgcggcctccgggctcaggtgtacaagttctccatctcctggtcccggatcttccccatggggcacgggagcagccccagcctcccaggcgttgcctactacaacaagctgattgacaggctacaggatgcgggcatcgagcccatggccacgctgttccactgggacctgcctcaggccctgcaggatcatggtggatggcagaatgagagcgtggtggatgccttcctggactatgcggccttctgcttctccacatttggggaccgtgtgaagctgtgggtgaccttccatgagccgtgggtgatgagctacgcaggctatggcaccggccagcaccctcccggcatctctgacccaggagtggcctcttttaaggtggctcacttggtcctcaaggctcatgccagaacttggcaccactacaacagccatcatcgcccacagcagcaggggcacgtgggcattgtgctgaactcagactgggcagaacccctgtctccagagaggcctgaggacctgagagcctctgagcgcttcttgcacttcatgctgggctggtttgcacaccccgtctttgtggatggagactacccagccaccctgaggacccagatccaacagatgaacagacagtgctcccatcctgtggctcaactccccgagttcacagaggcagagaagcagctcctgaaaggctctgctgattttctgggtctgtcgcattacacctcccgcctcatcagcaacgccccacaaaacacctgcatccctagctatgataccattggaggcttctcccaacacgtgaaccatgtgtggccccagacctcatcctcttggattcgtgtggtgccctgggggataaggaggctgttgcagtttgtatccctggaatacacaagaggaaaagttccaatataccttgccgggaatggcatgcccataggggaaagtgaaaatctctttgatgattccttaagagtagactacttcaatcaatatatcaatgaggtgctcaaggctatcaaggaagactctgtggatgttcgttcctacattgctcgttccctcattgatggcttcgaaggcccttctggttacagccagcggtttggcctgcaccacgtcaacttcagcgacagcagcaagtcaaggactcccaggaaatctgcctactttttcactagcatcatagaaaagaacggtttcctcaccaagggggcaaaaagactgctaccacctaatacagtaaacctcccctccaaagtcagagccttcacttttccatctgaggtgccctccaaggctaaagtcgtttgggaaaagttctccagccaacccaagttcgaaagagatttgttctaccacgggacgtttcgggatgactttctgtggggcgtgtcctcttccgcttatcagattgaaggcgcgtgggatgccgatggcaaaggccccagcatctgggataactttacccacacaccagggagcaatgtgaaagacaatgccactggagacatcgcctgtgacagctatcaccagctggatgccgatctgaatatgctccgagctttgaaggtgaaggcctaccgcttctctatctcctggtctcggattttcccaactgggagaaacagctctatcaacagtcatggggttgattattacaacaggctgatcaatggcttggtggcaagcaacatctttcccatggtgacattgttccattgggacctgccccaggccctccaggatatcggaggctgggagaatcctgccttgattgacttgtttgacagctacgcagacttttgtttccagacctttggtgatagagtcaagttttggatgacttttaatgagcccatgtacctggcatggctaggttatggctcaggggaatttcccccaggggtgaaggacccaggctgggcaccatataggatagcccacgccgtcatcaaagcccatgccagagtctatcacacgtacgatgagaaatacaggcaggagcagaagggggtcatctcgctgagcctcagtacacactgggcagagcccaagtcaccaggggtccccagagatgtggaagccgctgaccgaatgctgcagttctccctgggctggtttgctcaccccatttttagaaacggagactatcctgacaccatgaagtggaaagtggggaacaggagtgaactgcagcacttagccacctcccgcctgccaagcttcactgaggaagagaagaggttcatcagggcgacggccgacgtcttctgcctcaacacgtactactccagaatcgtgcagcacaaaacacccaggctaaacccaccctcctacgaagacgaccaggagatggctgaggaggaggacccttcgtggccttccacggcaatgaacagagctgcgccctgggggacgcgaaggctgctgaactggatcaaggaagagtatggtgacatccccatttacatcaccgaaaacggagtggggctgaccaatccgaacacggaggatactgataggatattttaccacaaaacctacatcaatgaggctttgaaagcctacaggctcgatggtatagaccttcgagggtatgtcgcctggtctctgatggacaactttgagtggctaaatggctacacggtcaagtttggactgtaccatgttgatttcaacaacacgaacaggcctcgcacagcaagagcctccgccaggtactacacagaggtcattaccaacaacggcatgccactggccagggaggatgagtttctgtacggacggtttcctgagggcttcatctggagtgcagcttctgctgcatatcagattgaaggtgcgtggagagcagatggcaaaggactcagcatttgggacacgttttctcacacaccactgagggttgagaacgatgccattggagacgtggcctgtgacagttatcacaagattgctgaggatctggtcaccctgcagaacctgggcgtgtcccactaccgtttttccatctcctggtctcgcatcctccctgatggaaccaccaggtacatcaatgaagcgggcctgaactactacgtgaggctcatcgatacactgctggccgccagcatccagccccaggtgaccatttaccactgggacctaccacagacgctccaagatgtaggaggctgggagaatgagaccatcgtgcagcggtttaaggagtatgcagatgtgctcttccagaggctgggagacaaggtgaagttttggatcacgctgaatgagccctttgtcattgcttaccagggctatggctacggaacagcagctccaggagtctccaataggcctggcactgccccctacattgttggccacaatctaataaaggctcatgctgaggcctggcatctgtacaacgatgtgtaccgcgccagtcaaggtggcgtgatttccatcaccatcagcagtgactgggctgaacccagagatccctctaaccaggaggatgtggaggcagccaggagatatgttcagttcatgggaggctggtttgcacatcctattttcaagaatggagattacaatgaggtgatgaagacgcggatccgtgacaggagcttggctgcaggcctcaacaagtctcggctgccagaatttacagagagtgagaagaggaggatcaacggcacctatgacttttttgggttcaatcactacaccactgtcctcgcctacaacctcaactatgccactgccatctcttcttttgatgcagacagaggagttgcttccatcgcagatcgctcgtggccagactctggctccttctggctgaagatgacgccttttggcttcaggaggatcctgaactggttaaaggaggaatacaatgaccctccaatttatgtcacagagaatggagtgtcccagcgggaagaaacagacctcaatgacactgcaaggatctactaccttcggacttacatcaatgaggccctcaaagctgtgcaggacaaggtggaccttcgaggatacacagtttggagtgcgatggacaattttgagtgggccacaggcttttcagagagatttggtctgcattttgtgaactacagtgacccttctctgccaaggatccccaaagcatcagcgaagttctacgcctctgtggtccgatgcaatggcttccctgaccccgctacagggcctcacgcttgtctccaccagccagatgctggacccaccatcagccccgtgagacaggaggaggtgcagttcctggggctaatgctcggcaccacagaagcacagacagctttgtacgttctcttttctcttgtgcttcttggagtctgtggcttggcatttctgtcatacaagtactgcaagcgctctaagcaagggaaaacacaacgaagccaacaggaattgagcccggtgtcttcattctgatgagttaccacctcaagttctatgaagcaggcctagtttcttcatctatgtttaccggccaccaaacaccttagggtcttagactctgctgatactggacttctccataaagtcctgctgcaccgttagagatgactttaatcttgaatgatttcgacttgctgagtaaaatggaaatatctccatcttgctccagtatcagagttcatttgggcatttgagaagcaagtagctcttgcggaaacgtgtagatactggtctagtgggtctgtgaaccacttaattgaacttaacagggctgttttaagtttcagagttgttaagggttgttaagggagcaaaaaccgtaaaaatccttcctataagaagaaatcaactccattgcatagactgcaatatcatctcctgcccttctgcaagctctccctagcttcacatcttgtgttttccagaaaataaaaacagcagactgtcctttctccta

SEQ ID NO: 147284 - DNA, 3508 bp, Homo sapiens
  Payload ID: 9133
  Gene Symbol: LCT
  Gene Name: lactase
  ENST ID: ENST00000452974
  CDS Start-End: 1-3012
aaggtggctcacttggtcctcaaggctcatgccagaacttggcaccactacaacagccatcatcgcccacagcagcaggggcacgtgggcattgtgctgaactcagactgggcagaacccctgtctccagagaggcctgaggacctgagagcctctgagcgcttcttgcacttcatgctgggctggtttgcacaccccgtctttgtggatggagactacccagccaccctgaggacccagatccaacagatgaacagacagtgctcccatcctgtggctcaactccccgagttcacagaggcagagaagcagctcctgaaaggctctgctgattttctgggtctgtcgcattacacctcccgcctcatcagcaacgccccacaaaacacctgcatccctagctatgataccattggaggcttctcccaacacgtgaaccatgtgtggccccagacctcatcctcttggattcgtgtggtgccctgggggataaggaggctgttgcagtttgtatccctggaatacacaagaggaaaagttccaatataccttgccgggaatggcatgcccataggggaaagtgaaaatctctttgatgattccttaagagtagactacttcaatcaatatatcaatgaggtgctcaaggctatcaaggaagactctgtggatgttcgttcctacattgctcgttccctcattgatggcttcgaaggcccttctggttacagccagcggtttggcctgcaccacgtcaacttcagcgacagcagcaagtcaaggactcccaggaaatctgcctactttttcactagcatcatagaaaagaacggtttcctcaccaagggggcaaaaagactgctaccacctaatacagtaaacctcccctccaaagtcagagccttcacttttccatctgaggtgccctccaaggctaaagtcgtttgggaaaagttctccagccaacccaagttcgaaagagatttgttctaccacgggacgtttcgggatgactttctgtggggcgtgtcctcttccgcttatcagattgaaggcgcgtgggatgccgatggcaaaggccccagcatctgggataactttacccacacaccagggagcaatgtgaaagacaatgccactggagacatcgcctgtgacagctatcaccagctggatgccgatctgaatatgctccgagctttgaaggtgaaggcctaccgcttctctatctcctggtctcggattttcccaactgggagaaacagctctatcaacagtcatggggttgattattacaacaggctgatcaatggcttggtggcaagcaacatctttcccatggtgacattgttccattgggacctgccccaggccctccaggatatcggaggctgggagaatcctgccttgattgacttgtttgacagctacgcagacttttgtttccagacctttggtgatagagtcaagttttggatgacttttaatgagcccatgtacctggcatggctaggttatggctcaggggaatttcccccaggggtgaaggacccaggctgggcaccatataggatagcccacgccgtcatcaaagcccatgccagagtctatcacacgtacgatgagaaatacaggcaggagcagaagggggtcatctcgctgagcctcagtacacactgggcagagcccaagtcaccaggggtccccagagatgtggaagccgctgaccgaatgctgcagttctccctgggctggtttgctcaccccatttttagaaacggagactatcctgacaccatgaagtggaaagtggggaacaggagtgaactgcagcacttagccacctcccgcctgccaagcttcactgaggaagagaagaggttcatcagggcgacggccgacgtcttctgcctcaacacgtactactccagaatcgtgcagcacaaaacacccaggctaaacccaccctcctacgaagacgaccaggagatggctgaggaggaggacccttcgtggccttccacggcaatgaacagagctgcgccctgggggacgcgaaggctgctgaactggatcaaggaagagtatggtgacatccccatttacatcaccgaaaacggagtggggctgaccaatccgaacacggaggatactgataggatattttaccacaaaacctacatcaatgaggctttgaaagcctacaggctcgatggtatagaccttcgagggtatgtcgcctggtctctgatggacaactttgagtggctaaatggctacacggtcaagtttggactgtaccatgttgatttcaacaacacgaacaggcctcgcacagcaagagcctccgccaggtactacacagaggtcattaccaacaacggcatgccactggccagggaggatgagtttctgtacggacggtttcctgagggcttcatctggagtgcagcttctgctgcatatcagattgaaggtgcgtggagagcagatggcaaaggactcagcatttgggacacgttttctcacacaccactgagggttgagaacgatgccattggagacgtggcctgtgacagttatcacaagattgctgaggatctggtcaccctgcagaacctgggcgtgtcccactaccgtttttccatctcctggtctcgcatcctccctgatggaaccaccaggtacatcaatgaagcgggcctgaactactacgtgaggctcatcgatacactgctggccgccagcatccagccccaggtgaccatttaccactgggacctaccacagacgctccaagatgtaggaggctgggagaatgagaccatcgtgcagcggtttaaggagtatgcagatgtgctcttccagaggctgggagacaaggtgaagttttggatcacgctgaatgagccctttgtcattgcttaccagggctatggctacggaacagcagctccagttcatgggaggctggtttgcacatcctattttcaagaatggagattacaatgaggtgatgaagacgcggatccgtgacaggagcttggctgcaggcctcaacaagtctcggctgccagaatttacagagagtgagaagaggaggatcaacggcacctatgacttttttgggttcaatcactacaccactgtcctcgcctacaacctcaactatgccactgccatctcttcttttgatgcagacaggtaagtccaccaacagggagcccggagccatctctggaaaaggcagaaaggtgcccttggctgtgctctctgaggcctgcccagcctcaaaacagggcctccaacgccgaatgtgccggggtttgcaagatgctcgccaccccacagatcccaaggaaatctccagcaagcaagagggagagaaggccggggtctccagggcacctcccattagggcacatgtgcttggctttttgtttttttatttcatttttaaaatttatttattttgcgttctttttcacaggctgcttaactctaaaaa

SEQ ID NO: 147285 - DNA, 3147 bp, Homo sapiens
  Payload ID: 9134
  Gene Symbol: LCTL
  Gene Name: lactase-like
  Uniprot ID: Q6UWM7
  ENST ID: ENST00000341509
  CDS Start-End: 133-1836
gatcaagcgccttcctttcccttcctctccccacttggcctttgccctaagccaagacctggccatcagcctggctgcaggggcctgcagagccagctgcactttttcaggtatgggggagggccaggcaccatgaagccagtgtgggtcgccacccttctgtggatgctactgctggtgcccaggctgggggccgcccggaaggggtccccagaagaggcctccttctactatggaaccttccctcttggcttctcctggggcgtgggcagttctgcctaccagacggagggcgcctgggaccaggacgggaaagggcctagcatctgggacgtcttcacacacagtgggaaggggaaagtgcttgggaatgagacggcagatgtagcctgtgacggctactacaaggtccaggaggacatcattctgctgagggaactgcacgtcaaccactaccgattctccctgtcttggccccggctcctgcccacaggcatccgagccgagcaggtgaacaagaagggaatcgaattctacagtgatcttatcgatgcccttctgagcagcaacatcactcccatcgtgaccttgcaccactgggatctgccacagctgctccaggtcaaatacggtgggtggcagaatgtgagcatggccaactacttcagagactacgccaacctgtgctttgaggcctttggggaccgtgtgaagcactggatcacgttcagtgatcctcgggcaatggcagaaaaaggctatgagacgggccaccatgcgccgggcctgaagctccgcggcaccggcctgtacaaggcagcacaccacatcattaaggcccacgccaaagcctggcattcttataacaccacgtggcgcagcaagcagcaaggtctggtgggaatttcattgaactgtgactggggggaacctgtggacattagtaaccccaaggacctagaggctgccgagagatacctacagttctgtctgggctggtttgccaaccccatttatgccggtgactacccccaagtcatgaaggactacattggaagaaagagtgcagagcaaggcctggagatgtcgaggttaccggtgttctcactccaggagaagagctacattaaaggcacatccgatttcttgggattaggtcattttactactcggtacatcacggaaaggaactacccctcccgccaggggcccagctaccagaacgatcgtgacttgatagagctggttgacccaaactggccagatctggggtctaaatggctatattctgtgccatggggatttaggaggctccttaactttgctcagactcaatacggtgatcctcccatatatgtgatggaaaatggagcatctcaaaaattccactgtactcaattatgtgatgagtggagaattcaataccttaaaggatacataaatgaaatgctaaaagctataaaagatggtgctaatataaaggggtatacttcctggtctctgttggataagtttgaatgggagaaaggatactcagatagatatggattctactatgttgaatttaacgacagaaataagcctcgctatccaaaggcttcagttcaatattacaagaagattatcattgccaatgggtttcccaatccaagagaggtggaaagttggtacctcaaagctttggaaacttgctctatcaacaatcagatgcttgctgcagagcccttgctaagtcacatgcaaatggttacggagatcgtggtacccactgtctgctccctctgtgtcctcatcactgctgttctactaatgctcctcctgaggaggcagagctgagacaggattatcaattttggagcttcataagagaatcttcaggatcttcctcccttttctgctttgagggtttccatacattgctgttttcaggttctacaataattacctttttttctctttctctttttggcttgtgctgggatttaagaattagaaaataaaaataagcagaaattaaaaaaaaaaacacttgtaatctcacccctcctaaagttaatgttaagattttgctgtatataatgaatgtatattatgaattatttacaaaaatggcatcatagtatacaaactgttgtgacttgattgtttatcactctaaaatctgtccagaaatattactttaatgttcaaatgattgccatctcagcactgtcccatacctgatagataaaatcaatctggctgggcacagtggctcacacctgtaatcccagcactttgggaggctgaggctggtgaatcacttgaggccagaagtttgagaccagcctggccaacatggttaaaccctgtctctactaaaaatatagaaactagctgggcatggtggcgggcacctgtaatcccatttacttgggaggctgaggcaggagaatcgcttgaacctgggaggtgaaggttgcagtgagctgagatcacaccactgcactccagcctgtgcaacagagaaagactccgtttcaaaagagaaaagaaaagaaatctatagataacaatccttccaggttgtaaatattattagccaaccacagaaaagcatgaagtgggtaccaagtaaatgagcacgtacactcttctgacactttagtctgaatttagtctgacaactctgactaaattcaacttactttagtcaatgaaatacctcaaagaaatattacatgtttattttttatttatcttctaggtaactcaatatcgtcttttttataataaagattcattttactcttaactatgttaaaatgctaaaattaattaatttccatttatttggggataaaacatggcttaagaacaatctcatgcatttttctcattatctgattttacttaatactgtttctgaaaccaaaaaagaataagacagtagaaaatgtctctactaaaaatacaaaaaattagccaagcgtggtggcaggcgcctgtagtcccagctacttgggaggctgaggcaggagaatggcattgaatctgggaggcggagcttgcagtgagccgagatagcgccactgcactccagcctgggtgacagagcgggactgtgtctcaaaaaaaaaaaaaaaaaaaaaaaaagaaaatgtcatt

SEQ ID NO: 147286 - DNA, 2552 bp, Homo sapiens
  Payload ID: 9134
  Gene Symbol: LCTL
  Gene Name: lactase-like
  Uniprot ID: Q6UWM7
  ENST ID: ENST00000537670
  CDS Start-End: 346-1530
gctgtggctcctctctcaggggacagcgtaggccctgggggtcagttggagagggctctgactaccagcgactgctctgggggtgtctgcgatcaaggacgatcctgggaggacatcattctgctgagggaactgcacgtcaaccactaccgattctccctgtcttggccccggctcctgcccacaggcatccgagccgagcaggtgaacaagaagggaatcgaattctacagtgatcttatcgatgcccttctgagcagcaacatcactcccatcgtgaccttgcaccactgggatctgccacagctgctccaggtcaaatacggtgggtggcagaatgtgagcatggccaactacttcagagactacgccaacctgtgctttgaggcctttggggaccgtgtgaagcactggatcacgttcagtgatcctcgggcaatggcagaaaaaggctatgagacgggccaccatgcgccgggcctgaagctccgcggcaccggcctgtacaaggcagcacaccacatcattaaggcccacgccaaagcctggcattcttataacaccacgtggcgcagcaagcagcaaggtctggtgggaatttcattgaactgtgactggggggaacctgtggacattagtaaccccaaggacctagaggctgccgagagatacctacagttctgtctgggctggtttgccaaccccatttatgccggtgactacccccaagtcatgaaggactacattggaagaaagagtgcagagcaaggcctggagatgtcgaggttaccggtgttctcactccaggagaagagctacattaaaggcacatccgatttcttgggattaggtcattttactactcggtacatcacggaaaggaactacccctcccgccaggggcccagctaccagaacgatcgtgacttgatagagctggttgacccaaactggccagatctggggtctaaatggctatattctgtgccatggggatttaggaggctccttaactttgctcagactcaatacggtgatcctcccatatatgtgatggaaaatggagcatctcaaaaattccactgtactcaattatgtgatgagtggagaattcaataccttaaaggatacataaatgaaatgctaaaagctataaaagatggtgctaatataaaggggtatacttcctggtctctgttggataagtttgaatgggagaaaggatactcagatagatatggattctactatgttgaatttaacgacagaaataagcctcgctatccaaaggcttcagttcaatattacaagaagattatcattgccaatgggtttcccaatccaagagaggtggaaagttggtacctcaaagctttggaaacttgctctatcaacaatcagatgcttgctgcagagcccttgctaagtcacatgcaaatggttacggagatcgtggtacccactgtctgctccctctgtgtcctcatcactgctgttctactaatgctcctcctgaggaggcagagctgagacaggattatcaattttggagcttcataagagaatcttcaggatcttcctcccttttctgctttgagggtttccatacattgctgttttcaggttctacaataattacctttttttctctttctctttttggcttgtgctgggatttaagaattagaaaataaaaataagcagaaattaaaaaaaaaaacacttgtaatctcacccctcctaaagttaatgttaagattttgctgtatataatgaatgtatattatgaattatttacaaaaatggcatcatagtatacaaactgttgtgacttgattgtttatcactctaaaatctgtccagaaatattactttaatgttcaaatgattgccatctcagcactgtcccatacctgatagataaaatcaatctggctgggcacagtggctcacacctgtaatcccagcactttgggaggctgaggctggtgaatcacttgaggccagaagtttgagaccagcctggccaacatggttaaaccctgtctctactaaaaatatagaaactagctgggcatggtggcgggcacctgtaatcccatttacttgggaggctgaggcaggagaatcgcttgaacctgggaggtgaaggttgcagtgagctgagatcacaccactgcactccagcctgtgcaacagagaaagactccgtttcaaaagagaaaagaaaagaaatctatagataacaatccttccaggttgtaaatattattagccaaccacagaaaagcatgaagtgggtaccaagtaaatgagcacgtacactcttctgacactttagtctgaatttagtctgacaactctgactaaattcaacttactttagtcaatgaaatacctcaaagaaatattacatgtttattttttatttatcttctaggtaactcaatatcgtcttttttataataaagattcattttactcttaactatgttaaaatgctaaaattaattaatttccatttatttggggataaaacatggcttaagaac

SEQ ID NO: 147287 - DNA, 1451 bp, Homo sapiens
  Payload ID: 9134
  Gene Symbol: LCTL
  Gene Name: lactase-like
  ENST ID: ENST00000565875
  CDS Start-End: 525-635
agagccttcggctgtgctgtggctcctctctcaggggacagcgtaggccctgggggtcagttggagagggctctgactaccagcgactgctctgggggtgtctgcgatcaaggacgatcctgggcttctcctggggcgtgggcagttctgcctaccagacggagggcgcctgggaccaggacgggaaagggcctagcatctgggacgtcttcacacacagtgggaaggggaaagtgcttgggaatgagacggcagatgtagcctgtgacggctactacaaggtccaggaggacatcattctgctgagggaactgcacgtcaaccactaccgattctccctgtcttggccccggctcctgcccacaggcatccgagccgagcaggtgaacaagaagggaatcgaattctacagtgatcttatcgatgcccttctgagcagcaacatcactcccatcgtgaccttgcaccactgggatctgccacagctgctccaggtcaaatacggtgggtggcagaatgtgagcatggccaactacttcagagactacgccaacctgtgctttgaggcctttggggaccgtgtgaagcactggatcacgttcagtgatcctcgggtctggtgggaatttcattgaactgtgactggggggaacctgtggacattagtaaccccaaggacctagaggctgccgagagatacctacagttctgtctgggctggtttgccaaccccatttatgccggtgactacccccaagtcatgaaggactacattggaagaaagagtgcagagcaaggcctggagatgtcgaggttaccggtgttctcactccaggagaagagctacattaaaggcacatccgatttcttgggattaggtcattttactactcggtacatcacggaaaggaactacccctcccgccaggggcccagctaccagaacgatcgtgacttgatagagctggttgacccaaactggccagatctggggtctaaatggctatattctgtgccatggggatttaggaggctccttaactttgctcagactcaatacggtgatcctcccatatatgtgatggaaaatggagcatctcaaaaattccactgtactcaattatgtgatgagtggagaattcaataccttaaaggatacataaatgaaatgctaaaagagcccttgctaagtcacatgcaaatggttacggagatcgtggtacccactgtctgctccctctgtgtcctcatcactgctgttctactaatgctcctcctgaggaggcagagctgagacaggattatcaattttggagcttcataagagaatcttcaggatcttcctcccttttctgctttgagggtttccatacattgctgttttcaggttctacaataattacctttttttctctttctctttttggcttgtgctgggatttaagaattag

SEQ ID NO: 147288 - DNA, 1887 bp, Homo sapiens
  Payload ID: 9135
  Gene Symbol: LDHA
  Gene Name: lactate dehydrogenase A
  Uniprot ID: P00338
  ENST ID: ENST00000227157
  CDS Start-End: 76-801
tccggatctcattgccacgcgcccccgacgaccgcccgacgtgcattcccgattccttttggttccaagtccaatatggcaactctaaaggatcagctgatttataatcttctaaaggaagaacagaccccccagaataagattacagttgttggggttggtgctgttggcatggcctgtgccatcagtatcttaatgaaggacttggcagatgaacttgctcttgttgatgtcatcgaagacaaattgaagggagagatgatggatctccaacatggcagccttttccttagaacaccaaagattgtctctggcaaagactataatgtaactgcaaactccaagctggtcattatcacggctggggcacgtcagcaagagggagaaagccgtcttaatttggtccagcgtaacgtgaacatctttaaattcatcattcctaatgttgtaaaatacagcccgaactgcaagttgcttattgtttcaaatccagtggatatcttgacctacgtggcttggaagataagtggttttcccaaaaaccgtgttattggaagcggttgcaatctggattcagcccgattccgttacctaatgggggaaaggctgggagttcacccattaagctgtcatgggtgggtccttggggaacatggagattccagtgtgcctgtatggagtggaatgaatgttgctggtgtctctctgaagactctgcacccagatttagggactgataaagataaggaacagtggaaagaggttcacaagcaggtggttgagagggtctttacggaataaaggatgatgtcttccttagtgttccttgcattttgggacagaatggaatctcagaccttgtgaaggtgactctgacttctgaggaagaggcccgtttgaagaagagtgcagatacactttgggggatccaaaaggagctgcaattttaaagtcttctgatgtcatatcatttcactgtctaggctacaacaggattctaggtggaggttgtgcatgttgtcctttttatctgatctgtgattaaagcagtaatattttaagatggactgggaaaaacatcaactcctgaagttagaaataagaatggtttgtaaaatccacagctatatcctgatgctggatggtattaatcttgtgtagtcttcaactggttagtgtgaaatagttctgccacctctgacgcaccactgccaatgctgtacgtactgcatttgccccttgagccaggtggatgtttaccgtgtgttatataacttcctggctccttcactgaacatgcctagtccaacattttttcccagtgagtcacatcctgggatccagtgtataaatccaatatcatgtcttgtgcataattcttccaaaggatcttattttgtgaactatatcagtagtgtacattaccatataatgtaaaaagatctacatacaaacaatgcaaccaactatccaagtgttataccaactaaaacccccaataaaccttgaacagtgactactttggttaattcattatattaagatataaagtcataaagctgctagttattatattaatttggaaatattaggctattcttgggcaaccctgcaacgattttttctaacagggatattattgactaatagcagaggatgtaatagtcaactgagttgtattggtaccacttccattgtaagtcccaaagtattatatatttgataataatgctaatcataattggaaagtaacattctatatgtaaatgtaaaatttatttgccaactgaatataggcaatgatagtgtgtcactatagggaacacagatttttgagatcttgtcctctggaagctggtaacaattaaaaacaatcttaaggcaggg

SEQ ID NO: 147289 - DNA, 1922 bp, Homo sapiens
  Payload ID: 9135
  Gene Symbol: LDHA
  Gene Name: lactate dehydrogenase A
  Uniprot ID: P00338
  ENST ID: ENST00000379412
  CDS Start-End: 358-1356
taaaagccgggcgttcggaggacccagcaattagtctgatttccgcccacctttccgagcgggaaggagagccacaaagcgcgcatgcgcgcggatcaccgcaggctcctgtgccttgggcttgagctttgtggcagttaatggcttttctgcacgtatctctggtgtttacttgagaagcctggctgtgtccttgctgtaggagccggagtagctcagagtgatcttgtctgaggaaaggccagccccacttggggttaataaaccgcgatgggtgaaccctcaggaggctatacttacacccaaacgtcgatattccttttccacgctaagattccttttggttccaagtccaatatggcaactctaaaggatcagctgatttataatcttctaaaggaagaacagaccccccagaataagattacagttgttggggttggtgctgttggcatggcctgtgccatcagtatcttaatgaaggacttggcagatgaacttgctcttgttgatgtcatcgaagacaaattgaagggagagatgatggatctccaacatggcagccttttccttagaacaccaaagattgtctctggcaaagactataatgtaactgcaaactccaagctggtcattatcacggctggggcacgtcagcaagagggagaaagccgtcttaatttggtccagcgtaacgtgaacatctttaaattcatcattcctaatgttgtaaaatacagcccgaactgcaagttgcttattgtttcaaatccagtggatatcttgacctacgtggcttggaagataagtggttttcccaaaaaccgtgttattggaagcggttgcaatctggattcagcccgattccgttacctaatgggggaaaggctgggagttcacccattaagctgtcatgggtgggtccttggggaacatggagattccagtgtgcctgtatggagtggaatgaatgttgctggtgtctctctgaagactctgcacccagatttagggactgataaagataaggaacagtggaaagaggttcacaagcaggtggttgagagtgcttatgaggtgatcaaactcaaaggctacacatcctgggctattggactctctgtagcagatttggcagagagtataatgaagaatcttaggcgggtgcacccagtttccaccatgattaagggtctttacggaataaaggatgatgtcttccttagtgttccttgcattttgggacagaatggaatctcagaccttgtgaaggtgactctgacttctgaggaagaggcccgtttgaagaagagtgcagatacactttgggggatccaaaaggagctgcaattttaaagtcttctgatgtcatatcatttcactgtctaggctacaacaggattctaggtggaggttgtgcatgttgtcctttttatctgatctgtgattaaagcagtaatattttaagatggactgggaaaaacatcaactcctgaagttagaaataagaatggtttgtaaaatccacagctatatcctgatgctggatggtattaatcttgtgtagtcttcaactggttagtgtgaaatagttctgccacctctgacgcaccactgccaatgctgtacgtactgcatttgccccttgagccaggtggatgtttaccgtgtgttatataacttcctggctccttcactgaacatgcctagtccaacattttttcccagtgagtcacatcctgggatccagtgtataaatccaatatcatgtcttgtgcataattcttccaaaggatcttattttgtgaactatatcagtagtgtacattaccatataatgtaaaaagatctacatacaaacaatgcaaccaactatccaagtgttataccaactaaaacccccaataaaccttgaacagtga

SEQ ID NO: 147290 - DNA, 1766 bp, Homo sapiens
  Payload ID: 9135
  Gene Symbol: LDHA
  Gene Name: lactate dehydrogenase A
  Uniprot ID: P00338
  ENST ID: ENST00000396222
  CDS Start-End: 100-924
agtgctgcagccgctgccgccgattccggatctcattgccacgcgcccccgacgaccgcccgacgtgcattcccgattccttttggttccaagtccaatatggcaactctaaaggatcagctgatttataatcttctaaaggaagaacagaccccccagaataagattacagttgttggggttggtgctgttggcatggcctgtgccatcagtatcttaatgaaggacttggcagatgaacttgctcttgttgatgtcatcgaagacaaattgaagggagagatgatggatctccaacatggcagccttttccttagaacaccaaagattgtctctggcaaagactataatgtaactgcaaactccaagctggtcattatcacggctggggcacgtcagcaagagggagaaagccgtcttaatttggtccagcgtaacgtgaacatctttaaattcatcattcctaatgttgtaaaatacagcccgaactgcaagttgcttattgtttcaaatccagtggatatcttgacctacgtggcttggaagataagtggttttcccaaaaaccgtgttattggaagcggttgcaatctggattcagcccgattccgttacctaatgggggaaaggctgggagttcacccattaagctgtcatgggtgggtccttggggaacatggagattccagtgtgcctgtatggagtggaatgaatgttgctggtgtctctctgaagactctgcacccagatttagggactgataaagataaggaacagtggaaagagtgcagatacactttgggggatccaaaaggagctgcaattttaaagtcttctgatgtcatatcatttcactgtctaggctacaacaggattctaggtggaggttgtgcatgttgtcctttttatctgatctgtgattaaagcagtaatattttaagatggactgggaaaaacatcaactcctgaagttagaaataagaatggtttgtaaaatccacagctatatcctgatgctggatggtattaatcttgtgtagtcttcaactggttagtgtgaaatagttctgccacctctgacgcaccactgccaatgctgtacgtactgcatttgccccttgagccaggtggatgtttaccgtgtgttatataacttcctggctccttcactgaacatgcctagtccaacattttttcccagtgagtcacatcctgggatccagtgtataaatccaatatcatgtcttgtgcataattcttccaaaggatcttattttgtgaactatatcagtagtgtacattaccatataatgtaaaaagatctacatacaaacaatgcaaccaactatccaagtgttataccaactaaaacccccaataaaccttgaacagtgactactttggttaattcattatattaagatataaagtcataaagctgctagttattatattaatttggaaatattaggctattcttgggcaaccctgcaacgattttttctaacagggatattattgactaatagcagaggatgtaatagtcaactgagttgtattggtaccacttccattgtaagtcccaaagtattatatatttgataataatgctaatcataattggaaagtaacattctatatgtaaatgtaaaatttatttgccaactgaatataggcaatgatagtgtgtcactatagggaacacagatttttgagatcttgtcctctggaagctggtaacaattaaaaacaatcttaaggcaggg

SEQ ID NO: 147291 - DNA, 2416 bp, Homo sapiens
  Payload ID: 9135
  Gene Symbol: LDHA
  Gene Name: lactate dehydrogenase A
  Uniprot ID: P00338
  ENST ID: ENST00000422447
  CDS Start-End: 274-1272
agtctgccggtcggttgtctggctgcgcgcgccacccgggcctctccagtgccccgcctggctcggcatccacccccagcccgactcacacgtgggttcccgcacgtccgccggccccccccgctgacgtcagcatagctgttccacttaaggcccctcccgcgcccagctcagagtgctgcagccgctgccgccgattccggatctcattgccacgcgcccccgacgaccgcccgacgtgcattcccgattccttttggttccaagtccaatatggcaactctaaaggatcagctgatttataatcttctaaaggaagaacagaccccccagaataagattacagttgttggggttggtgctgttggcatggcctgtgccatcagtatcttaatgaaggacttggcagatgaacttgctcttgttgatgtcatcgaagacaaattgaagggagagatgatggatctccaacatggcagccttttccttagaacaccaaagattgtctctggcaaagactataatgtaactgcaaactccaagctggtcattatcacggctggggcacgtcagcaagagggagaaagccgtcttaatttggtccagcgtaacgtgaacatctttaaattcatcattcctaatgttgtaaaatacagcccgaactgcaagttgcttattgtttcaaatccagtggatatcttgacctacgtggcttggaagataagtggttttcccaaaaaccgtgttattggaagcggttgcaatctggattcagcccgattccgttacctaatgggggaaaggctgggagttcacccattaagctgtcatgggtgggtccttggggaacatggagattccagtgtgcctgtatggagtggaatgaatgttgctggtgtctctctgaagactctgcacccagatttagggactgataaagataaggaacagtggaaagaggttcacaagcaggtggttgagagtgcttatgaggtgatcaaactcaaaggctacacatcctgggctattggactctctgtagcagatttggcagagagtataatgaagaatcttaggcgggtgcacccagtttccaccatgattaagggtctttacggaataaaggatgatgtcttccttagtgttccttgcattttgggacagaatggaatctcagaccttgtgaaggtgactctgacttctgaggaagaggcccgtttgaagaagagtgcagatacactttgggggatccaaaaggagctgcaattttaaagtcttctgatgtcatatcatttcactgtctaggctacaacaggattctaggtggaggttgtgcatgttgtcctttttatctgatctgtgattaaagcagtaatattttaagatggactgggaaaaacatcaactcctgaagttagaaataagaatggtttgtaaaatccacagctatatcctgatgctggatggtattaatcttgtgtagtcttcaactggttagtgtgaaatagttctgccacctctgacgcaccactgccaatgctgtacgtactgcatttgccccttgagccaggtggatgtttaccgtgtgttatataacttcctggctccttcactgaacatgcctagtccaacattttttcccagtgagtcacatcctgggatccagtgtataaatccaatatcatgtcttgtgcataattcttccaaaggatcttattttgtgaactatatcagtagtgtacattaccatataatgtaaaaagatctacatacaaacaatgcaaccaactatccaagtgttataccaactaaaacccccaataaaccttgaacagtgactactttggttaattcattatattaagatataaagtcataaagctgctagttattatattaatttggaaatattaggctattcttgggcaaccctgcaacgattttttctaacagggatattattgactaatagcagaggatgtaatagtcaactgagttgtattggtaccacttccattgtaagtcccaaagtattatatatttgataataatgctaatcataattggaaagtaacattctatatgtaaatgtaaaatttatttgccaactgaatataggcaatgatagtgtgtcactatagggaacacagatttttgagatcttgtcctctggaagctggtaacaattaaaaacaatcttaaggcagggtgcagtggctcatgcctataatcccagcactttgggaagcccaggtgggctgatcactggaggccaggaattggggaccagcctggccaacacaacaaaaccccatctgttaaaaaaacaaaacaaaaccaaaaaaaacaagtaaccttggtggatgtctactcaagttttctgcacatttttctgaaaatacaactgtgaccctta

SEQ ID NO: 147292 - DNA, 1310 bp, Homo sapiens
  Payload ID: 9135
  Gene Symbol: LDHA
  Gene Name: lactate dehydrogenase A
  Uniprot ID: P00338
  ENST ID: ENST00000430553
  CDS Start-End: 100-924
agtgctgcagccgctgccgccgattccggatctcattgccacgcgcccccgacgaccgcccgacgtgcattcccgattccttttggttccaagtccaatatggcaactctaaaggatcagctgatttataatcttctaaaggaagaacagaccccccagaataagattacagttgttggggttggtgctgttggcatggcctgtgccatcagtatcttaatgaaggacttggcagatgaacttgctcttgttgatgtcatcgaagacaaattgaagggagagatgatggatctccaacatggcagccttttccttagaacaccaaagattgtctctggcaaagtggatatcttgacctacgtggcttggaagataagtggttttcccaaaaaccgtgttattggaagcggttgcaatctggattcagcccgattccgttacctaatgggggaaaggctgggagttcacccattaagctgtcatgggtgggtccttggggaacatggagattccagtgtgcctgtatggagtggaatgaatgttgctggtgtctctctgaagactctgcacccagatttagggactgataaagataaggaacagtggaaagaggttcacaagcaggtggttgagagtgcttatgaggtgatcaaactcaaaggctacacatcctgggctattggactctctgtagcagatttggcagagagtataatgaagaatcttaggcgggtgcacccagtttccaccatgattaagggtctttacggaataaaggatgatgtcttccttagtgttccttgcattttgggacagaatggaatctcagaccttgtgaaggtgactctgacttctgaggaagaggcccgtttgaagaagagtgcagatacactttgggggatccaaaaggagctgcaattttaaagtcttctgatgtcatatcatttcactgtctaggctacaacaggattctaggtggaggttgtgcatgttgtcctttttatctgatctgtgattaaagcagtaatattttaagatggactgggaaaaacatcaactcctgaagttagaaataagaatggtttgtaaaatccacagctatatcctgatgctggatggtattaatcttgtgtagtcttcaactggttagtgtgaaatagttctgccacctctgacgcaccactgccaatgctgtacgtactgcatttgccccttgagccaggtggatgtttaccgtgtgttatataacttcctggctccttcactgaacatgcctagtccaacattttttcccagtgagtcacatcctg

SEQ ID NO: 147293 - DNA, 576 bp, Homo sapiens
  Payload ID: 9135
  Gene Symbol: LDHA
  Gene Name: lactate dehydrogenase A
  ENST ID: ENST00000543445
  CDS Start-End: 107-576
agagtgctgcagccgctgccgccgattccggatctcattgccacgcgcccccgacgaccgcccgacgtgcattcccggtacgattccttttggttccaagtccaatatggcaactctaaaggatcagctgatttataatcttctaaaggaagaacagaccccccagaataagattacagttgttggggttggtgctgttggcatggcctgtgccatcagtatcttaatgaaggacttggcagatgaacttgctcttgttgatgtcatcgaagacaaattgaagggagagatgatggatctccaacatggcagccttttccttagaacaccaaagattgtctctggcaaagactataatgtaactgcaaactccaagctggtcattatcacggctggggcacgtcagcaagagggagaaagccgtcttaatttggtccagcgtaacgtgaacatctttaaattcatcattcctaatgttgtaaaatacagcccgaactgcaagttgcttattgtttcaaatccagtggatatcttgacctacgtggcttggaagataagtggttttcccaaaaaccg

SEQ ID NO: 147294 - DNA, 554 bp, Homo sapiens
  Payload ID: 9135
  Gene Symbol: LDHA
  Gene Name: lactate dehydrogenase A
  ENST ID: ENST00000543695
  CDS Start-End: 99-239
gtgctgcagccgctgccgccgattccggatctcattgccacgcgcccccgacgaccgcccgacgtgcattcccgattccttttggttccaagtccaatatggcaactctaaaggatcagctgatttataatcttctaaaggaagaacagaccccccagaataagattacagttgttggggttggtgctgttggcatggcctgtgccatcaccgtcttaatttggtccagcgtaacgtgaacatctttaaattcatcattcctaatgttgtaaaatacagcccgaactgcaagttgcttattgtttcaaatccagtggatatcttgacctacgtggcttggaagataagtggttttcccaaaaaccgtgttattggaagcggttgcaatctggattcagcccgattccgttacctaatgggggaaaggctgggagttcacccattaagctgtcatgggtgggtccttggggaacatggagattccagtgtgcctgtatggagtggaatgaatgttgctggtgtctctctgaagactctgcacccagatttaggga

SEQ ID NO: 147295 - DNA, 516 bp, Homo sapiens
  Payload ID: 9135
  Gene Symbol: LDHA
  Gene Name: lactate dehydrogenase A
  ENST ID: ENST00000536528
  CDS Start-End: 99-236
gtgctgcagccgctgccgccgattccggatctcattgccacgcgcccccgacgaccgcccgacgtgcattcccgattccttttggttccaagtccaatatggcaactctaaaggatcagctgatttataatcttctaaaggaagaacagaccccccagaataagattacagttgttggggttggtgctgttggcatggcctgtgccatcagtatcttaatgaagtggatatcttgacctacgtggcttggaagataagtggttttcccaaaaaccgtgttattggaagcggttgcaatctggattcagcccgattccgttacctaatgggggaaaggctgggagttcacccattaagctgtcatgggtgggtccttggggaacatggagattccagtgtgcctgtatggagtggaatgaatgttgctggtgtctctctgaagactctgcacccagatttagggactgataaagataaggaacagtggaaagaggttcacaagcaggtggttgagag

SEQ ID NO: 147296 - DNA, 732 bp, Homo sapiens
  Payload ID: 9135
  Gene Symbol: LDHA
  Gene Name: lactate dehydrogenase A
  ENST ID: ENST00000478970
  CDS Start-End: 300-732
gacgaccgcccgacgtgcattcccggtacggtagggccctgcgcgcacggcgccagagggatgggcgggtagagccaactgcctctggttctgctggcctccgctgctcgcgaagggattcctgctcccgggaggtgtaggagccgctttccagaagcacagcccagagacgtctgggcggcggcccacacaacgcatgtgttcggagctcgccgcgctctgcttttgctctaagcgggaaccatggcttctggccacgctggggaaccgaggagattccttttggttccaagtccaatatggcaactctaaaggatcagctgatttataatcttctaaaggaagaacagaccccccagaataagattacagttgttggggttggtgctgttggcatggcctgtgccatcagtatcttaatgaaggacttggcagatgaacttgctcttgttgatgtcatcgaagacaaattgaagggagagatgatggatctccaacatggcagccttttccttagaacaccaaagattgtctctggcaaagactataatgtaactgcaaactccaagctggtcattatcacggctggggcacgtcagcaagagggagaaagccgtcttaatttggtccagcgtaacgtgaacatctttaaattcatcattcctaatgttgtaaaatacagcccgaactgcaagttgcttattgtttcaaatccaggtgaggcttttgact

SEQ ID NO: 147297 - DNA, 664 bp, Homo sapiens
  Payload ID: 9135
  Gene Symbol: LDHA
  Gene Name: lactate dehydrogenase A
  ENST ID: ENST00000486690
  CDS Start-End: 26-163
gattccttttggttccaagtccaatatggcaactctaaaggatcagctgatttataatcttctaaaggaagaacagaccccccagaataagattacagttgttggggttggtgctgttggcatggcctgtgccatcagtatcttaatgaagactataatgtaactgcaaactccaagctggtcattatcacggctggggcacgtcagcaagagggagaaagccgtcttaatttggtccagcgtaacgtgaacatctttaaattcatcattcctaatgttgtaaaatacagcccgaactgcaagttgcttattgtttcaaatccagtggatatcttgacctacgtggcttggaagataagtggttttcccaaaaaccgtgttattggaagcggttgcaatctggattcagcccgattccgttacctaatgggggaaaggctgggagttcacccattaagctgtcatgggtgggtccttggggaacatggagattccagtgtgcctgtatggagtggaatgaatgttgctggtgtctctctgaagactctgcacccagatttagggactgataaagataaggaacagtggaaagaggttcacaagcaggtggttgagagtgcttatgaggtgatcaaactcaaaggctacacatcctgggctattg

SEQ ID NO: 147298 - DNA, 1340 bp, Homo sapiens
  Payload ID: 9135
  Gene Symbol: LDHA
  Gene Name: lactate dehydrogenase A
  ENST ID: ENST00000545215
  CDS Start-End: 99-236
gtgctgcagccgctgccgccgattccggatctcattgccacgcgcccccgacgaccgcccgacgtgcattcccgattccttttggttccaagtccaatatggcaactctaaaggatcagctgatttataatcttctaaaggaagaacagaccccccagaataagattacagttgttggggttggtgctgttggcatggcctgtgccatcagtatcttaatgaagactataatgtaactgcaaactccaagctggtcattatcacggctggggcacgtcagcaagagggagaaagccgtcttaatttggtccagcgtaacgtgaacatctttaaattcatcattcctaatgttgtaaaatacagcccgaactgcaagttgcttattgtttcaaatccagtggatatcttgacctacgtggcttggaagataagtggttttcccaaaaaccgtgttattggaagcggttgcaatctggattcagcccgattccgttacctaatgggggaaaggctgggagttcacccattaagctgtcatgggtgggtccttggggaacatggagattccagtgtgcctgtatggagtggaatgaatgttgctggtgtctctctgaagactctgcacccagatttagggactgataaagataaggaacagtggaaagaggttcacaagcaggtggttgagagtgcttatgaggtgatcaaactcaaaggctacacatcctgggctattggactctctgtagcagatttggcagagagtataatgaagaatcttaggcgggtgcacccagtttccaccatgattaagggtctttacggaataaaggatgatgtcttccttagtgttccttgcattttgggacagaatggaatctcagaccttgtgaaggtgactctgacttctgaggaagaggcccgtttgaagaagagtgcagatacactttgggggatccaaaaggagctgcaattttaaagtcttctgatgtcatatcatttcactgtctaggctacaacaggattctaggtggaggttgtgcatgttgtcctttttatctgatctgtgattaaagcagtaatattttaagatggactgggaaaaacatcaactcctgaagttagaaataagaatggtttgtaaaatccacagctatatcctgatgctggatggtattaatcttgtgtagtcttcaactggttagtgtgaaatagttctgccacctctgacgcaccactgccaatgctgtacgtactgcatttgccccttgagccaggtggatgtttaccgtgtgttatataacttcctggctccttcactgaacatgcctagtccaaca

SEQ ID NO: 147299 - DNA, 556 bp, Homo sapiens
  Payload ID: 9135
  Gene Symbol: LDHA
  Gene Name: lactate dehydrogenase A
  ENST ID: ENST00000539814
  CDS Start-End: 99-383
gtgctgcagccgctgccgccgattccggatctcattgccacgcgcccccgacgaccgcccgacgtgcattcccgattccttttggttccaagtccaatatggcaactctaaaggatcagctgatttataatcttctaaaggaagaacagaccccccagaataagattacagttgttggggttggtgctgttggcatggcctgtgccatcagtatcttaatgaaggacttggcagatgaacttgctcttgttgatgtcatcgaagacaaattgaagggagagatgatggatctccaacatggcagccttttccttagaacaccaaagattgtctctggcaaagctctccctaattgtagttacataaagttacaacttgactaaaactacaaggaagatgttgacatgctcttcctccatttaagaagccataatgataaaactctaagaacaagaaagactataatgtaactgcaaactccaagctggtcattatcacggctggggcacgtcagcaagagggagaaagccgtcttaatttggtccagcgtaacgtg

SEQ ID NO: 147300 - DNA, 582 bp, Homo sapiens
  Payload ID: 9135
  Gene Symbol: LDHA
  Gene Name: lactate dehydrogenase A
  ENST ID: ENST00000541097
  CDS Start-End: 99-368
gtgctgcagccgctgccgccgattccggatctcattgccacgcgcccccgacgaccgcccgacgtgcattcccgattccttttggttccaagtccaatatggcaactctaaaggatcagctgatttataatcttctaaaggaagaacagaccccccagaataagattacagttgttggggttggtgctgttggcatggcctgtgccatcagtatcttaatgaaggacttggcagatgaacttgctcttgttgatgtcatcgaagacaaattgaagggagagatgatggatctccaacatggcagccttttccttagaacaccaaagattgtctctggcaaagactctgcacccagatttagggactgataaagataaggaacagtggaaagaggttcacaagcaggtggttgagagtgcttatgaggtgatcaaactcaaaggctacacatcctgggctattggactctctgtagcagatttggcagagagtataatgaagaatcttaggcgggtgcacccagtttccaccatgattaagggtctttacggaataaaggatgatgtcttccttagtgttcct

SEQ ID NO: 147301 - DNA, 570 bp, Homo sapiens
  Payload ID: 9135
  Gene Symbol: LDHA
  Gene Name: lactate dehydrogenase A
  ENST ID: ENST00000545467
  CDS Start-End: 100-228
agtgctgcagccgctgccgccgattccggatctcattgccacgcgcccccgacgaccgcccgacgtgcattcccgattccttttggttccaagtccaatatggcaactctaaaggatcagctgatttataatcttctaaaggaagaacagaccccccagaataagattacagttgttggggttggtgctgttggcatggcctgtgccatcagtatcttaatgaagtagagacggggtttcaccatgttagccaggatggtctcgatctcctgacctcgtgatccgcctaccttggcctcccaaagtgctgggattacaagcgtgagccaccgtgcctggcctggccaggctgtcttgaactcctgacctcaagtgatgtgcccgcctcggcctcccaaagtgttgggattacagatgacttggcagatgaacttgctcttgttgatgtcatcgaagacaaattgaagggagagatgatggatctccaacatggcagccttttccttagaacaccaaagattgtctctggcaaagactataatgtaactgcaaactccaagctggtcatta

SEQ ID NO: 147302 - DNA, 465 bp, Homo sapiens
  Payload ID: 9135
  Gene Symbol: LDHA
  Gene Name: lactate dehydrogenase A
  ENST ID: ENST00000535451
  CDS Start-End: 249-465
gtgctgcagccgctgccgccgattccggatctcattgccacgcgcccccgacgaccgcccgacgtgcattcccggtgggctccgtgagggcagctgctgcctgcagattatagggagccctttgcgcatttattaagaagctactggtgtatctcgggctgcgctaggcacggcgcatgcaaagatgaagcaggcagcatcccagcccttccgcacctcagacgattccttttggttccaagtccaatatggcaactctaaaggatcagctgatttataatcttctaaaggaagaacagaccccccagaataagattacagttgttggggttggtgctgttggcatggcctgtgccatcagtatcttaatgaaggacttggcagatgaacttgctcttgttgatgtcatcgaagacaaattgaagggagagatgatggatctccaacatggcagccttttcctta

SEQ ID NO: 147303 - DNA, 2305 bp, Homo sapiens
  Payload ID: 9135
  Gene Symbol: LDHA
  Gene Name: lactate dehydrogenase A
  Uniprot ID: P00338
  ENST ID: ENST00000540430
  CDS Start-End: 283-1368
ttgggcggggcgtaaaagccgggcgttcggaggacccagcaattagtctgatttccgcccacctttccgagcgggaaggagagccacaaagcgcgcatgcgcgcggatcaccgcaggctcctgtgccttgggcttgagctttgtggcagttaatggcttttctgcacgtatctctggtgtttacttgagaagcctggctgtgtccttgctgtaggagccggagtagctcagagtgatcttgtctgaggaaaggccagccccacttggggttaataaaccgcgatgggtgaaccctcaggaggctatacttacacccaaacgtcgatattccttttccacgctaagattccttttggttccaagtccaatatggcaactctaaaggatcagctgatttataatcttctaaaggaagaacagaccccccagaataagattacagttgttggggttggtgctgttggcatggcctgtgccatcagtatcttaatgaaggacttggcagatgaacttgctcttgttgatgtcatcgaagacaaattgaagggagagatgatggatctccaacatggcagccttttccttagaacaccaaagattgtctctggcaaagactataatgtaactgcaaactccaagctggtcattatcacggctggggcacgtcagcaagagggagaaagccgtcttaatttggtccagcgtaacgtgaacatctttaaattcatcattcctaatgttgtaaaatacagcccgaactgcaagttgcttattgtttcaaatccagtggatatcttgacctacgtggcttggaagataagtggttttcccaaaaaccgtgttattggaagcggttgcaatctggattcagcccgattccgttacctaatgggggaaaggctgggagttcacccattaagctgtcatgggtgggtccttggggaacatggagattccagtgtgcctgtatggagtggaatgaatgttgctggtgtctctctgaagactctgcacccagatttagggactgataaagataaggaacagtggaaagaggttcacaagcaggtggttgagagtgcttatgaggtgatcaaactcaaaggctacacatcctgggctattggactctctgtagcagatttggcagagagtataatgaagaatcttaggcgggtgcacccagtttccaccatgattaagggtctttacggaataaaggatgatgtcttccttagtgttccttgcattttgggacagaatggaatctcagaccttgtgaaggtgactctgacttctgaggaagaggcccgtttgaagaagagtgcagatacactttgggggatccaaaaggagctgcaattttaaagtcttctgatgtcatatcatttcactgtctaggctacaacaggattctaggtggaggttgtgcatgttgtcctttttatctgatctgtgattaaagcagtaatattttaagatggactgggaaaaacatcaactcctgaagttagaaataagaatggtttgtaaaatccacagctatatcctgatgctggatggtattaatcttgtgtagtcttcaactggttagtgtgaaatagttctgccacctctgacgcaccactgccaatgctgtacgtactgcatttgccccttgagccaggtggatgtttaccgtgtgttatataacttcctggctccttcactgaacatgcctagtccaacattttttcccagtgagtcacatcctgggatccagtgtataaatccaatatcatgtcttgtgcataattcttccaaaggatcttattttgtgaactatatcagtagtgtacattaccatataatgtaaaaagatctacatacaaacaatgcaaccaactatccaagtgttataccaactaaaacccccaataaaccttgaacagtgactactttggttaattcattatattaagatataaagtcataaagctgctagttattatattaatttggaaatattaggctattcttgggcaaccctgcaacgattttttctaacagggatattattgactaatagcagaggatgtaatagtcaactgagttgtattggtaccacttccattgtaagtcccaaagtattatatatttgataataatgctaatcataattggaaagtaacattctatatgtaaatgtaaaatttatttgccaactgaatataggcaatgatagtgtgtcactatagggaacacagatttttgagatcttgtcctctggaagctggtaacaattaaaaacaatcttaaggcaggg

SEQ ID NO: 147304 - DNA, 1288 bp, Homo sapiens
  Payload ID: 9135
  Gene Symbol: LDHA
  Gene Name: lactate dehydrogenase A
  Uniprot ID: P00338
  ENST ID: ENST00000542179
  CDS Start-End: 290-1288
gaaccctcaggaggctatacttacacccaaacgtcgatattccttttccacgctaaggtatgggccttcactcttcacagaccctgtcattaggcctttcaactctcttttggcaaccattaggttttttcccctccctttttagtcatctctagtgatttatagtggcaaatacccccaaaggaagtaaaatagcttaaaaaaatctcttggttaataaacattaaagaagctgtagtgacactaaatgtttttcctcctatagattccttttggttccaagtccaatatggcaactctaaaggatcagctgatttataatcttctaaaggaagaacagaccccccagaataagattacagttgttggggttggtgctgttggcatggcctgtgccatcagtatcttaatgaaggacttggcagatgaacttgctcttgttgatgtcatcgaagacaaattgaagggagagatgatggatctccaacatggcagccttttccttagaacaccaaagattgtctctggcaaagactataatgtaactgcaaactccaagctggtcattatcacggctggggcacgtcagcaagagggagaaagccgtcttaatttggtccagcgtaacgtgaacatctttaaattcatcattcctaatgttgtaaaatacagcccgaactgcaagttgcttattgtttcaaatccagtggatatcttgacctacgtggcttggaagataagtggttttcccaaaaaccgtgttattggaagcggttgcaatctggattcagcccgattccgttacctaatgggggaaaggctgggagttcacccattaagctgtcatgggtgggtccttggggaacatggagattccagtgtgcctgtatggagtggaatgaatgttgctggtgtctctctgaagactctgcacccagatttagggactgataaagataaggaacagtggaaagaggttcacaagcaggtggttgagagtgcttatgaggtgatcaaactcaaaggctacacatcctgggctattggactctctgtagcagatttggcagagagtataatgaagaatcttaggcgggtgcacccagtttccaccatgattaagggtctttacggaataaaggatgatgtcttccttagtgttccttgcattttgggacagaatggaatctcagaccttgtgaaggtgactctgacttctgaggaagaggcccgtttgaagaagagtgcagatacactttgggggatccaaaaggagctgcaattttaa

SEQ ID NO: 147305 - DNA, 682 bp, Homo sapiens
  Payload ID: 9135
  Gene Symbol: LDHA
  Gene Name: lactate dehydrogenase A
  ENST ID: ENST00000495052
  CDS Start-End: 339-682
gctggcctccgctgctcgcgaagggattcctgctcccgggaggtgtaggagccgctttccagaagcacagcccagagacgtctgggcggcggcccacacaacgcatgtgttcggagctcgccgcgctctgcttttgctctaagcgggaaccatggcttctggccacgctggggaaccgaggaggagccggagtagctcagagtgatcttgtctgaggaaaggccagccccacttggggttaataaaccgcgatgggtgaaccctcaggaggctatacttacacccaaacgtcgatattccttttccacgctaagattccttttggttccaagtccaatatggcaactctaaaggatcagctgatttataatcttctaaaggaagaacagaccccccagaataagattacagttgttggggttggtgctgttggcatggcctgtgccatcagtatcttaatgaaggacttggcagatgaacttgctcttgttgatgtcatcgaagacaaattgaagggagagatgatggatctccaacatggcagccttttccttagaacaccaaagattgtctctggcaaagactataatgtaactgcaaactccaagctggtcattatcacggctggggcacgtcagcaagagggagaaagccgtcttaatttggtccagcgtaacgtgaa

SEQ ID NO: 147306 - DNA, 141 bp, Homo sapiens
  Payload ID: 9135
  Gene Symbol: LDHA
  Gene Name: lactate dehydrogenase A
  ENST ID: ENST00000625635
  CDS Start-End: 1-141
atggcaactctaaaggatcagctgatttataatcttctaaaggaagaacagaccccccagaataagattacagttgttggggttggtgctgttggcatggcctgtgccatcaccgtcttaatttggtccagcgtaacgtga

SEQ ID NO: 147307 - DNA, 2526 bp, Homo sapiens
  Payload ID: 9136
  Gene Symbol: LDHAL6A
  Gene Name: lactate dehydrogenase A-like 6A
  Uniprot ID: Q6ZMR3
  ENST ID: ENST00000280706
  CDS Start-End: 798-1796
acacctgccaagcatcacacctgccaagcatcacacctgccaagcatcacacctgcgatgcctgcacgagctgggtgcggtccgcgcagctgcagtaagggggcgacccggcgtctgttagtcggcggttcatctccttcgtgcctcgatgagctttaacgccattttcctccattctctttcttcacctcttgagtgagtggccatgagctgggctgcaagagtcctggggagcagccagagagcgggcgccgcgggagcgaattgtttttgcccaaggatggttctgtgtctccgccaggcggcatgtgacctgctcgggcgcgggtggcccttcacccctgtgagtgtggccagaagtacctctcacctggacctgcggaccccgggcgcagtcctggagctgagaactggaggttgggggaacagcagggtaaaggggagagaaaagggggtcagctgcgggacggagtgccgtcccagctgtagtttcatgtttggtggagcaacccctgttcctttcctctctctctctcttaattcctcttaactgtactcacgcttccttctccttcccctggtccgcttcatggatgctgagctgcctggccagaacctacccagcttctttgctggtcagatttgtcggtcttttgtgtgtctgcagcacctccttccacacgggcccaggagttctctatacgcgctctcaccgcaggtcttggaattccaagccatttccaattccaggtcttggaaatggctgtgcaatttgtcttcactgttaggtttccaagatggcaactatcaagagtgaacttattaagaatttcgcggaagaggaggccattcatcacaataagatctccattgtaggaactggatcggttggtgtggcttgtgctatcagcatcttattaaaaggtttgagtgatgaacttgtccttgtggatgttgatgaaggcaaactgaagggtgagacaatggatcttcaacatggcagcccttttatgaaaatgccaaatattgtctccagcaaagattacctggtcactgcaaactccaatctagtgattatcacagcaggtgcacgccagaaaaaaggagaaacacgccttgatttagtccagcgaaatgtatccatctttaaattaatgattcccaatattacccagtacagtcctcactgcaaactgcttattgttactaatccagtggatatcttaacttatgtagcctggaagttgagtggatttcccaaaaaccgtgttattggaagtggttgtaatctggactctgctcgttttcgttactttattgggcaaaggcttggcatccactctgaaagctgtcatgggctgatccttggagagcatggcgactcaagtgttcctgtgtggagtggtgtgaacattgctggcgtccctctgaaggatctgaacccagatataggaactgataaagatcctgagcagtgggaaaatgtccacaaaaaagtgatttccagtggctatgagatggtcaaaatgaaaggttatacttcttggggcattagcctatctgtagctgatttaacagaaagtattttgaagaatcttaggagagtgcatccagtttctaccctaagtaagggcctctatggaataaatgaagacatattccttagtgtcccatgtatcctgggagagaatggtatcacagacctcataaaagtaaaactgactcttgaagaggaggcctgcttgcaaaagagtgcagaaacactttgggaaattcagaaggagctcaagctttaaagttgcttaaagctaattctgtagattgaagatgaaatagtagttatggaattgtatatgtcaaacttttgaataaatttgaatttctaaaagttggaaaaatagaggaaagagtgacctatttagtatagccttccagcttttttttttttcttttttgggagggtctcattctgtcacccaggctggagtgcagtggcacaatcatggctcactgcaaccttgacctcccgagctcaggtgagcctcccacttcagcctccagagtaggtgggaccacatgcgtgtgcctccatgcctgcctaatttttgtatctttttgtagagatggggttttgccatgtcatccaagctggttttgaactcccaaagtgctgagattacaggggtgagccactgtgcctggccttagctttgatttagtatccagatgatagatgacacttttttttttttttttttaaagtgacggcatcaaagatgtttttggtacttctcagtacttgccttgtatgtatacgtaattgccatctggtccacaagaatgtgtttactgtgttacacaaatcctgattcttttcatcaggtgcatagtaattcttctctatggcttaatacctatgttcatttacatgctatctctacaatgtaaaaataaaagtgtatatatatacacacacacacagagagtaatctaaatgttcctaacactagataaaacattgatttg

SEQ ID NO: 147308 - DNA, 1716 bp, Homo sapiens
  Payload ID: 9136
  Gene Symbol: LDHAL6A
  Gene Name: lactate dehydrogenase A-like 6A
  Uniprot ID: Q6ZMR3
  ENST ID: ENST00000396213
  CDS Start-End: 265-1263
ggcagaggcgcaggcgcggtgcttcgcagcccgcttccggcctcacacctgccaagcatcacacctgccaagcatcacacctgccaagcatcacacctgccaagcatcacacctgcgatgcctgcacgagctgggtgcggtccgcgcagctgcagtaagggggcgacccggcgtctgttagtcggcggttcatctccttcgtgcctcgatgagctttaacgccattttcctccattctctttcttcacctcttgagtttccaagatggcaactatcaagagtgaacttattaagaatttcgcggaagaggaggccattcatcacaataagatctccattgtaggaactggatcggttggtgtggcttgtgctatcagcatcttattaaaaggtttgagtgatgaacttgtccttgtggatgttgatgaaggcaaactgaagggtgagacaatggatcttcaacatggcagcccttttatgaaaatgccaaatattgtctccagcaaagattacctggtcactgcaaactccaatctagtgattatcacagcaggtgcacgccagaaaaaaggagaaacacgccttgatttagtccagcgaaatgtatccatctttaaattaatgattcccaatattacccagtacagtcctcactgcaaactgcttattgttactaatccagtggatatcttaacttatgtagcctggaagttgagtggatttcccaaaaaccgtgttattggaagtggttgtaatctggactctgctcgttttcgttactttattgggcaaaggcttggcatccactctgaaagctgtcatgggctgatccttggagagcatggcgactcaagtgttcctgtgtggagtggtgtgaacattgctggcgtccctctgaaggatctgaacccagatataggaactgataaagatcctgagcagtgggaaaatgtccacaaaaaagtgatttccagtggctatgagatggtcaaaatgaaaggttatacttcttggggcattagcctatctgtagctgatttaacagaaagtattttgaagaatcttaggagagtgcatccagtttctaccctaagtaagggcctctatggaataaatgaagacatattccttagtgtcccatgtatcctgggagagaatggtatcacagacctcataaaagtaaaactgactcttgaagaggaggcctgcttgcaaaagagtgcagaaacactttgggaaattcagaaggagctcaagctttaaagttgcttaaagctaattctgtagattgaagatgaaatagtagttatggaattgtatatgtcaaacttttgaataaatttgaatttctaaaagttggaaaaatagaggaaagagtgacctatttagtatagccttccagcttttttttttttcttttttgggagggtctcattctgtcacccaggctggagtgcagtggcacaatcatggctcactgcaaccttgacctcccgagctcaggtgagcctcccacttcagcctccagagtaggtgggaccacatgcgtgtgcctccatgcctgcctaatttttgtatctttttgtagagatggggttttgccatgtcatccaagctggttttgaactcccaaagtgctgagattacaggggtgagccactgtgcctggccttagctttgatttagtatccagatgatagatgacacttttttttt

SEQ ID NO: 147309 - DNA, 1042 bp, Homo sapiens
  Payload ID: 9136
  Gene Symbol: LDHAL6A
  Gene Name: lactate dehydrogenase A-like 6A
  ENST ID: ENST00000615355
  CDS Start-End: 265-966
ggcagaggcgcaggcgcggtgcttcgcagcccgcttccggcctcacacctgccaagcatcacacctgccaagcatcacacctgccaagcatcacacctgccaagcatcacacctgcgatgcctgcacgagctgggtgcggtccgcgcagctgcagtaagggggcgacccggcgtctgttagtcggcggttcatctccttcgtgcctcgatgagctttaacgccattttcctccattctctttcttcacctcttgagtttccaagatggcaactatcaagagtgaacttattaagaatttcgcggaagaggaggccattcatcacaataagatctccattgtaggaactggatcggttggtgtggcttgtgctatcagcatcttattaaaaggtttgagtgatgaacttgtccttgtggatgttgatgaaggcaaactgaagggtgagacaatggatcttcaacatggcagcccttttatgaaaatgccaaatattgtctccagcaaagattacctggtcactgcaaactccaatctagtgattatcacagcaggtgcacgccagaaaaaaggagaaacacgccttgatttagtccagcgaaatgtatccatctttaaattaatgattcccaatattacccagtacagtcctcactgcaaactgcttattgttactaatccagtggatatcttaacttatgtagcctggaagttgagtggatttcccaaaaaccgtgttattggaagtggttgtaatctggactctgctcgttttcgttactttattgggcaaaggcttggcatccactctgaaagctgtcatgggctgatccttggagagcatggcgactcaagtgttcctgtgtggagtggtgtgaacattgctggcgtccctctgaaggatctgaacccagatataggaactgataaagatcctgagcagtgggaaaatgtccacaaaaagtgatttccagtggctatgagatggtcaaaatgaaaggttatacttcttggggcattagcctatctgtagctgatttaac

SEQ ID NO: 147310 - DNA, 1693 bp, Homo sapiens
  Payload ID: 9137
  Gene Symbol: LDHAL6B
  Gene Name: lactate dehydrogenase A-like 6B
  Uniprot ID: Q9BYZ2
  ENST ID: ENST00000307144
  CDS Start-End: 119-1264
ggggcacgcgcacctgccgtagagtgctgaaggtcctgccaacggctctcttggcgtctcaacgttcggatcagcagcttttttccattctctctctccacttcttcagtgagcagccatgagttggactgtgcctgttgtgcgggccagccagagagtgagctcggtgggagcgaatttcctatgcctggggatggccctgtgtccgcgtcaagcaacgcgcatcccgctcaacggcacctggctcttcacccccgtgagcaagatggcgactgtgaagagtgagcttattgagcgtttcacttccgagaagcccgttcatcacagtaaggtctccatcataggaactggatcggtgggcatggcctgcgctatcagcatcttattaaaaggcttgagtgatgaacttgcccttgtggatcttgatgaagacaaactgaagggtgagacgatggatcttcaacatggcagccctttcacgaaaatgccaaatattgtttgtagcaaagattactttgtcacagcaaactccaacctagtgattatcacagcaggtgcacgccaagaaaagggagaaacgcgccttaatttagtccagcgaaatgtggccatcttcaagttaatgatttccagtattgtccagtacagcccccactgcaaactgattattgtttccaatccagtggatatcttaacttatgtagcttggaagttgagtgcatttcccaaaaaccgtattattggaagcggctgtaatctggatactgctcgttttcgtttcttgattggacaaaagcttggtatccattctgaaagctgccatggatggatcctcggagagcatggagactcaagtgttcctgtgtggagtggagtgaacatagctggtgtccctttgaaggatctgaactctgatataggaactgataaagatcctgagcaatggaaaaatgtccacaaagaagtgactgcaactgcctatgagattattaaaatgaaaggttatacttcttgggccattggcctatctgtggccgatttaacagaaagtattttgaagaatcttaggagaatacatccagtttccaccataattaagggcctctatggaatagatgaagaagtattcctcagtattccttgtatcctgggagagaacggtattaccaaccttataaagataaagctgacccctgaagaagaggcccatctgaaaaaaagtgcaaaaacactctgggaaattcagaataagcttaagctttaaagttgcctaaaactaccattccgaaattattgaagagatcatagatacaggattatataacgaaattttgaataaacttgaattcctaaaagatggaaacaggaaagtaggtagagtgattttcctatttatttagtcctccagctcttttattgagcatccacgtgctggacgatacttatttacaattcctaagtatttttggtacctctgatgtagcagcacttgccatgttatatatatgtagttggcatttggttcccaaaaagtaggatgtaggtatttattgtgttctagaaattccgactcttttcattagatatatgctatttctttcattcttgctggtttatacctatgttcatttatatgctgtaaaaaagtagtagcttcttctacaatgtaaaaataaatgtacatacaaaaaaa

SEQ ID NO: 147311 - DNA, 1303 bp, Homo sapiens
  Payload ID: 9138
  Gene Symbol: LDHB
  Gene Name: lactate dehydrogenase B
  Uniprot ID: P07195
  ENST ID: ENST00000350669
  CDS Start-End: 99-1103
cttgcagagccggcgccggaggagacgcacgcagctgactttgtcttctccgcacgactgttacagaggtctccagagccttctctctcctgtgcaaaatggcaactcttaaggaaaaactcattgcaccagttgcggaagaagaggcaacagttccaaacaataagatcactgtagtgggtgttggacaagttggtatggcgtgtgctatcagcattctgggaaagtctctggctgatgaacttgctcttgtggatgttttggaagataagcttaaaggagaaatgatggatctgcagcatgggagcttatttcttcagacacctaaaattgtggcagataaagattattctgtgactgccaattctaagattgtagtggtaactgcaggagtccgtcagcaagaaggggagagtcggctcaatctggtgcagagaaatgttaatgtcttcaaattcattattcctcagatcgtcaagtacagtcctgattgcatcataattgtggtttccaacccagtggacattcttacgtatgttacctggaaactaagtggattacccaaacaccgcgtgattggaagtggatgtaatctggattctgctagatttcgctaccttatggctgaaaaacttggcattcatcccagcagctgccatggatggattttgggggaacatggcgactcaagtgtggctgtgtggagtggtgtgaatgtggcaggtgtttctctccaggaattgaatccagaaatgggaactgacaatgatagtgaaaattggaaggaagtgcataagatggtggttgaaagtgcctatgaagtcatcaagctaaaaggatataccaactgggctattggattaagtgtggctgatcttattgaatccatgttgaaaaatctatccaggattcatcccgtgtcaacaatggtaaaggggatgtatggcattgagaatgaagtcttcctgagccttccatgtatcctcaatgcccggggattaaccagcgttatcaaccagaagctaaaggatgatgaggttgctcagctcaagaaaagtgcagataccctgtgggacatccagaaggacctaaaagacctgtgactagtgagctctaggctgtagaaatttaaaaactacaatgtgattaactcgagcctttagttttcatccatgtacatggatcacagtttgctttgatcttcttcaatatgtgaatttgggctcacagaatcaaagcctatgcttggtttaatgcttgcaatctgagctcttgaacaaataaaattaactattgtagtgtg

SEQ ID NO: 147312 - DNA, 744 bp, Homo sapiens
  Payload ID: 9138
  Gene Symbol: LDHB
  Gene Name: lactate dehydrogenase B
  ENST ID: ENST00000396075
  CDS Start-End: 47-744
tggacgatctttacctcgaatatttgaatatattgccacgtgcaaaatggcaactcttaaggaaaaactcattgcaccagttgcggaagaagaggcaacagttccaaacaataagatcactgtagtgggtgttggacaagttggtatggcgtgtgctatcagcattctgggaaagtctctggctgatgaacttgctcttgtggatgttttggaagataagcttaaaggagaaatgatggatctgcagcatgggagcttatttcttcagacacctaaaattgtggcagataaagattattctgtgactgccaattctaagattgtagtggtaactgcaggagtccgtcagcaagaaggggagagtcggctcaatctggtgcagagaaatgttaatgtcttcaaattcattattcctcagatcgtcaagtacagtcctgattgcatcataattgtggtttccaacccagtggacattcttacgtatgttacctggaaactaagtggattacccaaacaccgcgtgattggaagtggatgtaatctggattctgctagatttcgctaccttatggctgaaaaacttggcattcatcccagcagctgccatggatggattttgggggaacatggcgactcaagtgtggctgtgtggagtggtgtgaatgtggcaggtgtttctctccaggaattgaatccagaaatgggaactgacaatgatagtgaaaattggaaggaagtgcataa

SEQ ID NO: 147313 - DNA, 1538 bp, Homo sapiens
  Payload ID: 9138
  Gene Symbol: LDHB
  Gene Name: lactate dehydrogenase B
  Uniprot ID: P07195
  ENST ID: ENST00000396076
  CDS Start-End: 334-1338
tccgcacgactgttacagaggtctccagagccttctctctcctggtaggtttcggctcaggaccctgaatcctggcccacaggcaagcctgatgggacgtgcggggtagtacttgtatggggagacgcgggaaggaggaagaagcacatctgtcctccgcggcctttagctctgagcatccggccgcgggccctgactttgccgctcagtttggggcgcagggggggccgtgccctggcggaggagcagaaggcagagggtagcagctgcggctcagcggagagacttgttgcatttgcagctaaaaccaggccctacttgtccttgtgcaaaatggcaactcttaaggaaaaactcattgcaccagttgcggaagaagaggcaacagttccaaacaataagatcactgtagtgggtgttggacaagttggtatggcgtgtgctatcagcattctgggaaagtctctggctgatgaacttgctcttgtggatgttttggaagataagcttaaaggagaaatgatggatctgcagcatgggagcttatttcttcagacacctaaaattgtggcagataaagattattctgtgactgccaattctaagattgtagtggtaactgcaggagtccgtcagcaagaaggggagagtcggctcaatctggtgcagagaaatgttaatgtcttcaaattcattattcctcagatcgtcaagtacagtcctgattgcatcataattgtggtttccaacccagtggacattcttacgtatgttacctggaaactaagtggattacccaaacaccgcgtgattggaagtggatgtaatctggattctgctagatttcgctaccttatggctgaaaaacttggcattcatcccagcagctgccatggatggattttgggggaacatggcgactcaagtgtggctgtgtggagtggtgtgaatgtggcaggtgtttctctccaggaattgaatccagaaatgggaactgacaatgatagtgaaaattggaaggaagtgcataagatggtggttgaaagtgcctatgaagtcatcaagctaaaaggatataccaactgggctattggattaagtgtggctgatcttattgaatccatgttgaaaaatctatccaggattcatcccgtgtcaacaatggtaaaggggatgtatggcattgagaatgaagtcttcctgagccttccatgtatcctcaatgcccggggattaaccagcgttatcaaccagaagctaaaggatgatgaggttgctcagctcaagaaaagtgcagataccctgtgggacatccagaaggacctaaaagacctgtgactagtgagctctaggctgtagaaatttaaaaactacaatgtgattaactcgagcctttagttttcatccatgtacatggatcacagtttgctttgatcttcttcaatatgtgaatttgggctcacagaatcaaagcctatgcttggtttaatgcttgcaatctgagctcttgaacaaataaaattaactattgtagtgtg

SEQ ID NO: 147314 - DNA, 732 bp, Homo sapiens
  Payload ID: 9138
  Gene Symbol: LDHB
  Gene Name: lactate dehydrogenase B
  ENST ID: ENST00000450584
  CDS Start-End: 323-732
gcagagccggcgccggaggagacgcacgcagctgactttgtcttctccgcacgactgttacagaggtctccagagccttctctctcctggagccatgcgccagttctttcctgcagggcctcttttctggatgcttaggggcttcgtttactttaccagccttgggtgctccgagtaaggaagtcctagacttgtccccacagaccttactcggggagatctctagcttctgcatgccctcgtgatctgctgttctttgctgccggtgccctgaggaaaagatggtttgtgcgcaccgcgagcagtacaagctgcatgcaaaatggcaactcttaaggaaaaactcattgcaccagttgcggaagaagaggcaacagttccaaacaataagatcactgtagtgggtgttggacaagttggtatggcgtgtgctatcagcattctgggaaagtctctggctgatgaacttgctcttgtggatgttttggaagataagcttaaaggagaaatgatggatctgcagcatgggagcttatttcttcagacacctaaaattgtggcagataaagattattctgtgactgccaattctaagattgtagtggtaactgcaggagtccgtcagcaagaaggggagagtcggctcaatctggtgcagagaaatgttaatgtcttcaaattcattattcctcagatcgtcaagtacagtcctgattgcatcataattgtggt

SEQ ID NO: 147315 - DNA, 487 bp, Homo sapiens
  Payload ID: 9138
  Gene Symbol: LDHB
  Gene Name: lactate dehydrogenase B
  ENST ID: ENST00000539782
  CDS Start-End: 182-487
agaagccagagcagacagcaatttcgggacattgcagagctgtagtagatctgtactggtctgcagacagacaataatttgcactaagaccaggaagacgttctgtgaggaagacataggtggaaatacggaaagcagaaaagacaacttcggggtggccgggagataacagaagtgcaaaatggcaactcttaaggaaaaactcattgcaccagttgcggaagaagaggcaacagttccaaacaataagatcactgtagtgggtgttggacaagttggtatggcgtgtgctatcagcattctgggaaagtctctggctgatgaacttgctcttgtggatgttttggaagataagcttaaaggagaaatgatggatctgcagcatgggagcttatttcttcagacacctaaaattgtggcagataaagattattctgtgactgccaattctaagattgtagtggtaactgcaggagtccgtcagcaa

SEQ ID NO: 147316 - DNA, 1256 bp, Homo sapiens
  Payload ID: 9139
  Gene Symbol: LDHC
  Gene Name: lactate dehydrogenase C
  Uniprot ID: P07864
  ENST ID: ENST00000280704
  CDS Start-End: 142-1140
ggcaaccgtcgacgggcttagcgcctcaactgtcgttggtgtatttttctggtgtcacttctgtgccttccttcaaaggtggtgctttgtccctgtgggtcatctgtactgattgcgccaagcaaagcatttgttctccaaatgtcaactgtcaaggagcagctaattgagaagctaattgaggatgatgaaaactcccagtgtaaaattactattgttggaactggtgccgtaggcatggcttgtgctattagtatcttactgaaggatttggctgatgaacttgcccttgttgatgttgcattggacaaactgaagggagaaatgatggatcttcagcatggcagtcttttctttagtacttcaaagattacttctggaaaagattacagtgtatctgcaaactccagaatagttattgtcacagcaggtgcaaggcagcaggagggagaaactcgccttgccctggtccaacgtaatgtggctataatgaaatcaatcattcctgccatagtccattatagtcctgattgtaaaattcttgttgtttcaaatccagtggatattttgacatatatagtctggaagataagtggcttacctgtaactcgtgtaattggaagtggttgtaatctagactctgcccgtttccgttacctaattggagaaaagttgggtgtccaccccacaagctgccatggttggattattggagaacatggtgattctagtgtgcccttatggagtggggtgaatgttgctggtgttgctctgaagactctggaccctaaattaggaacggattcagataaggaacactggaaaaatatccataaacaagttattcaaagtgcctatgaaattatcaagctgaaggggtatacctcttgggctattggactgtctgtgatggatttggtaggatccattttgaaaaatcttaggagagtgcacccagtttccaccatggttaagggattatatggaataaaagaagaactctttctcagtatcccttgtgtcttggggcggaatggtgtctcagatgttgtgaaaattaacttgaattctgaggaggaggcccttttcaagaagagtgcagaaacactttggaatattcaaaaggatctaatattttaaattaaagccttctaatgttccactgtttggagaacagaagatagcaggctgtgtattttaaattttgaaagtattttcatttgatctttaaaaaataaaaacaaattggagacctg

SEQ ID NO: 147317 - DNA, 1092 bp, Homo sapiens
  Payload ID: 9139
  Gene Symbol: LDHC
  Gene Name: lactate dehydrogenase C
  ENST ID: ENST00000396215
  CDS Start-End: 96-251
gcacggagggcaaccgtcgacgggcttagcgcctcaactgtcgttggtgtatttttctggtgtcacttctgtgccttccttcaaaggttctccaaatgtcaactgtcaaggagcagctaattgagaagctaattgaggatgatgaaaactcccagtgtaaaattactattgttggaactggtgccgtaggcatggcttgtgctattagtatcttactgaagattacagtgtatctgcaaactccagaatagttattgtcacagcaggtgcaaggcagcaggagggagaaactcgccttgccctggtccaacgtaatgtggctataatgaaatcaatcattcctgccatagtccattatagtcctgattgtaaaattcttgttgtttcaaatccagtggatattttgacatatatagtctggaagataagtggcttacctgtaactcgtgtaattggaagtggttgtaatctagactctgcccgtttccgttacctaattggagaaaagttgggtgtccaccccacaagctgccatggttggattattggagaacatggtgattctagtgtgcccttatggagtggggtgaatgttgctggtgttgctctgaagactctggaccctaaattaggaacggattcagataaggaacactggaaaaatatccataaacaagttattcaaagtgcctatgaaattatcaagctgaaggggtatacctcttgggctattggactgtctgtgatggatttggtaggatccattttgaaaaatcttaggagagtgcacccagtttccaccatggttaagggattatatggaataaaagaagaactctttctcagtatcccttgtgtcttggggcggaatggtgtctcagatgttgtgaaaattaacttgaattctgaggaggaggcccttttcaagaagagtgcagaaacactttggaatattcaaaaggatctaatattttaaattaaagccttctaatgttccactgtttggagaacagaagatagcaggctgtgtattttaaattttgaaagtattttcatttgatctttaaaaaataaaaacaaattggagacctg

SEQ ID NO: 147318 - DNA, 2041 bp, Homo sapiens
  Payload ID: 9139
  Gene Symbol: LDHC
  Gene Name: lactate dehydrogenase C
  Uniprot ID: P07864
  ENST ID: ENST00000541669
  CDS Start-End: 112-1110
gtgcgtgtctcgagtcgcacggagggcaaccgtcgacgggcttagcgcctcaactgtcgttggtgtatttttctggtgtcacttctgtgccttccttcaaaggttctccaaatgtcaactgtcaaggagcagctaattgagaagctaattgaggatgatgaaaactcccagtgtaaaattactattgttggaactggtgccgtaggcatggcttgtgctattagtatcttactgaaggatttggctgatgaacttgcccttgttgatgttgcattggacaaactgaagggagaaatgatggatcttcagcatggcagtcttttctttagtacttcaaagattacttctggaaaagattacagtgtatctgcaaactccagaatagttattgtcacagcaggtgcaaggcagcaggagggagaaactcgccttgccctggtccaacgtaatgtggctataatgaaatcaatcattcctgccatagtccattatagtcctgattgtaaaattcttgttgtttcaaatccagtggatattttgacatatatagtctggaagataagtggcttacctgtaactcgtgtaattggaagtggttgtaatctagactctgcccgtttccgttacctaattggagaaaagttgggtgtccaccccacaagctgccatggttggattattggagaacatggtgattctagtgtgcccttatggagtggggtgaatgttgctggtgttgctctgaagactctggaccctaaattaggaacggattcagataaggaacactggaaaaatatccataaacaagttattcaaagtgcctatgaaattatcaagctgaaggggtatacctcttgggctattggactgtctgtgatggatttggtaggatccattttgaaaaatcttaggagagtgcacccagtttccaccatggttaagggattatatggaataaaagaagaactctttctcagtatcccttgtgtcttggggcggaatggtgtctcagatgttgtgaaaattaacttgaattctgaggaggaggcccttttcaagaagagtgcagaaacactttggaatattcaaaaggatctaatattttaaattaaagccttctaatgttccactgtttggagaacagaagatagcaggctgtgtattttaaattttgaaagtattttcatttgatctttaaaaaataaaaacaaattggagacctgtgacataactctagtctctcaagattagaacgagcaaatggtaaagagattttcctctttaagaatcatttatagctctattctaatgatacccaatctgtacaggtgtaagttatacttctgaggtatgtcacatatgttagagtgccttcagatgtagtagaatatgtataatcactataatacagagctttgattcttttcacaaaccaagccctttttctagtattacaattttatcttgtactttcatccgttagagtaccagcatattcacttcattacattagcgtcatatgtttatgtataatcattataaatgtggccgggcactgcagcctgggtgaaagagtgaggctctgtctcaaaaaaaatcattataaatgcttatttttaagaccatatatatcaaaaagaaataaaaagctgagtgctgtggctcatggctgtaatcccagtgctttgggagggtgaggcaagaggatcacatgagtccaggagtttgagaccagccttggcaacatagcaacaccccatctctacaaaaataaagaaattagatgtggtggcctgcatctgtagtccagctacttgggagactgagaccagtagataacttgagcccaggagttcaaggctatgattgtgtcactgcactccagcctgggccacagaggaagactcagactcaaaagaagaagaagaacacagaagaaaagcagaaacaagaagaagatacagatgtaactttacgatgtaaaaaatctaaataagattgtattcaactctgcaagtattatactagtcatataaac

SEQ ID NO: 147319 - DNA, 813 bp, Homo sapiens
  Payload ID: 9139
  Gene Symbol: LDHC
  Gene Name: lactate dehydrogenase C
  ENST ID: ENST00000545848
  CDS Start-End: 59-214
ctgtcgttggtgtatttttctggtgtcacttctgtgccttccttcaaaggttctccaaatgtcaactgtcaaggagcagctaattgagaagctaattgaggatgatgaaaactcccagtgtaaaattactattgttggaactggtgccgtaggcatggcttgtgctattagtatcttactgaagattacagtgtatctgcaaactccagaatagttattgtcacagcaggtgcaaggcagcaggagggagaaactcgccttgccctggtccaacgtaatgtggctataatgaaatcaatcattcctgccatagtccattatagtcctgattgtaaaattcttgttgtttcaaatccagtggatattttgacatatatagtctggaagataagtggcttacctgtaactcgtgtaattggaagtggttgtaatctagactctgcccgtttccgttacctaattggagaaaagttgggtgtccaccccacaagctgccatggttggattattggagaacatggtgattctagtgggattatatggaataaaagaagaactctttctcagtatcccttgtgtcttggggcggaatggtgtctcagatgttgtgaaaattaacttgaattctgaggaggaggcccttttcaagaagagtgcagaaacactttggaatattcaaaaggatctaatattttaaattaaagccttctaatgttccactgtttggagaacagaagatagcaggctgtgtattttaaattttgaaagtattttcatttgatctttaaaaaataaaaacaaattggagacctg

SEQ ID NO: 147320 - DNA, 875 bp, Homo sapiens
  Payload ID: 9139
  Gene Symbol: LDHC
  Gene Name: lactate dehydrogenase C
  ENST ID: ENST00000544105
  CDS Start-End: 1-726
atgtcaactgtcaaggagcagctaattgagaagctaattgaggatgatgaaaactcccagtgtaaaattactattgttggaactggtgccgtaggcatggcttgtgctattagtatcttactgaaggatttggctgatgaacttgcccttgttgatgttgcattggacaaactgaagggagaaatgatggatcttcagcatggcagtcttttctttagtacttcaaagattacttctggaaaagattacagtgtatctgcaaactccagaatagttattgtcacagcaggtgcaaggcagcaggagggagaaactcgccttgccctggtccaacgtaatgtggctataatgaaatcaatcattcctgccatagtccattatagtcctgattgtaaaattcttgttgtttcaaatccagtggatattttgacatatatagtctggaagataagtggcttacctgtaactcgtgtaattggaagtggttgtaatctagactctgcccgtttccgttacctaattggagaaaagttgggtgtccaccccacaagctgccatggttggattattggagaacatggtgattctagtgtgcccttatggagtggggtgaatgttgctggtgttgctctgaagactctggaccctaaattaggaacggattcagataaggaacactggaaaaatatccataaacaagttattcaaagggattatatggaataaaagaagaactctttctcagtatcccttgtgtcttggggcggaatggtgtctcagatgttgtgaaaattaacttgaattctgaggaggaggcccttttcaagaagagtgcagaaacactttggaatattcaaaaggatctaatattttaa

SEQ ID NO: 147321 - DNA, 957 bp, Homo sapiens
  Payload ID: 9139
  Gene Symbol: LDHC
  Gene Name: lactate dehydrogenase C
  ENST ID: ENST00000536880
  CDS Start-End: 1-957
atgtcaactgtcaaggagcagctaattgagaagctaattgaggatgatgaaaactcccagtgtaaaattactattgttggaactggtgccgtaggcatggcttgtgctattagtatcttactgaaggatttggctgatgaacttgcccttgttgatgttgcattggacaaactgaagggagaaatgatggatcttcagcatggcagtcttttctttagtacttcaaagattacttctggaaaagcaggtgcaaggcagcaggagggagaaactcgccttgccctggtccaacgtaatgtggctataatgaaatcaatcattcctgccatagtccattatagtcctgattgtaaaattcttgttgtttcaaatccagtggatattttgacatatatagtctggaagataagtggcttacctgtaactcgtgtaattggaagtggttgtaatctagactctgcccgtttccgttacctaattggagaaaagttgggtgtccaccccacaagctgccatggttggattattggagaacatggtgattctagtgtgcccttatggagtggggtgaatgttgctggtgttgctctgaagactctggaccctaaattaggaacggattcagataaggaacactggaaaaatatccataaacaagttattcaaagtgcctatgaaattatcaagctgaaggggtatacctcttgggctattggactgtctgtgatggatttggtaggatccattttgaaaaatcttaggagagtgcacccagtttccaccatggttaagggattatatggaataaaagaagaactctttctcagtatcccttgtgtcttggggcggaatggtgtctcagatgttgtgaaaattaacttgaattctgaggaggaggcccttttcaagaagagtgcagaaacactttggaatattcaaaaggatctaatattttaa

SEQ ID NO: 147322 - DNA, 583 bp, Homo sapiens
  Payload ID: 9139
  Gene Symbol: LDHC
  Gene Name: lactate dehydrogenase C
  ENST ID: ENST00000537486
  CDS Start-End: 1-504
atgtcaactgtcaaggagcagctaattgagaagctaattgaggatgatgaaaactcccagtgtaaaattactattgttggaactggtgccgtaggcatggcttgtgctattagtatcttactgaaggatttggctgatgaacttgcccttgttgatgttgcattggacaaactgaagggagaaatgatggatcttcagcatggcagtcttttctttagtacttcaaagattacttctggaaaagattacagtgtatctgcaaactccagaatagttattgtcacagcaggtgcaaggcagcaggagggagaaactcgccttgccctggtccaacgtaatgtggctataatgaaatcaatcattcctgccatagtccattatagtcctgattgtaaaattcttgttgtttcaaatccagggattatatggaataaaagaagaactctttctcagtatcccttgtgtcttggggcggaatggtgtctcagatgttgtgaaaattaacttgaattctgaggaggaggcccttttcaagaagagtgcagaaacactttggaatattcaaaaggatctaatattttaa

SEQ ID NO: 147323 - DNA, 881 bp, Homo sapiens
  Payload ID: 9139
  Gene Symbol: LDHC
  Gene Name: lactate dehydrogenase C
  ENST ID: ENST00000539369
  CDS Start-End: 59-196
ctgtcgttggtgtatttttctggtgtcacttctgtgccttccttcaaaggttctccaaatgtcaactgtcaaggagcagctaattgagaagctaattgaggatgatgaaaactcccagtgtaaaattactattgttggaactggtgccgtaggcatggcttgtgctattagtatcttactgaagtggatattttgacatatatagtctggaagataagtggcttacctgtaactcgtgtaattggaagtggttgtaatctagactctgcccgtttccgttacctaattggagaaaagttgggtgtccaccccacaagctgccatggttggattattggagaacatggtgattctagtgtgcccttatggagtggggtgaatgttgctggtgttgctctgaagactctggaccctaaattaggaacggattcagataaggaacactggaaaaatatccataaacaagttattcaaagtgcctatgaaattatcaagctgaaggggtatacctcttgggctattggactgtctgtgatggatttggtaggatccattttgaaaaatcttaggagagtgcacccagtttccaccatggttaagggattatatggaataaaagaagaactctttctcagtatcccttgtgtcttggggcggaatggtgtctcagatgttgtgaaaattaacttgaattctgaggaggaggcccttttcaagaagagtgcagaaacactttggaatattcaaaaggatctaatattttaaattaaagccttctaatgttccactgtttggagaacagaagatagcaggctgtgtattttaaattttgaaagtattttcatttgatctttaaaaaataaaaacaaattggagacctg

SEQ ID NO: 147324 - DNA, 701 bp, Homo sapiens
  Payload ID: 9139
  Gene Symbol: LDHC
  Gene Name: lactate dehydrogenase C
  ENST ID: ENST00000546146
  CDS Start-End: 1-552
atgtcaactgtcaaggagcagctaattgagaagctaattgaggatgatgaaaactcccagtgtaaaattactattgttggaactggtgccgtaggcatggcttgtgctattagtatcttactgaaggatttggctgatgaacttgcccttgttgatgttgcattggacaaactgaagggagaaatgatggatcttcagcatggcagtcttttctttagtacttcaaagattacttctggaaaagtggatattttgacatatatagtctggaagataagtggcttacctgtaactcgtgtaattggaagtggttgtaatctagactctgcccgtttccgttacctaattggagaaaagttgggtgtccaccccacaagctgccatggttggattattggagaacatggtgattctagtgtgcccttatggagtggggtgaatgttgctggtgttgctctgaagactctggaccctaaattaggaacggattcagataaggaacactggaaaaatatccataaacaagttattcaaagggattatatggaataaaagaagaactctttctcagtatcccttgtgtcttggggcggaatggtgtctcagatgttgtgaaaattaacttgaattctgaggaggaggcccttttcaagaagagtgcagaaacactttggaatattcaaaaggatctaatattttaa

SEQ ID NO: 147325 - DNA, 757 bp, Homo sapiens
  Payload ID: 9139
  Gene Symbol: LDHC
  Gene Name: lactate dehydrogenase C
  ENST ID: ENST00000535809
  CDS Start-End: 1-678
atgtcaactgtcaaggagcagctaattgagaagctaattgaggatgatgaaaactcccagtgtaaaattactattgttggaactggtgccgtaggcatggcttgtgctattagtatcttactgaaggatttggctgatgaacttgcccttgttgatgttgcattggacaaactgaagggagaaatgatggatcttcagcatggcagtcttttctttagtacttcaaagattacttctggaaaagattacagtgtatctgcaaactccagaatagttattgtcacagcaggtgcaaggcagcaggagggagaaactcgccttgccctggtccaacgtaatgtggctataatgaaatcaatcattcctgccatagtccattatagtcctgattgtaaaattcttgttgtttcaaatccagtggatattttgacatatatagtctggaagataagtggcttacctgtaactcgtgtaattggaagtggttgtaatctagactctgcccgtttccgttacctaattggagaaaagttgggtgtccaccccacaagctgccatggttggattattggagaacatggtgattctagtgggattatatggaataaaagaagaactctttctcagtatcccttgtgtcttggggcggaatggtgtctcagatgttgtgaaaattaacttgaattctgaggaggaggcccttttcaagaagagtgcagaaacactttggaatattcaaaaggatctaatattttaa

SEQ ID NO: 147326 - DNA, 2067 bp, Homo sapiens
  Payload ID: 9140
  Gene Symbol: LDHD
  Gene Name: lactate dehydrogenase D
  Uniprot ID: Q86WU2
  ENST ID: ENST00000300051
  CDS Start-End: 48-1571
ggtcaccctgccacccagtgctcacaccctctggccagtgcctggctatggcccgactgctcaggtctgcaacctgggagctgttcccctggaggggctactgctcccagaaggcaaagggagagctctgcagggacttcgtagaggctctgaaggccgtggtgggcggctcccacgtgtccactgccgcggtggtccgagagcagcacgggcgcgatgagtcggtgcacaggtgcgaacctcctgatgctgtggtgtggccccagaacgtggagcaggtcagccggctggcagccctgtgctatcgccaaggtgtgcccatcatcccattcggcaccggcaccgggcttgagggtggcgtctgtgctgtgcagggcggcgtctgcgttaacctgacgcatatggaccgaatcctggagctgaaccaggaggacttctctgtggtggtggagccaggtgtcacccgcaaagccctcaacgcccacctgcgggacagcggcctctggtttcccgtggacccaggcgcggacgcctctctctgtggcatggcggccaccggggcgtcggggaccaacgcggtccgctacggcaccatgcgggacaacgtgctcaacctggaggtggtgctgcccgacgggcggctgctgcacacggcgggccgaggccggcatttccgcttcggcttctggccagaaatccctcatcacacagcctggtactcaccttgtgtgtccctgggacgtaggaagagtgcagccggctacaacctcacggggctcttcgtgggctccgaggggacgctgggcctcatcacagccaccaccctgcgcctgcaccctgcccctgaggccacagtggccgccacgtgtgcgttccccagtgtccaggctgctgtggacagcactgtacacatcctccaggctgcagtgcccgtagcccgcattgagttcctggatgaagtcatgatggatgcctgcaacaggtacagcaagctgaattgcttagtggcgcccacactcttcctggagttccatggctcccagcaggcactggaggagcagctgcagcgcacagaggagatagtccagcagaacggagcctctgacttctcctgggccaaggaggccgaggagcgcagccggctttggacagcacggcacaatgcctggtacgcagccctggccacgcggccaggctgcaagggctactccacggatgtgtgtgtgcccatctcccggctgccggagatcgtggtgcagaccaaggaggatctgaatgcctcaggactcacaggaagcattgtcgggcatgtgggtgacggcaacttccactgcatcctgctggtcaaccctgatgacgccgaggaactgggcagggtcaaggcttttgcagaacagctgggcaggcgggcactggctctccacggaacgtgcacgggggagcatggcatcggaatgggcaagcggcagctgctgcaggaggaggtgggcgccgtgggcgtggagaccatgcggcagctcaaggccgtgctagacccccaaggcctcatgaatccaggcaaagtgctgtgaagggggtctgagcacttagcccacaagttccctgactacggagccggttctggaacttttcttcatgccacggcccctgcaaggaaatagatgctgaggcagtcttcctgccagcgagcccactgtatctgggcccaaggccagagggcccagagagaagcctgagcaccgtgttacctccctggccctctggctggccccaggagcctttggttcagtaaacgacccagggtggttcccagcaaagctgcttcctctctgctcctacgcatcctgtcctggcgggaagagagcgtctgggtccattcaagactctgatgacacccctccccgaggcctcccactgccggggtcccaggacccttcccccttcacctggtgacaggaacactcctttcctggtatggaacgtgagctcccgtgacatgatgataggtcttctccttggggcctcccccaataaatctgtaataaacctgaaacccacctacagcta

SEQ ID NO: 147327 - DNA, 1966 bp, Homo sapiens
  Payload ID: 9140
  Gene Symbol: LDHD
  Gene Name: lactate dehydrogenase D
  Uniprot ID: Q86WU2
  ENST ID: ENST00000450168
  CDS Start-End: 52-1506
gactggtcaccctgccacccagtgctcacaccctctggccagtgcctggctatggcccgactgctcaggtctgcaacctgggagctgttcccctggaggggctactgctcccagaaggcaaagggagagctctgcagggacttcgtagaggctctgaaggccgtggtgggcggctcccacgtgtccactgccgcggtggtccgagagcagcacgggcgcgatgagtcggtgcacaggtgcgaacctcctgatgctgtggtgtggccccagaacgtggagcaggtcagccggctggcagccctgtgctatcgccaaggtgtgcccatcatcccattcggcaccggcaccgggcttgagggtggcgtctgtgctgtgcagggcggcgtctgcgttaacctgacgcatatggaccgaatcctggagctgaaccaggaggacttctctgtggtggtggagccaggtgtcacccgcaaagccctcaacgcccacctgcgggacagcggcctctggtttcccgtggacccaggcgcggacgcctctctctgtggcatggcggccaccggggcgtcggggaccaacgcggtccgctacggcaccatgcgggacaacgtgctcaacctggaggtggtgctgcccgacgggcggctgctgcacacggcgggccgaggccggcatttccggaagagtgcagccggctacaacctcacggggctcttcgtgggctccgaggggacgctgggcctcatcacagccaccaccctgcgcctgcaccctgcccctgaggccacagtggccgccacgtgtgcgttccccagtgtccaggctgctgtggacagcactgtacacatcctccaggctgcagtgcccgtagcccgcattgagttcctggatgaagtcatgatggatgcctgcaacaggtacagcaagctgaattgcttagtggcgcccacactcttcctggagttccatggctcccagcaggcactggaggagcagctgcagcgcacagaggagatagtccagcagaacggagcctctgacttctcctgggccaaggaggccgaggagcgcagccggctttggacagcacggcacaatgcctggtacgcagccctggccacgcggccaggctgcaagggctactccacggatgtgtgtgtgcccatctcccggctgccggagatcgtggtgcagaccaaggaggatctgaatgcctcaggactcacaggaagcattgtcgggcatgtgggtgacggcaacttccactgcatcctgctggtcaaccctgatgacgccgaggaactgggcagggtcaaggcttttgcagaacagctgggcaggcgggcactggctctccacggaacgtgcacgggggagcatggcatcggaatgggcaagcggcagctgctgcaggaggaggtgggcgccgtgggcgtggagaccatgcggcagctcaaggccgtgctagacccccaaggcctcatgaatccaggcaaagtgctgtgaagggggtctgagcacttagcccacaagttccctgactacggagccggttctggaacttttcttcatgccacggcccctgcaaggaaatagatgctgaggcagtcttcctgccagcgagcccactgtatctgggcccaaggccagagggcccagagagaagcctgagcaccgtgttacctccctggccctctggctggccccaggagcctttggttcagtaaacgacccagggtggttcccagcaaagctgcttcctctctgctcctacgcatcctgtcctggcgggaagagagcgtctgggtccattcaagactctgatgacacccctccccgaggcctcccactgccggggtcccaggacccttcccccttcacctggtgacaggaacactcctttcctggtatggaacgtgagctcccgtgacatgatgataggtcttctccttggggcctcccccaa

SEQ ID NO: 147328 - DNA, 701 bp, Homo sapiens
  Payload ID: 9140
  Gene Symbol: LDHD
  Gene Name: lactate dehydrogenase D
  ENST ID: ENST00000569876
  CDS Start-End: 36-143
acccagtgctcacaccctctggccagtgcctggctatggcccgactgctcaggtctgcaacctgggagctgttcccctggaggggctactgctcccagaaggcaaaggtaccgggagagaagagaagtcctctggagggatgagggagagctctgcagggacttcgtagaggctctgaaggccgtggtgggcggctcccacgtgtccactgccgcggtggtccgagagcagcacgggcgcgatgagtcggtgcacaggtgcgaacctcctgatgctgtggtgtggccccagaacgtggagcaggtcagccggctggcagccctgtgctatcgccaaggtgtgcccatcatcccattcggcaccggcaccgggcttgagggtggcgtctgtgctgtgcagggcggcgtctgcgttaacctgacgcatatggaccgaatcctggagctgaaccaggaggacttctctgtggtggtggagccaggtgtcacccgcaaagccctcaacgcccacctgcgggacagcggcctctggtttcccgtggacccaggcgcggacgcctctctctgtggcatggcggccaccggggcgtcggggaccaacgcggtccgctacggcaccatgcgggacaacgtgctcaacctggaggtggtgctgcccgacgggcggctgctgcacacggcgggccgaggccggcatttccg

SEQ ID NO: 147329 - DNA, 5208 bp, Homo sapiens
  Payload ID: 9141
  Gene Symbol: LACE1
  Gene Name: lactation elevated 1
  Uniprot ID: Q8WV93
  ENST ID: ENST00000368977
  CDS Start-End: 187-1632
cggaaggacgggagggcacgggagtgcagcccgcccatgtggctactggaggtcacgttccctaactgatcccttggttctctcgggtggagccttcagcgtgcacggcggggtttgactttgccaccgtctctcttctgggttccaataaagttttcctcttcctctcctcgtacggagttcaagatggcggcctcctggtcgctcttggttaccctgcgccccttagcacagagcccgctgagagggagatgtgttgggtgcggggcctgggccgccgctctcgctcctctggccaccgcccctgggaagcccttttggaaagcctatacggttcagacatccgagagcatgaccccaactgccacttcagagacttatttgaaagctttggccgtttgccatggacctctggaccactatgattttctgatcaaagctcatgagctaaaggatgatgaacatcaaagaagagtcatacagtgtttgcagaaattacacgaggaccttaaaggatacaatatagaggcagaaggccttttttcaaagcttttttcaaggagcaaacctccaaggggcctgtatgtttatggagatgttggtacaggaaaaacaatggtgatggacatgttttatgcttatgtggaaatgaagaggaaaaaacgggttcattttcatggtttcatgctagatgtgcacaaaagaatacatcgccttaaacagagtttgccaaaaaggaaaccaggattcatggctaaatcatatgacccaatagctcccatagccgaagaaatcagcgaagaagcatgtctcctatgttttgatgaatttcaggtcactgacattgctgatgccatgattctgaaacagctttttgaaaatctgttcaaaaacggggtcgtcgttgtggcaacatccaacaggccaccggaagatctctataaaaatggactccaaagagctaactttgtaccattcatagcagtcttgaaggaatattgtaatacagtccagctagattctgggatagattaccggaaaagggaacttcctgctgcaggaaaactctactacctcacaagtgaagctgatgtggaggctgtcatggataagttgtttgatgagctggctcagaaacaaaatgatttaactagaccaaggattctaaaagtgcaaggcagagagctgcgcctgaataaagcctgtggaaccgttgccgactgcacatttgaagagctgtgtgagagaccacttggagccagtgactatttggaactatcaaagaattttgatacaatatttttacgaaacattccgcaatttactctggcaaacaggactcaaggtcgaagattcataactctcatcgataacttttatgatctcaaggtgcgtataatttgctctgcgtcgactcctatatcaagcttatttttgcatcaacatcatgacagtgagttggagcaaagcagaatactgatggatgatttggggctgagccaggattcagcagaaggactctccatgtttaccggagaagaggaaatctttgcatttcagcgcacaatttcccgactcacggaaatgcagactgaacagtactggaatgaaggagacagaaccaagaagtaactgccacttttgcataaataaaactctagacaaatggttaacgcaggcagaactccttattgtgggacttgaaggaatcattttctcatcattaattatgcactttgtcctctggaccattttaatctaaaattgctctcaaggatctagtggattagtaagttaaacacttaacattttttaggtctgctttttcttatttggccttatttctgcaccatgaaattaaaatcatctcattcctgaagatgaatgtaggaccagacattttagcttcacattaaaccacctgaatgaaccttgaatgcacaagtaaatgcaagacgtctggataccttcaagctttggctgcatggtggtggcatgttagaaatacatcttttataatgggggaagaatgccctatgtttcaattcaaaacaaagacagttttccaatctgatataaactaaaagggataatattttagaatatgggcttatatgtggtttttttttttggttatgaattacagtaaatctcccaggccttcagatttctacataatggaagaatatgtttttaaccctgagatcaagtttagtaggcaggacttgatctcaagtggtcacaaagttttctaaaaaaaaatagaaaattatgatgggatcaaataaggagcaagtgtcaaattccagccaacaggcagatctgcaggcagagctacaaactctgcagccaggaatggggaccagtgagagagtgtgggcgggggggtgggtgtcagagtcgtaggcactccaacagcagaggagactcccgctcacatgaggccagccgtaccccagtggacagcaggctccttctcactgttgtagacacttgctctccttgcagcatgctgcccccgcccttgccgccaactctgccgtgagatggacctaataggaaataggaaagaaagcctgacaagcctgcttcacaggaaatctgatttgtccttcactgagctcatcttttgcttctttgagtaaaacctggctttactaactattgtcacaaagtggatcttcggctgtggatgagtgtgaaaaacagaaaaaatataaaatccacaaaatcttgtgaaaattaagcatttgggggaaggtaaggcataggtgagtcagtccaatgaatacaatggtcaacataagtaagctctttgaacctatttattttctatttattattatttttattttttatatcttggccactctagccatctcctggcaggggtagtgtggcacagcatggccctatttaatttcttagtcaataatccatcacatagtctcttttagatattaacctaattaaggcaagcaggtagatggatgagtacccaagccgagagaagagtttaaatcaagccttctgtaaataaaatgtggtttaaagatatttttattgaagtgaaacacagtaatttcaaagaggttacgtaatagggagaaaggatgggaaataaccactttgtgctggattgaatgctatatatttacattagctcagttaaaaaaaatagtcttagaaagtgaatattataacccctgtttaaaaataagaaaactgagtcttgggaaagttaagtagcttgacctgagattcacagtttacaactacaaaactcatatactatattttataacacactgtctcttactcttactatttaaaaaaaagagattgttttaaaaattgattcatttaactcagtgaatgaagttgaagataaattcacaacagaaccattgatttgaactcagtgaatataaaatgtttaactttattctttagatcttagctttttacttttcacattcctttggtaattattctgtatcttaatttttaaaaaaatcatgtgaatggacagacagatagatggacagtatgaccgatagacagacctgtccctgagtgtgagtgtatgtagaagagtccccctgtcaagttatgttataaaagttcatctgaggtcagatattgggaataaagtttcatttttccatcgaaacaatcacgtaatgttagttggggtgctggtcaaacgcatagaagcctatgtaattctcagtgtagcttccctataatgtcattttggtacgaaagaacttaaaccctgagaaaaaaactgtagctcagtctccacctaagtaactggagcatgtgcccacttctgtgcccccaatccgcaatctccttccccagttccaggggcctgctgggattggctgcagtggaagaggctctttgagctgggagaagggtttatgcagaaagtggggctagaaggctttggctggatctctggaggggagggagttccatggtggctggaaatctccaaagctggtttcataaaatagcatgcaagaaaaaaacccaagtcttcaagaatagccatcactaggaaacagtatggtagctctactaaaagaaaagtaatgccaacatgaaaaacaacccctagattggagagcaacatttcactttatatgtctttcttctgagccctgcccctattacattctcagcattccagtctttctccatagaagtctctcagcaaatgctctttttttgaaatgctttaaatgtatactttgagacggaggtttgagctgagtactgctgtggaaagctcctgctcaattcaaaacacagaccggggggatgtctttagagtcaggagaaaacatcatgtgccaagggtgctctccaaactgatgactagttcccagacttaacagaggtcaagcggagaaaaaggaaaactttctttagagaagaaaaagaaaaatcttatcacttctcatatttctttaggcagtgtatgagcttatttgctgatatcactaatcctgagatgaaaaacaggatggacttaagtaatttttaacctatttctgaggccaaaaagactgtagtattattttaatcaaatttatgcattttcagtgggacttcaaattttaataataaggcaatacttttatcttcttaaagtatatttcctgtacttataagtgtgcaaatgacataattttaaaattagttggaatattgaaaaaaattaaaatttcacttgtaaaataagtggatgtgcttatatccatttatttatttaagaaacacatgatgttttctgtgtcctgggcatggttctatgtgctttataaataaactcttttgatccatataacagtcttatgagataggtgccattataatcattttatagacagggaagctgagacacagaaaacagctaaaacagattaatgaattgctaagatataaccgaagtcaataaaattagcaaagtgctaacgtattaaattttccatttcattgcctctgtcctgaaaacagtattgctggtccaagtaacttgaacctacacttgacggctgctttatctgagattaaaaacatgcagaaggattgggcgcctgggtccctgacatttgggttcttgatcagttacgggaatctgtcttgcagcaagtctgtaagttacctttattagatttactaatctcaaaagaa

SEQ ID NO: 147330 - DNA, 742 bp, Homo sapiens
  Payload ID: 9141
  Gene Symbol: LACE1
  Gene Name: lactation elevated 1
  ENST ID: ENST00000437715
  CDS Start-End: 263-742
ctccctggcttccttcattcagttatatgttcatgaatgaatgaatgaatgtatattctgagtaaccaagagtgccagttttactgctctattcatgtattcgcactaaactgcacgattttcaaagagatgaggtcttgctatgttgccaaggctggagtgcagtggccattcacaggtatgatcatggtgctctgcagcctccaacttttggtttcaagggatcctcctgcctcagcctcccaagtagctgggactacagatgtgtgccactccacccagcctcaactttaaaaaattagcctatacggttcagacatccgagagcatgaccccaactgccacttcagagacttatttgaaagctttggccgtttgccatggacctctggaccactatgattttctgatcaaagctcatgagctaaaggatgatgaacatcaaagaagagtcatacagtgtttgcagaaattacacgaggaccttaaaggatacaatatagaggcagaaggccttttttcaaagcttttttcaaggagcaaacctccaaggggcctgtatgtttatggagatgttggtacaggaaaaacaatggtgatggacatgttttatgcttatgtggaaatgaagaggaaaaaacgggttcattttcatggtttcatgctagatgtgcacaaaagaatacatcgccttaaacagagtttgccaaaaaggaaaccaggattcatggctaaatcatat

SEQ ID NO: 147331 - DNA, 1741 bp, Homo sapiens
  Payload ID: 9141
  Gene Symbol: LACE1
  Gene Name: lactation elevated 1
  ENST ID: ENST00000421954
  CDS Start-End: 1-1049
ggaagcccttttggaaaggtacaggaaaaacaatggtgatggacatgttttatgcttatgtggaaatgaagaggaaaaaacgggttcattttcatggtttcatgctagatgtgcacaaaagaatacatcgccttaaacagagtttgccaaaaaggaaaccaggattcatggctaaatcatatgacccaatagctcccatagccgaagaaatcagcgaagaagcatgtctcctatgttttgatgaatttcaggtcactgacattgctgatgccatgattctgaaacagctttttgaaaatctgttcaaaaacggggtcgtcgttgtggcaacatccaacaggccaccggaagatctctataaaaatggactccaaagagctaactttgtaccattcatagcagtcttgaaggaatattgtaatacagtccagctagattctgggatagattaccggaaaagggaacttcctgctgcaggaaaactctactacctcacaagtgaagctgatgtggaggctgtcatggataagttgtttgatgagctggctcagaaacaaaatgatttaactagaccaaggattctaaaagtgcaaggcagagagctgcgcctgaataaagcctgtggaaccgttgccgactgcacatttgaagagctgtgtgagagaccacttggagccagtgactatttggaactatcaaagaattttgatacaatatttttacgaaacattccgcaatttactctggcaaacaggactcaaggtcgaagattcataactctcatcgataacttttatgatctcaaggtgcgtataatttgctctgcgtcgactcctatatcaagcttatttttgcatcaacatcatgacagtgagttggagcaaagcagaatactgatggatgatttggggctgagccaggattcagcagaaggactctccatgtttaccggagaagaggaaatctttgcatttcagcgcacaatttcccgactcacggaaatgcagactgaacagtactggaatgaaggagacagaaccaagaagtaactgccacttttgcataaataaaactctagacaaatggttaacgcaggcagaactccttattgtgggacttgaaggaatcattttctcatcattaattatgcactttgtcctctggaccattttaatctaaaattgctctcaaggatctagtggattagtaagttaaacacttaacattttttaggtctgctttttcttatttggccttatttctgcaccatgaaattaaaatcatctcattcctgaagatgaatgtaggaccagacattttagcttcacattaaaccacctgaatgaaccttgaatgcacaagtaaatgcaagacgtctggataccttcaagctttggctgcatggtggtggcatgttagaaatacatcttttataatgggggaagaatgccctatgtttcaattcaaaacaaagacagttttccaatctgatataaactaaaagggataatattttagaatatgggcttatatgtggtttttttttttggttatgaattacagtaaatctcccaggccttcagatttctacataatggaagaatatgtttttaaccctgagatcaagtttagtaggcaggacttgatctcaagtggtcacaaagttttctaaaaaaaaatagaaaattatgatgggatcaaataaggagcaagtgtcaaattccagccaacaggcagatct

SEQ ID NO: 147332 - DNA, 779 bp, Homo sapiens
  Payload ID: 9141
  Gene Symbol: LACE1
  Gene Name: lactation elevated 1
  ENST ID: ENST00000431865
  CDS Start-End: 1-242
gaatacatcgccttaaacagagtttgccaaaaaggaaaccaggattcatggctaaatcatatgacccaatagctcccatagccgaagaaatcagcgaagaagcatgtctcctatgttttgatgaatttcaggtcactgacattgctgatgccatgattctgaaacagctttttgaaaatctgttcaaaaacggggtcgtcgttgtggcaacatccaacaggccaccggaaggaatattgtaatacagtccagctagattctgggatagattaccggaaaagggaacttcctgctgcaggaaaactctactacctcacaagtgaagctgatgtggaggctgtcatggataagttgtttgatgagctggctcagaaacaaaatgatttaactagaccaaggattctaaaagtgcaaggcagagagctgcgcctgaataaagcctgtggaaccgttgccgactgcacatttgaagagctgtgtgagagaccacttggagccagtgactatttggaactatcaaagaattttgatacaatatttttacgaaacattccgcaatttactctggcaaacaggactcaaggtcgaagattcataactctcatcgataacttttatgatctcaaggtgcgtataatttgctctgcgtcgactcctatatcaagcttatttttgcatcaacatcatgacagtgagttggagcaaagcagaatactgatggatgatttggggctgagccaggattcagcagaaggactctccatgtttaccggagaaga

SEQ ID NO: 147333 - DNA, 2979 bp, Homo sapiens
  Payload ID: 9142
  Gene Symbol: LPO
  Gene Name: lactoperoxidase
  Uniprot ID: P22079
  ENST ID: ENST00000262290
  CDS Start-End: 317-2455
cagggcatgcagtttttgccttccggaactagatcaggatcatgcatttaagctagaaaatggaaagaggagttgcttcacccacagtcagtgctattgcatcaaccaatccctgccattctgcagtttcctggtgtatctgcccggagtcacacagtctttcctgctaagcctcagcgtctcctccaagccacatcaaaatctttccttctgggcctttcccagaagtgaattcttgctggaaggtataaaagaccagctcctccaagcagagcaactccctggctgccgtgaaaagacaaggcactgggcagtgatgagggtccttctccatctcccagccctcctggcttccctcatcttgcttcaggctgcagcatctaccacaagagcgcagactaccagaacctctgccatctccgatactgtgagtcaggccaaggtccaagtcaacaaggccttcctggactcccgaaccaggctgaagaccgccatgagctctgagactcccaccagccgacagctctcagaatacctcaagcatgccaaaggccggacgcgcacagccatccgcaatggacaggtgtgggaggagtctttaaagagactgaggcagaaggcatccttgaccaatgtcacagatcccagcctggacttgacttcactgtctctggaggtgggctgtggtgctcctgctcccgtggtgagatgcgacccgtgcagcccttaccgcaccattacgggagactgcaataacaggaggaagcctgcgctgggcgccgccaacagggctctggcgcgctggctgcccgcggagtacgaggacgggctctccctgcccttcggctggacgccggggaagacgcgcaacggcttccctctcccgctggcccgggaggtatctaacaagattgttggctatctgaatgaggagggtgttctggaccaaaacaggtccctgctcttcatgcagtggggtcagattgtggatcatgacctggactttgcccctgacaccgagctggggagtagcgagtactccaaagcccagtgtgatgagtactgtatccagggagacaactgcttccccatcatgttcccacccaatgaccccaaggcggggactcaagggaaatgcatgcctttcttccgagctgggttcgtctgccccactccaccctacaagtccctggcccgagagcagatcaacgctctgacctccttcctggatgccagctttgtgtacagctccgagccaagcctggccagccgcctccgcaacctcagcagccccctgggcctcatggctgtcaaccaggaggtctcagaccatggactaccctacctgccctatgacagcaagaagccaagcccctgtgagttcatcaacaccactgcccgtgtgccctgcttcctggcaggagattctcgagcctcagagcatattctgctggccacatcccacaccctctttctccgcgagcataaccggctggccagagaactaaagagactcaaccctcagtgggatggagagaagctctaccaggaagcccggaaaatcctgggagccttcgtgcagattatcacctttagggactacctacccattttgctaggtgaccacatgcagaagtggatacccccatatcaaggctacagtgaatctgtggatcccagaatttccaatgtcttcaccttcgccttccgctttggccacttggaggtcccctctagtatgttccgcctggatgagaattatcagccatgggggccagaaccagaactccccctccacaccctcttcttcaacacttggaggatggtcaaagatggtggaattgatcctctggtgcggggcctgctggccaagaaatccaagctgatgaaacagaataaaatgatgactggagagctgcgcaacaagcttttccagccaactcacaggatccatggctttgacctggctgccatcaacacacagcgttgccgggaccatgggcaacctgggtacaattcctggagagccttctgtgacctctcacagccgcagacactagaggagttgaacacagtgctgaagagcaagatgctggccaagaagttactgggtctctacgggacccctgacaacatcgacatctggataggggccattgctgagccgctggtggaaaggggtcgggtggggcctctcctggcctgcctcttgggcaagcagttccagcagatccgtgatggagacaggttctggtgggaaaaccctggggtcttcacgaacgagcagaaggactctctacagaaaatgtccttctcacgccttgtctgtgacaacacccgcatcaccaaggtcccacgggacccattctgggccaacagctacccctatgacttcgtggattgctcagccatcgacaagctggacctgtcaccctgggcctcagtgaagaattaggggcccgcgctgcacaggaaagttccctttggtccacagggccatttcaagcaagttcaatgacctggtcccttagagctccatatcccagtcccagcccttctttgcagctgggcctctctatacccctggatgaacagcttgctcaggccccagggtggctgcctcggccctcccagctcttacactcagctccagtggcttctcctttctgtcaagacttagccccgctgagatgcccttctgctccagcttgctggatgttacctgtcctcttccctccacaagtcttggcccttaacctttatctttcttcctgtcctctcacctagattgtaagctccctgggccaggacttcagcctgcctccgagggtcccctgtggcacctagcatggtgcacagcacattagaagtgctcaaaaacatctgatgactgactaaagatgctaggcgtgacaccgttccctccaaaagcagacctcggaatcactgccaaataagtaactagacgtttacaggcca

SEQ ID NO: 147334 - DNA, 1942 bp, Homo sapiens
  Payload ID: 9142
  Gene Symbol: LPO
  Gene Name: lactoperoxidase
  ENST ID: ENST00000389576
  CDS Start-End: 1-354
ttcccacccaatgaccccaaggcggggactcaagggaaatgcatgcctttcttccgagctgggttcgtctgccccactccaccctacaagtccctggcccgagagcagatcaacgctctgacctccttcctggatgccagctttgtgtacagctccgagccaagcctggccagccgcctccgcaacctcagcagccccctgggcctcatggctgtcaaccaggaggtctcagaccatggactaccctacctgccctatgacagcaagaagccaagcccctgtgagttcatcaacaccactgcccgtgtgccctgcttcctggcaggtaaggagaccgaggctcagaagtgttaagtaacttgtccaaggtcacacagctaaaaagagattctcgagcctcagagcatattctgctggccacatcccacaccctctttctccgcgagcataaccggctggccagagaactaaagagactcaaccctcagtgggatggagagaagctctaccaggaagcccggaaaatcctgggagccttcgtgcagattatcacctttagggactacctacccattttgctaggtgaccacatgcagaagtggatacccccatatcaaggctacagtgaatctgtggatcccagaatttccaatgtcttcaccttcgccttccgctttggccacttggaggtcccctctagtatgttccgcctggatgagaattatcagccatgggggccagaaccagaactccccctccacaccctcttcttcaacacttggaggatggtcaaagatggtggaattgatcctctggtgcggggcctgctggccaagaaatccaagctgatgaaacagaataaaatgatgactggagagctgcgcaacaagcttttccagccaactcacaggatccatggctttgacctggctgccatcaacacacagcgttgccgggaccatgggcaacctgggtacaattcctggagagccttctgtgacctctcacagccgcagacactagaggagttgaacacagtgctgaagagcaagatgctggccaagaagttactgggtctctacgggacccctgacaacatcgacatctggataggggccattgctgagccgctggtggaaaggggtcgggtggggcctctcctggcctgcctcttgggcaagcagttccagcagatccgtgatggagacaggttctggtgggaaaaccctggggtcttcacgaacgagcagaaggactctctacagaaaatgtccttctcacgccttgtctgtgacaacacccgcatcaccaaggtcccacgggacccattctgggccaacagctacccctatgacttcgtggattgctcagccatcgacaagctggacctgtcaccctgggcctcagtgaagaattaggggcccgcgctgcacaggaaagttccctttggtccacagggccatttcaagcaagttcaatgacctggtcccttagagctccatatcccagtcccagcccttctttgcagctgggcctctctatacccctggatgaacagcttgctcaggccccagggtggctgcctcggccctcccagctcttacactcagctccagtggcttctcctttctgtcaagacttagccccgctgagatgcccttctgctccagcttgctggatgttacctgtcctcttccctccacaagtcttggcccttaacctttatctttcttcctgtcctctcacctagattgtaagctccctgggccaggacttcagcctgcctccgagggtcccctgtggcacctagcatggtgcacagcacattagaagtgctcaaaaacatctgatgactgactaaagatgctaggcgtgacaccgttccctccaaaagcagacctcggaatcactgccaaataagtaactagacgtttacaggcca

SEQ ID NO: 147335 - DNA, 2729 bp, Homo sapiens
  Payload ID: 9142
  Gene Symbol: LPO
  Gene Name: lactoperoxidase
  Uniprot ID: P22079
  ENST ID: ENST00000421678
  CDS Start-End: 317-2206
cagggcatgcagtttttgccttccggaactagatcaggatcatgcatttaagctagaaaatggaaagaggagttgcttcacccacagtcagtgctattgcatcaaccaatccctgccattctgcagtttcctggtgtatctgcccggagtcacacagtctttcctgctaagcctcagcgtctcctccaagccacatcaaaatctttccttctgggcctttcccagaagtgaattcttgctggaaggtataaaagaccagctcctccaagcagagcaactccctggctgccgtgaaaagacaaggcactgggcagtgatgagggtccttctccatctcccagccctcctggcttccctcatcttgcttcaggctgcagcatctaccacaagagatcccagcctggacttgacttcactgtctctggaggtgggctgtggtgctcctgctcccgtggtgagatgcgacccgtgcagcccttaccgcaccattacgggagactgcaataacaggaggaagcctgcgctgggcgccgccaacagggctctggcgcgctggctgcccgcggagtacgaggacgggctctccctgcccttcggctggacgccggggaagacgcgcaacggcttccctctcccgctggcccgggaggtatctaacaagattgttggctatctgaatgaggagggtgttctggaccaaaacaggtccctgctcttcatgcagtggggtcagattgtggatcatgacctggactttgcccctgacaccgagctggggagtagcgagtactccaaagcccagtgtgatgagtactgtatccagggagacaactgcttccccatcatgttcccacccaatgaccccaaggcggggactcaagggaaatgcatgcctttcttccgagctgggttcgtctgccccactccaccctacaagtccctggcccgagagcagatcaacgctctgacctccttcctggatgccagctttgtgtacagctccgagccaagcctggccagccgcctccgcaacctcagcagccccctgggcctcatggctgtcaaccaggaggtctcagaccatggactaccctacctgccctatgacagcaagaagccaagcccctgtgagttcatcaacaccactgcccgtgtgccctgcttcctggcaggagattctcgagcctcagagcatattctgctggccacatcccacaccctctttctccgcgagcataaccggctggccagagaactaaagagactcaaccctcagtgggatggagagaagctctaccaggaagcccggaaaatcctgggagccttcgtgcagattatcacctttagggactacctacccattttgctaggtgaccacatgcagaagtggatacccccatatcaaggctacagtgaatctgtggatcccagaatttccaatgtcttcaccttcgccttccgctttggccacttggaggtcccctctagtatgttccgcctggatgagaattatcagccatgggggccagaaccagaactccccctccacaccctcttcttcaacacttggaggatggtcaaagatggtggaattgatcctctggtgcggggcctgctggccaagaaatccaagctgatgaaacagaataaaatgatgactggagagctgcgcaacaagcttttccagccaactcacaggatccatggctttgacctggctgccatcaacacacagcgttgccgggaccatgggcaacctgggtacaattcctggagagccttctgtgacctctcacagccgcagacactagaggagttgaacacagtgctgaagagcaagatgctggccaagaagttactgggtctctacgggacccctgacaacatcgacatctggataggggccattgctgagccgctggtggaaaggggtcgggtggggcctctcctggcctgcctcttgggcaagcagttccagcagatccgtgatggagacaggttctggtgggaaaaccctggggtcttcacgaacgagcagaaggactctctacagaaaatgtccttctcacgccttgtctgtgacaacacccgcatcaccaaggtcccacgggacccattctgggccaacagctacccctatgacttcgtggattgctcagccatcgacaagctggacctgtcaccctgggcctcagtgaagaattaggggcccgcgctgcacaggaaagttccctttggtccacagggccatttcaagcaagttcaatgacctggtcccttagagctccatatcccagtcccagcccttctttgcagctgggcctctctatacccctggatgaacagcttgctcaggccccagggtggctgcctcggccctcccagctcttacactcagctccagtggcttctcctttctgtcaagacttagccccgctgagatgcccttctgctccagcttgctggatgttacctgtcctcttccctccacaagtcttggcccttaacctttatctttcttcctgtcctctcacctagattgtaagctccctgggccaggacttcagcctgcctccgagggtcccctgtggcacctagcatggtgcacagcacattagaagtgctcaaaaacatctgatgactgactaaagatgctaggcgtgacaccgttccctccaaaagcagacctcggaatcactgccaaataagtaactagacgtttacaggcc

SEQ ID NO: 147336 - DNA, 2350 bp, Homo sapiens
  Payload ID: 9142
  Gene Symbol: LPO
  Gene Name: lactoperoxidase
  ENST ID: ENST00000543544
  CDS Start-End: 241-2202
gctaagcctcagcgtctcctccaagccacatcaaaatctttccttctgggcctttcccagaagtgaattcttgctggaaggtataaaagaccagctcctccaagcagagcaactccctggctgccgtgaaaagacaaggcactgggcagtgatgagggtccttctccatctcccagccctcctggcttccctcatcttgcttcaggctgcagcatctaccacaagaggctgaagaccgccatgagctctgagactcccaccagccgacagctctcagaatacctcaagcatgccaaaggccggacgcgcacagccatccgcaatggacaggtgtgggaggagtctttaaagagactgaggcagaaggcatccttgaccaatgtcacagatcccagcctggacttgacttcactgtctctggaggtgggctgtggtgctcctgctcccgtggtgagatgcgacccgtgcagcccttaccgcaccattacgggagactgcaataacaggaggaagcctgcgctgggcgccgccaacagggctctggcgcgctggctgcccgcggagtacgaggacgggctctccctgcccttcggctggacgccggggaagacgcgcaacggcttccctctcccgctggcccgggaggtatctaacaagattgttggctatctgaatgaggagggtgttctggaccaaaacaggtccctgctcttcatgcagtggggtcagattgtggatcatgacctggactttgcccctgacaccgagctggggagtagcgagtactccaaagcccagtgtgatgagtactgtatccagggagacaactgcttccccatcatgttcccacccaatgaccccaaggcggggactcaagggaaatgcatgcctttcttccgagctgggttcgtctgccccactccaccctacaagtccctggcccgagagcagatcaacgctctgacctccttcctggatgccagctttgtgtacagctccgagccaagcctggccagccgcctccgcaacctcagcagccccctgggcctcatggctgtcaaccaggaggtctcagaccatggactaccctacctgccctatgacagcaagaagccaagcccctgtgagttcatcaacaccactgcccgtgtgccctgcttcctggcaggagattctcgagcctcagagcatattctgctggccacatcccacaccctctttctccgcgagcataaccggctggccagagaactaaagagactcaaccctcagtgggatggagagaagctctaccaggaagcccggaaaatcctgggagccttcgtgcagattatcacctttagggactacctacccattttgctaggtgaccacatgcagaagtggatacccccatatcaaggctacagtgaatctgtggatcccagaatttccaatgtcttcaccttcgccttccgctttggccacttggaggtcccctctagtatgttccgcctggatgagaattatcagccatgggggccagaaccagaactccccctccacaccctcttcttcaacacttggaggatggtcaaagatggtggaattgatcctctggtgcggggcctgctggccaagaaatccaagctgatgaaacagaataaaatgatgactggagagctgcgcaacaagcttttccagccaactcacaggatccatggctttgacctggctgccatcaacacacagcgttgccgggaccatgggcaacctgggtacaattcctggagagccttctgtgacctctcacagccgcagacactagaggagttgaacacagtgctgaagagcaagatgctggccaagaagttactgggtctctacgggacccctgacaacatcgacatctggataggggccattgctgagccgctggtggaaaggggtcgggtggggcctctcctggcctgcctcttgggcaagcagttccagcagatccgtgatggagacaggttctggtgggaaaaccctggggtcttcacgaacgagcagaaggactctctacagaaaatgtccttctcacgccttgtctgtgacaacacccgcatcaccaaggtcccacgggacccattctgggccaacagctacccctatgacttcgtggattgctcagccatcgacaagctggacctgtcaccctgggcctcagtgaagaattaggggcccgcgctgcacaggaaagttccctttggtccacagggccatttcaagcaagttcaatgacctggtcccttagagctccatatcccagtcccagcccttctttgcagctgggcctctctatacccctggatgaacagcttgctca

SEQ ID NO: 147337 - DNA, 1970 bp, Homo sapiens
  Payload ID: 9142
  Gene Symbol: LPO
  Gene Name: lactoperoxidase
  ENST ID: ENST00000580890
  CDS Start-End: 1-288
ggctgtggtgctcctgctcccgtggtgagatgcgacccgtgcagcccttaccgcaccattacgggagactgcaataacaggaggaagcctgcgctgggcgccgccaacagggctctggcgcgctggctgcccgcggagtacgaggacgggctctccctgcccttcggctggacgccggggaagacgcgcaacggcttccctctcccgctggcccgggaggtatctaacaagattgttggctatctgaatgaggagggtgttctggaccaaaacagatcaacgctctgacctccttcctggatgccagctttgtgtacagctccgagccaagcctggccagccgcctccgcaacctcagcagccccctgggcctcatggctgtcaaccaggaggtctcagaccatggactaccctacctgccctatgacagcaagaagccaagcccctgtgagttcatcaacaccactgcccgtgtgccctgcttcctggcaggagattctcgagcctcagagcatattctgctggccacatcccacaccctctttctccgcgagcataaccggctggccagagaactaaagagactcaaccctcagtgggatggagagaagctctaccaggaagcccggaaaatcctgggagccttcgtgcagattatcacctttagggactacctacccattttgctaggtgaccacatgcagaagtggatacccccatatcaaggctacagtgaatctgtggatcccagaatttccaatgtcttcaccttcgccttccgctttggccacttggaggtcccctctagtatgttccgcctggatgagaattatcagccatgggggccagaaccagaactccccctccacaccctcttcttcaacacttggaggatggtcaaagatggtggaattgatcctctggtgcggggcctgctggccaagaaatccaagctgatgaaacagaataaaatgatgactggagagctgcgcaacaagcttttccagccaactcacaggatccatggctttgacctggctgccatcaacacacagcgttgccgggaccatgggcaacctgggtacaattcctggagagccttctgtgacctctcacagccgcagacactagaggagttgaacacagtgctgaagagcaagatgctggccaagaagttactgggtctctacgggacccctgacaacatcgacatctggataggggccattgctgagccgctggtggaaaggggtcgggtggggcctctcctggcctgcctcttgggcaagcagttccagcagatccgtgatggagacaggttctggtgggaaaaccctggggtcttcacgaacgagcagaaggactctctacagaaaatgtccttctcacgccttgtctgtgacaacacccgcatcaccaaggtcccacgggacccattctgggccaacagctacccctatgacttcgtggattgctcagccatcgacaagctggacctgtcaccctgggcctcagtgaagaattaggggcccgcgctgcacaggaaagttccctttggtccacagggccatttcaagcaagttcaatgacctggtcccttagagctccatatcccagtcccagcccttctttgcagctgggcctctctatacccctggatgaacagcttgctcaggccccagggtggctgcctcggccctcccagctcttacactcagctccagtggcttctcctttctgtcaagacttagccccgctgagatgcccttctgctccagcttgctggatgttacctgtcctcttccctccacaagtcttggcccttaacctttatctttcttcctgtcctctcacctagattgtaagctccctgggccaggacttcagcctgcctccgagggtcccctgtggcacctagcatggtgcacagcacattagaagtgctcaaaaacatctgatgactgactaaa

SEQ ID NO: 147338 - DNA, 2680 bp, Homo sapiens
  Payload ID: 9142
  Gene Symbol: LPO
  Gene Name: lactoperoxidase
  Uniprot ID: P22079
  ENST ID: ENST00000582328
  CDS Start-End: 559-2448
actacatttggccacaattctgattagtatcataattagtattagatggcacatcaccaccgtaacacccactggcagttggctgaggcctaaaagtggccaagtctatgaggtccttcccgagctcggcagcaggctgataatgaagaaagttgcttgatgtgattctttgcaggtggactctgtcaagaaaagcccaaaatattcgttaccagacacgcaaccaggagatgaacacaaagcaaggatgggggaaacaaaacagaggaggctggagtgcaatggcatgatcttggctcactgcaacccctgcctcccaggttcaagtgattctcccacctcagcctcccaggtagctgggattacagtttcctggtgtatctgcccggagtcacacagtctttcctgctaagcctcagcgtctcctccaagccacatcaaaatctttccttctgggcctttcccagaagtgaattcttgctggaaggtataaaagaccagctcctccaagcagagcaactccctggctgccgtgaaaagacaaggcactgggcagtgatgagggtccttctccatctcccagccctcctggcttccctcatcttgcttcaggctgcagcatctaccacaagagatcccagcctggacttgacttcactgtctctggaggtgggctgtggtgctcctgctcccgtggtgagatgcgacccgtgcagcccttaccgcaccattacgggagactgcaataacaggaggaagcctgcgctgggcgccgccaacagggctctggcgcgctggctgcccgcggagtacgaggacgggctctccctgcccttcggctggacgccggggaagacgcgcaacggcttccctctcccgctggcccgggaggtatctaacaagattgttggctatctgaatgaggagggtgttctggaccaaaacaggtccctgctcttcatgcagtggggtcagattgtggatcatgacctggactttgcccctgacaccgagctggggagtagcgagtactccaaagcccagtgtgatgagtactgtatccagggagacaactgcttccccatcatgttcccacccaatgaccccaaggcggggactcaagggaaatgcatgcctttcttccgagctgggttcgtctgccccactccaccctacaagtccctggcccgagagcagatcaacgctctgacctccttcctggatgccagctttgtgtacagctccgagccaagcctggccagccgcctccgcaacctcagcagccccctgggcctcatggctgtcaaccaggaggtctcagaccatggactaccctacctgccctatgacagcaagaagccaagcccctgtgagttcatcaacaccactgcccgtgtgccctgcttcctggcaggagattctcgagcctcagagcatattctgctggccacatcccacaccctctttctccgcgagcataaccggctggccagagaactaaagagactcaaccctcagtgggatggagagaagctctaccaggaagcccggaaaatcctgggagccttcgtgcagattatcacctttagggactacctacccattttgctaggtgaccacatgcagaagtggatacccccatatcaaggctacagtgaatctgtggatcccagaatttccaatgtcttcaccttcgccttccgctttggccacttggaggtcccctctagtatgttccgcctggatgagaattatcagccatgggggccagaaccagaactccccctccacaccctcttcttcaacacttggaggatggtcaaagatggtggaattgatcctctggtgcggggcctgctggccaagaaatccaagctgatgaaacagaataaaatgatgactggagagctgcgcaacaagcttttccagccaactcacaggatccatggctttgacctggctgccatcaacacacagcgttgccgggaccatgggcaacctgggtacaattcctggagagccttctgtgacctctcacagccgcagacactagaggagttgaacacagtgctgaagagcaagatgctggccaagaagttactgggtctctacgggacccctgacaacatcgacatctggataggggccattgctgagccgctggtggaaaggggtcgggtggggcctctcctggcctgcctcttgggcaagcagttccagcagatccgtgatggagacaggttctggtgggaaaaccctggggtcttcacgaacgagcagaaggactctctacagaaaatgtccttctcacgccttgtctgtgacaacacccgcatcaccaaggtcccacgggacccattctgggccaacagctacccctatgacttcgtggattgctcagccatcgacaagctggacctgtcaccctgggcctcagtgaagaattaggggcccgcgctgcacaggaaagttccctttggtccacagggccatttcaagcaagttcaatgacctggtcccttagagctccatatcccagtcccagcccttctttgcagctgggcctctctatacccctggatgaacagcttgctcaggccccagggtggctgcctcggccctcccagctcttacactcagctccagtggcttctcctttctgtcaagacttagccccgct

SEQ ID NO: 147339 - DNA, 585 bp, Homo sapiens
  Payload ID: 9142
  Gene Symbol: LPO
  Gene Name: lactoperoxidase
  ENST ID: ENST00000581008
  CDS Start-End: 217-585
cgtgaaaagacaaggcactgggcagggtgtctggtgctcctttggctttctctgctttctgtggttcaaaccctcccacttggtctctagagaggctcacagtgtgatcctgcatctcgtttcagtgatgagggtccttctccatctcccagccctcctggcttccctcatcttgcttcaggctgcagcatctaccacaagaggctgaagaccgccatgagctctgagactcccaccagccgacagctctcagaatacctcaagcatgccaaaggccggacgcgcacagccatccgcaatggacaggtgtgggaggagtctttaaagagactgaggcagaaggcatccttgaccaatgtcacagatcccagcctggacttgacttcactgtctctggaggtgggctgtggtgctcctgctcccgtggtgagatgcgacccgtgcagcccttaccgcaccattacgggagactgcaataacaggaggaagcctgcgctgggcgccgccaacagggctctggcgcgctggctgcccgcggagtacgaggacgggctctccctgcccttcggctggacgccggggaag

SEQ ID NO: 147340 - DNA, 2979 bp, Homo sapiens
  Payload ID: 9143
  Gene Symbol: LTF
  Gene Name: lactotransferrin
  Uniprot ID: P02788
  ENST ID: ENST00000231751
  CDS Start-End: 297-2429
gactcctaggggcttgcagactagtgggagagaaagaacatcgcagcagccaggcagaaccaggacaggtgaggtgcaggctggctttcctctcgcagcgcggtgtggagtcctgtcctgcctcagggcttttcggagcctggatcctcaaggaacaagtagacctggccgcggggagtggggagggaaggggtgtctattgggcaacagggcggggcaaagccctgaataaaggggcgcagggcaggcgcaagtggcagagccttcgtttgccaagtcgcctccagaccgcagacatgaaacttgtcttcctcgtcctgctgttcctcggggccctcggactgtgtctggctggccgtaggaggagtgttcagtggtgcgccgtatcccaacccgaggccacaaaatgcttccaatggcaaaggaatatgagaaaagtgcgtggccctcctgtcagctgcataaagagagactcccccatccagtgtatccaggccattgcggaaaacagggccgatgctgtgacccttgatggtggtttcatatacgaggcaggcctggccccctacaaactgcgacctgtagcggcggaagtctacgggaccgaaagacagccacgaactcactattatgccgtggctgtggtgaagaagggcggcagctttcagctgaacgaactgcaaggtctgaagtcctgccacacaggccttcgcaggaccgctggatggaatgtccctatagggacacttcgtccattcttgaattggacgggtccacctgagcccattgaggcagctgtggccaggttcttctcagccagctgtgttcccggtgcagataaaggacagttccccaacctgtgtcgcctgtgtgcggggacaggggaaaacaaatgtgccttctcctcccaggaaccgtacttcagctactctggtgccttcaagtgtctgagagacggggctggagacgtggcttttatcagagagagcacagtgtttgaggacctgtcagacgaggctgaaagggacgagtatgagttactctgcccagacaacactcggaagccagtggacaagttcaaagactgccatctggcccgggtcccttctcatgccgttgtggcacgaagtgtgaatggcaaggaggatgccatctggaatcttctccgccaggcacaggaaaagtttggaaaggacaagtcaccgaaattccagctctttggctcccctagtgggcagaaagatctgctgttcaaggactctgccattgggttttcgagggtgcccccgaggatagattctgggctgtaccttggctccggctacttcactgccatccagaacttgaggaaaagtgaggaggaagtggctgcccggcgtgcgcgggtcgtgtggtgtgcggtgggcgagcaggagctgcgcaagtgtaaccagtggagtggcttgagcgaaggcagcgtgacctgctcctcggcctccaccacagaggactgcatcgccctggtgctgaaaggagaagctgatgccatgagtttggatggaggatatgtgtacactgcaggcaaatgtggtttggtgcctgtcctggcagagaactacaaatcccaacaaagcagtgaccctgatcctaactgtgtggatagacctgtggaaggatatcttgctgtggcggtggttaggagatcagacactagccttacctggaactctgtgaaaggcaagaagtcctgccacaccgccgtggacaggactgcaggctggaatatccccatgggcctgctcttcaaccagacgggctcctgcaaatttgatgaatatttcagtcaaagctgtgcccctgggtctgacccgagatctaatctctgtgctctgtgtattggcgacgagcagggtgagaataagtgcgtgcccaacagcaacgagagatactacggctacactggggctttccggtgcctggctgagaatgctggagacgttgcatttgtgaaagatgtcactgtcttgcagaacactgatggaaataacaatgaggcatgggctaaggatttgaagctggcagactttgcgctgctgtgcctcgatggcaaacggaagcctgtgactgaggctagaagctgccatcttgccatggccccgaatcatgccgtggtgtctcggatggataaggtggaacgcctgaaacaggtgttgctccaccaacaggctaaatttgggagaaatggatctgactgcccggacaagttttgcttattccagtctgaaaccaaaaaccttctgttcaatgacaacactgagtgtctggccagactccatggcaaaacaacatatgaaaaatatttgggaccacagtatgtcgcaggcattactaatctgaaaaagtgctcaacctcccccctcctggaagcctgtgaattcctcaggaagtaaaaccgaagaagatggcccagctccccaagaaagcctcagccattcactgcccccagctcttctccccaggtgtgttggggccttggcctcccctgctgaaggtggggattgcccatccatctgcttacaattccctgctgtcgtcttagcaagaagtaaaatgagaaattttgttgatattctctccttataaagtgtcactcatcttttctagaattttatactgaaatcacatgcctgacaaaatacctgtacagttggaccttcccttccaagtttttcaggtccagcccctcctctttcttgcagtcttgggtatgatgcccaagggtctggaatttaaggccaggccaagcaccggttttcctaaggggatcttgttggttattcacatagctgtctcagtgcacgtgcatgtatgtgcctgggagtgtgtgcgtgtccccaaggcagggcaggaagagcaagcataggaattataactgaaatgtaggttcagttgctcatcacttgcagagtctaattaacaagagctaggtttggtataaag

SEQ ID NO: 147341 - DNA, 584 bp, Homo sapiens
  Payload ID: 9143
  Gene Symbol: LTF
  Gene Name: lactotransferrin
  ENST ID: ENST00000431944
  CDS Start-End: 39-584
agagccttcgtttgccaagtcgcctccagaccgcagacatgaaacttgtcttcctcgtcctgctgttcctcggggccctcggttttttgtggatgccttttatcaggcaaccaggactgtgtctggctggccgtaggaggagtgttcagtggtgcgccgtatcccaacccgaggccacaaaatgcttccaatggcaaaggaatatgagaaaagtgcgtggccctcctgtcagctgcataaagagagactcccccatccagtgtatccaggccattgcggaaaacagggccgatgctgtgacccttgatggtggtttcatatacgaggcaggcctggccccctacaaactgcgacctgtagcggcggaagtctacgggaccgaaagacagccacgaactcactattatgccgtggctgtggtgaagaagggcggcagctttcagctgaacgaactgcaaggtctgaagtcctgccacacaggccttcgcaggaccgctggatggaatgtccctatagggacacttcgtccattcttgaattggacgggtccacctgagcccattgaggcagctgtggccaggttc

SEQ ID NO: 147342 - DNA, 2656 bp, Homo sapiens
  Payload ID: 9143
  Gene Symbol: LTF
  Gene Name: lactotransferrin
  ENST ID: ENST00000443496
  CDS Start-End: 569-2656
acgtggccttcacagctggcctgagtgagcacagcgggcactgaggggaacaaagcgtgggggccctccagcagcccttatcatcacctgccagccacctgcctcaggctgggcaggctgcaccctgggctttctgctattggcttcccagatccctggaactccagctggggccctgggctgtggtctgacttgatccagaatttaatgagtagaaggaatggaagaaggctcattcccccagccctggacacagacagcagacacagaggcctccagcacagtgaagcctgtggagcagtcccctccagaatgcaaccttgtaggagggcagcaccatgggccagcaactcagggtgatcagcaaataaatgatcaatactaagacaccaaggccctaagaagtcactggatggggtcccgggtggatttctagctctactgtccactggctgtgagaccatgaacagggtgcattgcccaagtccactcagctggaaacaggctctttgagatctgacccaactcctggcacgttggagatgtcccatagaccagtgttgaatgaatgggactgtgtctggctggccgtaggaggagtgttcagtggtgcgccgtatcccaacccgaggccacaaaatgcttccaatggcaaaggaatatgagaaaagtgcgtggccctcctgtcagctgcataaagagagactcccccatccagtgtatccaggccattgcggaaaacagggccgatgctgtgacccttgatggtggtttcatatacgaggcaggcctggccccctacaaactgcgacctgtagcggcggaagtctacgggaccgaaagacagccacgaactcactattatgccgtggctgtggtgaagaagggcggcagctttcagctgaacgaactgcaaggtctgaagtcctgccacacaggccttcgcaggaccgctggatggaatgtccctatagggacacttcgtccattcttgaattggacgggtccacctgagcccattgaggcagctgtggccaggttcttctcagccagctgtgttcccggtgcagataaaggacagttccccaacctgtgtcgcctgtgtgcggggacaggggaaaacaaatgtgccttctcctcccaggaaccgtacttcagctactctggtgccttcaagtgtctgagagacggggctggagacgtggcttttatcagagagagcacagtgtttgaggacctgtcagacgaggctgaaagggacgagtatgagttactctgcccagacaacactcggaagccagtggacaagttcaaagactgccatctggcccgggtcccttctcatgccgttgtggcacgaagtgtgaatggcaaggaggatgccatctggaatcttctccgccaggcacaggaaaagtttggaaaggacaagtcaccgaaattccagctctttggctcccctagtgggcagaaagatctgctgttcaaggactctgccattgggttttcgagggtgcccccgaggatagattctgggctgtaccttggctccggctacttcactgccatccagaacttgaggaaaagtgaggaggaagtggctgcccggcgtgcgcgggtcgtgtggtgtgcggtgggcgagcaggagctgcgcaagtgtaaccagtggagtggcttgagcgaaggcagcgtgacctgctcctcggcctccaccacagaggactgcatcgccctggtgctgaaaggagaagctgatgccatgagtttggatggaggatatgtgtacactgcaggcaaatgtggtttggtgcctgtcctggcagagaactacaaatcccaacaaagcagtgaccctgatcctaactgtgtggatagacctgtggaaggatatcttgctgtggcggtggttaggagatcagacactagccttacctggaactctgtgaaaggcaagaagtcctgccacaccgccgtggacaggactgcaggctggaatatccccatgggcctgctcttcaaccagacgggctcctgcaaatttgatgaatatttcagtcaaagctgtgcccctgggtctgacccgagatctaatctctgtgctctgtgtattggcgacgagcagggtgagaataagtgcgtgcccaacagcaacgagagatactacggctacactggggctttccggtgcctggctgagaatgctggagacgttgcatttgtgaaagatgtcactgtcttgcagaacactgatggaaataacaatgaggcatgggctaaggatttgaagctggcagactttgcgctgctgtgcctcgatggcaaacggaagcctgtgactgaggctagaagctgccatcttgccatggccccgaatcatgccgtggtgtctcggatggataaggtggaacgcctgaaacaggtgttgctccaccaacaggctaaatttgggagaaatggatctgactgcccggacaagttttgcttattccagtctgaaaccaaaaaccttctgttcaatgacaacactgagtgtctggccagactccatggcaaaacaacatatgaaaaatatttgggaccacagtatgtcgcaggcattactaatctgaaaaagtgctcaacctcccccctcctggaagcctgtgaattcctcagg

SEQ ID NO: 147343 - DNA, 2130 bp, Homo sapiens
  Payload ID: 9143
  Gene Symbol: LTF
  Gene Name: lactotransferrin
  ENST ID: ENST00000417439
  CDS Start-End: 2-2128
catgaaacttgtcttcctcgtcctgctgttcctcggggccctcggactgtgtctggctggccgtaggaggagtgttcagtggtgcgccgtatcccaacccgaggccacaaaatgcttccaatggcaaaggaatatgagaaaagtgcgtggccctcctgtcagctgcataaagagagactcccccatccagtgtatccaggccattgcggaaaacagggccgatgctgtgacccttgatggtggtttcatatacgaggcaggcctggccccctacaaactgcgacctgtagcggcggaagtctacgggaccgaaagacagccacgaactcactattatgccgtggctgtggtgaagaagggcggcagctttcagctgaacgaactgcaaggtctgaagtcctgccacacaggccttcgcaggaccgctggatggaatgtccctatagggacacttcgtccattcttgaattggacgggtccacctgagcccattgaggcagctgtggccaggttcttctcagccagctgtgttcccggtgcagataaaggacagttccccaacctgtgtcgcctgtgtgcggggacaggggaaaacaaatgtgccttctcctcccaggaaccgtacttcagctactctggtgccttcaagtgtctgagagacggggctggagacgtggcttttatcagagagagcacagtgtttgaggacctgtcagacgaggctgaaagggacgagtatgagttactctgcccagacaacactcggaagccagtggacaagttcaaagactgccatctggcccgggtcccttctcatgccgttgtggcacgaagtgtgaatggcaaggaggatgccatctggaatcttctccgccaggcacaggaaaagtttggaaaggacaagtcaccgaaattccagctctttggctcccctagtgggcagaaagatctgctgttcaaggactctgccattgggttttcgagggtgcccccgaggatagattctgggctgtaccttggctccggctacttcactgccatccagaacttgaggaaaagtgaggaggaagtggctgcccggcgtgcgcgggtcgtgtggtgtgcggtgggcgagcaggagctgcgcaagtgtaaccagtggagtggcttgagcgaaggcagcgtgacctgctcctcggcctccaccacagaggactgcatcgccctgaaaggagaagctgatgccatgagtttggatggaggatatgtgtacactgcaggcaaatgtggtttggtgcctgtcctggcagagaactacaaatcccaacaaagcagtgaccctgatcctaactgtgtggatagacctgtggaaggatatcttgctgtggcggtggttaggagatcagacactagccttacctggaactctgtgaaaggcaagaagtcctgccacaccgccgtggacaggactgcaggctggaatatccccatgggcctgctcttcaaccagacgggctcctgcaaatttgatgaatatttcagtcaaagctgtgcccctgggtctgacccgagatctaatctctgtgctctgtgtattggcgacgagcagggtgagaataagtgcgtgcccaacagcaacgagagatactacggctacactggggctttccggtgcctggctgagaatgctggagacgttgcatttgtgaaagatgtcactgtcttgcagaacactgatggaaataacaatgaggcatgggctaaggatttgaagctggcagactttgcgctgctgtgcctcgatggcaaacggaagcctgtgactgaggctagaagctgccatcttgccatggccccgaatcatgccgtggtgtctcggatggataaggtggaacgcctgaaacaggtgttgctccaccaacaggctaaatttgggagaaatggatctgactgcccggacaagttttgcttattccagtctgaaaccaaaaaccttctgttcaatgacaacactgagtgtctggccagactccatggcaaaacaacatatgaaaaatatttgggaccacagtatgtcgcaggcattactaatctgaaaaagtgctcaacctcccccctcctggaagcctgtgaattcctcaggaagtaaaa

SEQ ID NO: 147344 - DNA, 2494 bp, Homo sapiens
  Payload ID: 9143
  Gene Symbol: LTF
  Gene Name: lactotransferrin
  Uniprot ID: P02788
  ENST ID: ENST00000426532
  CDS Start-End: 318-2318
gtccaggattctggctcagagttgcaccactgggttttatattcacttggatctttagttgttttggcgcctactgaggtctgaagtttgaatcctgcagtcaattgggatggtggcttgtaccccaaagtgccattgcaacccttgtccttcctgaggaaagggtggcagttgccctgtggaattcctgccctgctccccgtgggtgtccaggctgacagaagttgggactgtgtctggctggccgtaggaggagtgttcagtggtgcgccgtatcccaacccgaggccacaaaatgcttccaatggcaaaggaatatgagaaaagtgcgtggccctcctgtcagctgcataaagagagactcccccatccagtgtatccaggccattgcggaaaacagggccgatgctgtgacccttgatggtggtttcatatacgaggcaggcctggccccctacaaactgcgacctgtagcggcggaagtctacgggaccgaaagacagccacgaactcactattatgccgtggctgtggtgaagaagggcggcagctttcagctgaacgaactgcaaggtctgaagtcctgccacacaggccttcgcaggaccgctggatggaatgtccctatagggacacttcgtccattcttgaattggacgggtccacctgagcccattgaggcagctgtggccaggttcttctcagccagctgtgttcccggtgcagataaaggacagttccccaacctgtgtcgcctgtgtgcggggacaggggaaaacaaatgtgccttctcctcccaggaaccgtacttcagctactctggtgccttcaagtgtctgagagacggggctggagacgtggcttttatcagagagagcacagtgtttgaggacctgtcagacgaggctgaaagggacgagtatgagttactctgcccagacaacactcggaagccagtggacaagttcaaagactgccatctggcccgggtcccttctcatgccgttgtggcacgaagtgtgaatggcaaggaggatgccatctggaatcttctccgccaggcacaggaaaagtttggaaaggacaagtcaccgaaattccagctctttggctcccctagtgggcagaaagatctgctgttcaaggactctgccattgggttttcgagggtgcccccgaggatagattctgggctgtaccttggctccggctacttcactgccatccagaacttgaggaaaagtgaggaggaagtggctgcccggcgtgcgcgggtcgtgtggtgtgcggtgggcgagcaggagctgcgcaagtgtaaccagtggagtggcttgagcgaaggcagcgtgacctgctcctcggcctccaccacagaggactgcatcgccctggtgctgaaaggagaagctgatgccatgagtttggatggaggatatgtgtacactgcaggcaaatgtggtttggtgcctgtcctggcagagaactacaaatcccaacaaagcagtgaccctgatcctaactgtgtggatagacctgtggaaggatatcttgctgtggcggtggttaggagatcagacactagccttacctggaactctgtgaaaggcaagaagtcctgccacaccgccgtggacaggactgcaggctggaatatccccatgggcctgctcttcaaccagacgggctcctgcaaatttgatgaatatttcagtcaaagctgtgcccctgggtctgacccgagatctaatctctgtgctctgtgtattggcgacgagcagggtgagaataagtgcgtgcccaacagcaacgagagatactacggctacactggggctttccggtgcctggctgagaatgctggagacgttgcatttgtgaaagatgtcactgtcttgcagaacactgatggaaataacaatgaggcatgggctaaggatttgaagctggcagactttgcgctgctgtgcctcgatggcaaacggaagcctgtgactgaggctagaagctgccatcttgccatggccccgaatcatgccgtggtgtctcggatggataaggtggaacgcctgaaacaggtgttgctccaccaacaggctaaatttgggagaaatggatctgactgcccggacaagttttgcttattccagtctgaaaccaaaaaccttctgttcaatgacaacactgagtgtctggccagactccatggcaaaacaacatatgaaaaatatttgggaccacagtatgtcgcaggcattactaatctgaaaaagtgctcaacctcccccctcctggaagcctgtgaattcctcaggaagtaaaaccgaagaagatggcccagctccccaagaaagcctcagccattcactgcccccagctcttctccccaggtgtgttggggccttggcctcccctgctgaaggtggggattgcccatccatctgcttacaattccctgctgtcgtcttagcaagaagtaaaatgagaaattttgttg

SEQ ID NO: 147345 - DNA, 2336 bp, Homo sapiens
  Payload ID: 9144
  Gene Symbol: LAD1
  Gene Name: ladinin 1
  ENST ID: ENST00000367313
  CDS Start-End: 60-1655
gtccgacggtccacccagtgcttgcggcctcgcggccgggccggcctgggctgcaatcaatgcggctttgtctgggacgcccacatcccagaggccattcccgggtcggcaaatcggagcgcggccggggcgcgcggggccttgcccggcagaggactctggaggatgaggaggaacaggagcgcgagcgcaggcggcggcaccgcaacctgagctccaccacggacgatgaggctcccaggctcagccagaatggagaccggcaggcctctgcttctgagagactaccgagcgtggaagaagcagaggtgcccaagccactgcccccagcctccaaagatgaggacgaggacatccagagcatcctcagaacacggcaggagcggaggcagaggcggcaggtggtggaggctgcacaggcccccatccaggagaggctggaggcagaggaggggaggaacagcttgagccctgtgcaggccacacagaaacccctagtctccaagaaggaactggaaatcccacctcgccggagactgagtcgggaacagcggggcccctgggccctggaggaggagagcttggtgggcagggagccagaagagaggaagaaaggggttccagaaaagtccccagtcttggagaagtcctccatgccaaagaagacggcacctgaaaagagcctggtctccgataaaacctccatctctgagaaggtgctggcctcagagaagacatctctatcagagaagatagcagtgtcagagaaaagaaacagctcagagaagaagtctgttctagaaaaaaccagtgtctctgagaagtcgctggccccagggatggcactgggctcaggaaggaggctggtgtctgagaaagcttccatctttgagaaggcactggcctcagagaagagcccaactgcagatgctaagccggccccaaagagggccacagcctcagagcagcccctggcgcaggagccgccagcctctgggggaagcccagccaccaccaaggagcagagaggaagggccctccctgggaagaacctgccctctttggcaaagcagggggcttcagaccctccgactgtggcctcccgcctcccacccgtcacactccaggtgaaaatccccagcaaggaggaagaggcagatatgtcctcacccacacagcgaacctacagcagctccctcaaacgctccagccccaggaccatctcctttcggatgaaacccaagaaagaaaactcggaaacaaccctaactcgcagtgccagcatgaagctcccagacaacacagtgaagttgggagagaagctggagagataccacacggccatacggagatcagaatctgtcaagtctcggggtctgccttgcactgagttattcgtggctcctgtgggtgtagccagcaagcgccacctctttgagaaggaactggcgggccagagccgagcagaaccagcctccagccggaaggagaacttgaggctctcaggggttgtgacatcaaggctcaacctgtggatcagcaggacccaggaatctggagatcaggacccccaggaggcacagaaagcatcatctgcaaccgagaggactcagtggggacagaaatctgactcctcgctggacgctgaggtgtgacaagccccgccaagacagacctgcaagtcttcgtctcaagggacctccctcatgccaggcccctgcctctcacagcagcaccctttcctctcattgtccctgttccctttttgcctgtggatctgtttggccagggtccctggggtcaggaatatttgcaagactcagccagctccttcccagcccagcctcttggggctgggactttctcaccctgcggcaggcacaacagatgctgggacccagtctctgcccaggtcacagcacaagtgcacatcagcactatggggcctatgtcctgcccagagacctctgctccttcctgctcacatccacagtcagggcacggcgcccctcaagaactccagagtcacctgtctcatcggctcccagcaagtgcctctttgtctatgatgtcccccttctctgaggcctggacccacccatctttgtccctggggcctgctcccagccactgaggcccgctctggccaggggagaaggagctgccgtgcgtcttccctgtgccccgtctccctgcttggttctcccctcccttccctggccggctgccatggccaggagctaagtgcctttttgtgtgcaaccacttaccctttctctgaaaaacctgttctcaggaaggatctgataaactcatttactctcaggtgtaagaga

SEQ ID NO: 147346 - DNA, 2906 bp, Homo sapiens
  Payload ID: 9144
  Gene Symbol: LAD1
  Gene Name: ladinin 1
  Uniprot ID: O00515
  ENST ID: ENST00000391967
  CDS Start-End: 303-1856
cccgggcagccgaccagccccacgccggccccgggcgtccgtcgttcggtcccgcgatccgtccgacggtccacccagtgcttgcggcctcgcggccgggccggcctgggctgcaatcaatgcggctttgtctgggacgcccacatcccagaggccattcccgggtcggcaaatcggagcgcggccggggcgcgcgggggtgagataagcggccatgtgatcccacctgggctggaaggggaggggcgccaggtgaggcggcggccggcggggcgcgggcggccacgcggggctcctgcagcatggctgtcagcaggaaggactggtccgcgctgtccagccttgcccggcagaggactctggaggatgaggaggaacaggagcgcgagcgcaggcggcggcaccgcaacctgagctccaccacggacgatgaggctcccaggctcagccagaatggagaccggcaggcctctgcttctgagagactaccgagcgtggaagaagcagaggtgcccaagccactgcccccagcctccaaagatgaggacgaggacatccagagcatcctcagaacacggcaggagcggaggcagaggcggcaggtggtggaggctgcacaggcccccatccaggagaggctggaggcagaggaggggaggaacagcttgagccctgtgcaggccacacagaaacccctagtctccaagaaggaactggaaatcccacctcgccggagactgagtcgggaacagcggggcccctgggccctggaggaggagagcttggtgggcagggagccagaagagaggaagaaaggggttccagaaaagtccccagtcttggagaagtcctccatgccaaagaagacggcacctgaaaagagcctggtctccgataaaacctccatctctgagaaggtgctggcctcagagaagacatctctatcagagaagatagcagtgtcagagaaaagaaacagctcagagaagaagtctgttctagaaaaaaccagtgtctctgagaagtcgctggccccagggatggcactgggctcaggaaggaggctggtgtctgagaaagcttccatctttgagaaggcactggcctcagagaagagcccaactgcagatgctaagccggccccaaagagggccacagcctcagagcagcccctggcgcaggagccgccagcctctgggggaagcccagccaccaccaaggagcagagaggaagggccctccctgggaagaacctgccctctttggcaaagcagggggcttcagaccctccgactgtggcctcccgcctcccacccgtcacactccaggtgaaaatccccagcaaggaggaagaggcagatatgtcctcacccacacagcgaacctacagcagctccctcaaacgctccagccccaggaccatctcctttcggatgaaacccaagaaagaaaactcggaaacaaccctaactcgcagtgccagcatgaagctcccagacaacacagtgaagttgggagagaagctggagagataccacacggccatacggagatcagaatctgtcaagtctcggggtctgccttgcactgagttattcgtggctcctgtgggtgtagccagcaagcgccacctctttgagaaggaactggcgggccagagccgagcagaaccagcctccagccggaaggagaacttgaggctctcaggggttgtgacatcaaggctcaacctgtggatcagcaggacccaggaatctggagatcaggacccccaggaggcacagaaagcatcatctgcaaccgagaggactcagtggggacagaaatctgactcctcgctggacgctgaggtgtgacaagccccgccaagacagacctgcaagtcttcgtctcaagggacctccctcatgccaggcccctgcctctcacagcagcaccctttcctctcattgtccctgttccctttttgcctgtggatctgtttggccagggtccctggggtcaggaatatttgcaagactcagccagctccttcccagcccagcctcttggggctgggactttctcaccctgcggcaggcacaacagatgctgggacccagtctctgcccaggtcacagcacaagtgcacatcagcactatggggcctatgtcctgcccagagacctctgctccttcctgctcacatccacagtcagggcacggcgcccctcaagaactccagagtcacctgtctcatcggctcccagcaagtgcctctttgtctatgatgtcccccttctctgaggcctggacccacccatctttgtccctggggcctgctcccagccactgaggcccgctctggccaggggagaaggagctgccgtgcgtcttccctgtgccccgtctccctgcttggttctcccctcccttccctggccggctgccatggccaggagctaagtgcctttttgtgtgcaaccacttaccctttctctgaaaaacctgttctcaggaaggatctgataaactcatttactctcaggtgtaagagactgatgagaccttagaagcgaattcctctctggaggccttgctttctagcagaggtcacctgaagtgtgtgaggaggatcatcattttcctcatcccccctcttctcacattaaggtggtggcttgccactcagcagtcctagcttggtgactgggaactgccacatacagggccaggcctaccctccttccccacaagccccctccaacccccacccccatgctctggacctcatggctcctatgagcttggagcatggtgaaccatcagagaatctagaaccaaccaagctaggaacatcagcctggtgccctgttaaccccttaaagctgtggtttacaacttttcaaaaatttaaatcattagaa

SEQ ID NO: 147347 - DNA, 582 bp, Homo sapiens
  Payload ID: 9144
  Gene Symbol: LAD1
  Gene Name: ladinin 1
  ENST ID: ENST00000503578
  CDS Start-End: 1-579
gaagaggcagatatgtcctcacccacacagcgaacctacagcagctccctcaaacgctccagccccaggaccatctcctttcggatgaaacccaagaaagaaaactcggaaacaaccctaactcgcagtgccagcatgaagctcccagacaacacagtgaagttgggagagaagctggagagataccacacggccatacggagatcagaatctgtcaagtctcggggtctgccttgcactgagttattcgtggctcctgtgggtgtagccagcaagcgccacctctttgagaaggaactggcgggccagagccgagcagaaccagcctccagccggaaggagaacttgaggctctcaggggttgtgacatcaaggctcaacctgtggatcagcaggacccaggaatctggagatcaggacccccaggaggcacagaaagcatcatctgcaaccgagaggactcagtggggacagaaatctgactcctcgctggacgctgagtccccgctgagactgagcagacgcctccaggatctgtcggcagctgctgttctgagggagagcagagaccatgtctgacat

SEQ ID NO: 147348 - DNA, 589 bp, Homo sapiens
  Payload ID: 9144
  Gene Symbol: LAD1
  Gene Name: ladinin 1
  ENST ID: ENST00000633953
  CDS Start-End: 56-589
agcatggctgtcagcaggaaggactggtccgcgctgtccagatctgtggagctccatggctcaactctttccacgaagctctttccatctgaaaggtgagggaggctccaagagcccctgggaagtgaaaggaaggcgatattggagttttttccatggccttgcccggcagaggactctggaggatgaggaggaacaggagcgcgagcgcaggcggcggcaccgcaacctgagctccaccacggacgatgaggctcccaggctcagccagaatggagaccggcaggcctctgcttctgagagactaccgagcgtggaagaagcagaggtgcccaagccactgcccccagcctccaaagatgaggacgaggacatccagagcatcctcagaacacggcaggagcggaggcagaggcggcaggtggtggaggctgcacaggcccccatccaggagaggctggaggcagaggaggggaggaacagcttgagccctgtgcaggccacacagaaacccctagtctccaagaaggaactggaaatcccacctcgccggagactgagtcgggaacagcggggcccctgggccctg

SEQ ID NO: 147349 - DNA, 565 bp, Homo sapiens
  Payload ID: 9144
  Gene Symbol: LAD1
  Gene Name: ladinin 1
  ENST ID: ENST00000632743
  CDS Start-End: 1-565
agtcaccctgatgaggcacctggaacagaggaccgctcccgctccgctccctgggtgaacaagcctcagcgggcaggcaggaaagggctccttgcccggcagaggactctggaggatgaggaggaacaggagcgcgagcgcaggcggcggcaccgcaacctgagctccaccacggacgatgaggctcccaggctcagccagaatggagaccggcaggcctctgcttctgagagactaccgagcgtggaagaagcagaggtgcccaagccactgcccccagcctccaaagatgaggacgaggacatccagagcatcctcagaacacggcaggagcggaggcagaggcggcaggtggtggaggctgcacaggcccccatccaggagaggctggaggcagaggaggggaggaacagcttgagccctgtgcaggccacacagaaacccctagtctccaagaaggaactggaaatcccacctcgccggagactgagtcgggaacagcggggcccctgggccctggaggaggagagcttggtgggcagggagccagaagagaggaagaaag

SEQ ID NO: 147350 - DNA, 550 bp, Homo sapiens
  Payload ID: 9144
  Gene Symbol: LAD1
  Gene Name: ladinin 1
  ENST ID: ENST00000631576
  CDS Start-End: 1-550
attcatctcagcgaggcctactgggacggtgggcccggccttgcccggcagaggactctggaggatgaggaggaacaggagcgcgagcgcaggcggcggcaccgcaacctgagctccaccacggacgatgaggctcccaggctcagccagaatggagaccggcaggcctctgcttctgagagactaccgagcgtggaagaagcagaggtgcccaagccactgcccccagcctccaaagatgaggacgaggacatccagagcatcctcagaacacggcaggagcggaggcagaggcggcaggtggtggaggctgcacaggcccccatccaggagaggctggaggcagaggaggggaggaacagcttgagccctgtgcaggccacacagaaacccctagtctccaagaaggaactggaaatcccacctcgccggagactgagtcgggaacagcggggcccctgggccctggaggaggagagcttggtgggcagggagccagaagagaggaagaaaggggttccagaaaagtccccagtcttggagaagtcct

SEQ ID NO: 147351 - DNA, 2900 bp, Homo sapiens
  Payload ID: 9145
  Gene Symbol: LBX1
  Gene Name: ladybird homeobox 1
  Uniprot ID: P52954
  ENST ID: ENST00000370193
  CDS Start-End: 980-1825
gtccctcccgggctggggttcccaccactctttcgggctccacatcccgggtcggagagaccgagaccttcgggccggtgcggtcattgcagctaggccggcgggaggcgggtgcgccaggagcgcggctcgcagtttggggtgggggcggtggcttttcagtcgcccgaggttcgggtgcaataaaggagcagctaatgtaatttacaaacagctcgggccgaacgcagcgcagcgcccggactgacaggcgcattaggcaggctaattccagccggctcctcctacccccggcccgctaattaatgagcttcccaacttacagccgcctgcattggacagacagagagtgaaagagagggcgagggagagggagagaaggagagagaaggggggagcagagaagagagaagagagagggagggagggagagcgagaacaggaggagagaacagaggcaaagaagagaggaaaaagggagaaaggagagagaaagagaaagaagtgccgctgcagataattgattacaccgcgatcaaggctaacttgttagcaatagtcaattgccccgtctctccgcctccctcgcagtccgggatcggcgccctcgcctcggctcttccaactgcggccgccaggacccggggccaggagccactgccgagccacctgacacctttaaatagcaccggggttggcgaaactggagccccgcgcagcgcgccccggctccggccccggattgctggaagccccagcagcagcggcgcccgcgtcagcgccctcttcccggggccccgcgctgttctcccctcctcagccgccgcgctaatcggccccgcgcccggcccgcgccctgcccagtgcggcctcctttccacccgccgctgcctgcccgcgccgtccggcgcccgagctgcccgcgggctgggtccccgcggcccgagccgccccggccgggaccccgaacaaggccgagatgacttccaaggaggacggcaaggcggcgccgggggaggagcggcggcgcagcccgctggaccacctgcctccgcctgccaactccaacaagccactgacgccgttcagcatcgaggacatcctcaacaagccgtctgtgcggagaagttactcgctgtgcggggcggcgcacctgctggccgccgcggacaagcacgcgcagggcggcttgcccctggcgggccgcgcgctgctctcgcagacctcgccgctgtgcgcgctggaggagctcgccagcaagacgtttaaggggctggaggtcagcgttctgcaggcagccgaaggccgcgacggtatgaccatctttgggcagcggcagacccctaagaagcggcgaaagtcgcgcacggccttcaccaaccaccagatctatgaattggaaaagcgctttctataccagaagtacctgtcccccgccgatcgcgaccaaatcgcgcagcagctgggcctcaccaacgcgcaagtcatcacctggttccagaatcggcgcgctaagctcaagcgggacctggaggagatgaaggccgacgtagagtccgccaagaaactgggccccagcgggcagatggacatcgtggcgctggccgaactcgagcagaactcggaggccacagccggcggtggcggcggctgcggcagggccaagtcgaggcccggctctccggtcctccccccaggcgccccgaaggccccgggcgctggcgccctgcagctctcgcctgcctctccgctcacggaccagccggccagcagccaggactgctcggaggacgaggaagacgaagagatcgacgtggacgattgagcggcgccccgggtcttccgccgccctgggctcctagcgctcgaaagcccaacgcctcccggaccggaccgccgaggggagctgggacctcctctgccaactcccgcctcctcccctgtccccggccccggactcggctcctggcagccgcctcttccctctcgaagcaataaacccaggctggccggccgggccggccgccaccagcggcctccgccgccccggaagccctcgccgtgcaattctgtatggcttctatataaatatttaaacctatatagcgggttcttcccaccgcagcctgatttttcctttcttttattattattttttaaatctcggagatttcgatgttttcaaagctctcgggctgccgggtttgctgagggcgagacagaaaccagggcggggaacactaaccctgcggtctaggggagtggcagctccggctgttttgatttttctctgcatgtggcgaatgcaccggcccgctccttcctcgcctccctcggccttattgcagttgacttctatttcctcgggccttttttcctcatgtgggaggggaagaggtgggcagtcaggtcctgacttgcaagtttcaaaatcgatctttcctccccaccctctgagagaaaagtctgttttcgatgccatttctgcctcctaatgcccactaatgctgtttttaagattcctccctccctcccgcatttcctcggactgactgttggagtccggctcttagggacaatgcagggggaaatccaaccaaccaactatcgaaaacagaacccaaagccctataattattttgtactctttttagaatttttttgcatgtgacagagacagagaggaggccgacccaagccctcacctcacctcctccacagctctgggtctctcttgccacttcgaacaccccactcctacccgacttggccagaggagggtggctggatgtgagtgggctgcgagtgccccttccctgctcctcccttcccctctcctccctagactgtacccaaggcctctttctccaataaataaagtctttgccattttactagaa

SEQ ID NO: 147352 - DNA, 1186 bp, Homo sapiens
  Payload ID: 9146
  Gene Symbol: LBX2
  Gene Name: ladybird homeobox 2
  Uniprot ID: Q6XYB7
  ENST ID: ENST00000377566
  CDS Start-End: 180-776
gatccaccgcggcccggggtggagaggtgggggcgcaggaggaggggcacacgggactcgggcccagagccgggggcgggtccgaggctgggggcccggattgggagccgagcactggggcccaggcgtttgcggagcctagcgcaacggacagccggaccgccccagcccggccgaccatgaactcgggacgcgagccccgaacaccccggacactcttaagcatcgcagacatcctagccccgcgcatggtcccccgagcaccctctgcgccgcagcttccagagtcgggtccgggtccaacgtcgccgctgtgcgcgctggaggagctgactagtaaaactttccgcggacttgacgcgcgcgctctgcagccctctgaagggcgggcaggtccggacgcgctgggccctggtcccttcggccgcaaacggcgcaagtcacgcactgcgttcaccgcgcaacaggtgctggagctggagcggcgcttcgtcttccagaagtacctggcgccgtccgagcgagacgggctagctacgcgactcggcctggccaacgcgcaggtggtcacttggttccagaaccggcgagccaagctcaagcgcgatgtggaggagatgcgcgccgacgtcgcctcgctacgcgcgttgtccccggaagtcctgtgcagcttagcactgcccgaaggcgctccagatcccggcctctgcctcggccctgccggccctgactcccggccccacctgtcagacgaggagatacaggtggacgattgaagacaaagccgccgccaatcctgggctctggggccctggactcctcacctcgcgctctgcctctggccagagttccagggtggaggaaggaggtccacttgggcctcttccggcccacagtccagacgctcacctttcccggtttttttgtaagtttgttttgttgtctgagacagggcctcgctctgtcgcccaggctggagtgccgtggagcgatcaccgctcactgcagtcgcgacctcctgggctcaagcgatcctcctgcctcaacctcccgactagctggcattacaggcgtgcagcaccaccccaggctaatttaaaaaacttttttttttagagaggaggtcccgctatgttgtccaggctactttcccaatatttgagaataaagtcgagactctgccgca

SEQ ID NO: 147353 - DNA, 1452 bp, Homo sapiens
  Payload ID: 9146
  Gene Symbol: LBX2
  Gene Name: ladybird homeobox 2
  Uniprot ID: Q6XYB7
  ENST ID: ENST00000460508
  CDS Start-End: 458-1042
gcactgcgtctcccaaggtggctgaagctggccagctgcgggctccgcgccgctcgtcccgggtctatgggtccattccccacgcccacccggaccccggggtcactcgggtctccgtctgtgccagggagggagaatcacgcccagggtcctctctggcttcgcgcgactgagaacgcgcccggacgcggcgcggcgctcctgagtcaaaggagaggtggcggcaggaccaccccagggcgccgtctgcacccccggacgcactcggccgtgctgcgcttccgggacaaggcgtcggttctcgcctgagggccaaaccttgcccctgcccaccttcctcacccccgccatttccaggactcacatccaaaggcgacagcaccaggatttgctcccgcctttggcacagaggaggacgggtccctctctcagcctggccagtctttcccagggcttgatgggaaaaaggacttccctagaagtgagtcttggggagttggggggagaaaagtgtcgaggagggcgtcggagtttcccaccgctggctgcttcccggcccgcacgcccgggagggtggcggtgggcgcgcagagatctttgcaaaacagcgtccagggcggaaaacaactcacaggcctgccgcccccaaaggcgggcaggtccggacgcgctgggccctggtcccttcggccgcaaacggcgcaagtcacgcactgcgttcaccgcgcaacaggtgctggagctggagcggcgcttcgtcttccagaagtacctggcgccgtccgagcgagacgggctagctacgcgactcggcctggccaacgcgcaggtggtcacttggttccagaaccggcgagccaagctcaagcgcgatgtggaggagatgcgcgccgacgtcgcctcgctacgcgcgttgtccccggaagtcctgtgcagcttagcactgcccgaaggcgctccagatcccggcctctgcctcggccctgccggccctgactcccggccccacctgtcagacgaggagatacaggtggacgattgaagacaaagccgccgccaatcctgggctctggggccctggactcctcacctcgcgctctgcctctggccagagttccagggtggaggaaggaggtccacttgggcctcttccggcccacagtccagacgctcacctttcccggtttttttgtaagtttgttttgttgtctgagacagggcctcgctctgtcgcccaggctggagtgccgtggagcgatcaccgctcactgcagtcgcgacctcctgggctcaagcgatcctcctgcctcaacctcccgactagctggcattacaggcgtgcagcaccaccccaggctaatttaaaaaacttttttttttagagaggaggtcccgctatgttgtccaggctactttcccaatatttgagaataaagtcgagactctgccgca

SEQ ID NO: 147354 - DNA, 886 bp, Homo sapiens
  Payload ID: 9146
  Gene Symbol: LBX2
  Gene Name: ladybird homeobox 2
  ENST ID: ENST00000341396
  CDS Start-End: 126-299
ccttcctcacccccgccatttccaggactcacatccaaaggcgacagcaccaggatttgctcccgcctttggcacagaggaggacgggtccctctctcagcctggccagtctttcccagggcttgatgggaaaaaggacttccctagaaggcgggcaggtccggacgcgctgggccctggtcccttcggccgcaaacggcgcaagtcacgcactgcgttcaccgcgcaacaggtgctggagctggagcggcgcttcgtcttccagaagtacctggcgccgtccgagcgagacgggctagctacgcgactcggcctggccaacgcgcaggtggtcacttggttccagaaccggcgagccaagctcaagcgcgatgtggaggagatgcgcgccgacgtcgcctcgctacgcgcgttgtccccggaagtcctgtgcagcttagcactgcccgaaggcgctccagatcccggcctctgcctcggccctgccggccctgactcccggccccacctgtcagacgaggagatacaggtggacgattgaagacaaagccgccgccaatcctgggctctggggccctggactcctcacctcgcgctctgcctctggccagagttccagggtggaggaaggaggtccacttgggcctcttccggcccacagtccagacgctcacctttcccggtttttttgtaagtttgttttgttgtctgagacagggcctcgctctgtcgcccaggctggagtgccgtggagcgatcaccgctcactgcagtcgcgacctcctgggctcaagcgatcctcctgcctcaacctcccgactagctggcattacaggcgtgcagcaccaccccaggctaatttaaaaaacttttttttttagagagg

SEQ ID NO: 147355 - DNA, 4581 bp, Homo sapiens
  Payload ID: 9147
  Gene Symbol: LVRN
  Gene Name: laeverin
  Uniprot ID: Q6Q4G3
  ENST ID: ENST00000357872
  CDS Start-End: 125-3097
aggaggaagaggcacgatacaagagaggaggggcaggggtcgcagcactgaacaccctggccggggttttgacagctgccacagtctctgagctccagcctcgcgcctgaacccggtccctgccatggggcccccttccagctcaggcttctatgtgagccgcgcagtggccctgctgctggctgggctggtagccgccctcctgctggcgctggccgtactcgccgccttgtacggccactgcgagcgcgtcccaccgtcggagctgcctggactcagggacttggaagccgagtcttcccctcccctcaggcagaagccgacgccaaccccgaaacccagcagtgcacgcgagctagcggtgacgaccaccccgagcaactggcgacccccggggccctgggaccagctacgcctgccgccctggctcgtgccgctgcactacgatctggagctgtggccgcagctgaggcccgacgagcttccggccgggtctttgcccttcactggccgcgtgaacatcacggtgcgctgcacggtggccacctctcgactgctgctgcatagcctcttccaggactgcgagcgcgccgaggtgcggggacccctttccccgggcactgggaacgccacagtgggccgcgtgcccgtggacgacgtgtggttcgcgctggacacggaatacatggtgctggagctcagtgagcccctgaaacctggtagcagctacgagctgcagcttagcttctcgggcctggtgaaggaagacctcagggagggactcttcctcaacgtctacaccgaccagggcgagcgcagggccctgttagcgtcccagctggaaccaacatttgccaggtatgttttcccttgttttgatgagccagctctgaaggcaacttttaatattacaatgattcatcatccaagttatgtggccctttccaacatgccaaagctaggtcagtctgaaaaagaagatgtgaatggaagcaaatggactgttacaaccttttccactacgccccacatgccaacttacttagtcgcatttgttatatgtgactatgaccacgtcaacagaacagaaaggggcaaggagatacgcatctgggcccggaaagatgcaattgcaaatggaagtgcagactttgctttgaacatcacaggtcccatcttctcttttctggaggatttgtttaatatcagttactctcttccaaaaacagatataattgccttgcctagttttgacaaccatgcaatggaaaactggggactaatgatatttgatgaatcaggattgttgttggaaccaaaagatcaactgacagaaaaaaagactctgatctcctatgttgtctcccacgagattggacaccagtggtttggaaacttggttaccatgaattggtggaacaatatctggctcaacgagggttttgcatcttattttgagtttgaagtaattaactactttaatcctaaactcccaagaaatgagatctttttttctaacattttacataatatcctcagagaagatcacgccctggtgactagagctgtggccatgaaggtggaaaatttcaaaacaagtgaaatacaggaactctttgacatatttacttacagcaagggagcgtctatggcccggatgctttcttgtttcttgaatgagcatttatttgtcagtgcactcaagtcatatttgaagacattttcctactcaaacgctgagcaagatgatctatggaggcattttcaaatggccatagatgaccagagtacagttattttgccagcaacaataaaaaacataatggacagttggacacaccagagtggttttccagtgatcactttaaatgtgtctactggcgtcatgaaacaggagccattttatcttgaaaacattaaaaatcggactcttctaaccagcaatgacacatggattgtccctattctttggataaaaaatggaactacacaacctttagtctggctagatcaaagcagcaaagtattcccagaaatgcaagtttcagattctgaccatgactgggtgattttgaatttgaatatgactggatattatagagttaattatgataaattaggttggaagaaactaaatcaacaacttgaaaaggatcctaaggcgattcctgttattcacagactgcagttgattgatgatgccttttccttgtctaaaaacaattatattgagattgaaacagcacttgagttaaccaagtaccttgctgaagaagatgaaattatagtatggcatacagtcttggtaaacttggtaaccagggatcttgtttctgaggtgaacatctatgatatatactcattattaaagaggtacctattaaagagacttaatttaatatggaatatttattcaactataattcgtgaaaatgtgttggcattacaagatgactacttagctctaatatcactggaaaaactttttgtaactgcgtgttggttgggccttgaagactgccttcagctgtcaaaagaacttttcgcaaaatgggtggatcatccagaaaatgaaataccttatccaattaaagatgtggttttatgttatggcattgccttgggaagtgataaagagtgggacatcttgttaaatacttacactaatacaacaaacaaagaagaaaagattcaacttgcttatgcaatgagctgcagcaaagacccatggatacttaacagatatatggagtatgccatcagcacatctccattcacttctaatgaaacaaatataattgaggttgtggcttcatctgaagttggccggtatgtcgcaaaagacttcttagtcaacaactggcaagctgtgagtaaaaggtatggaacacaatcattgattaatctaatatatacaatagggagaaccgtaactacagatttacagattgtggagctgcagcagtttttcagtaacatgttggaggaacaccagaggatcagagttcatgccaacttacagacaataaagaatgaaaatctgaaaaacaagaagctaagtgccaggatagctgcgtggctaaggagaaacacatagcttgtggctatctttcagcactcctcttgcatattataatgtagtttgttcacagttttgtcttccaatactttgtgagtctggaaaaccacacattttatttgtatttcagtcacatttattactcagagtgccattcttctcatattgtcatgtttggccctgagggtgggtgattgctgacaattttgccaatgctgctgtatttctgggaaagatgtcacttcatgttgggttataatcccacagaatttactttaaatgtcacgtaaaaacaaattcacctaagatagtcttgcttattttgttgcgaaggccagtggaatataaaaatcaatggcattaatgaggagcacattctttgctgagggaaataacagtttttccaggccctagggtttatttagttcaacattgaagattgaaaagactaatgagaagataacatgacaatataaaaagacagaaactcaaaaagtatattcactagaagacagtggagccaaagaaaagcaagttgaaaaagaaagaggagacaatttaacgagccctaaaggcaagaagtgtgtcttctcctgcccatttctctctcccacagtacatcctgcattgaaccacgtgttgctggttactaaactttatggtgtcacaaaaagacaaatgattgtaggatccatggaagtgcacttaggcttgctgtggtggaggccatagtggagatgaaggctctgctctgaagctcttaattgtgtattcaccagtgggatggacaccctttcagcctaagcgtacgagtgaaaacaatgatgtcaaaagacaatagcaagtataggctactatttagggcaaaaggaatcttgaaatgaaagaaacagaactaaaaggctaactggagcataatccttacagttttgcactcaggggattaagtttgaaacatagtgtcttttggccaaattgaacctacttgtaatgtggaccaacttactttacacattttcatcagtcccaatgtatggaattagcttagttttctcatgcttgattaaaacaagacaactaaagctaatcattcctcttctagactttgtgtatatgatttaatcttttatttttatttttgtagaatgggggtaaaactacaaatctcctcctcagggtgatatttttaaagattaaggagtatgacatcaattaacagtctttaaagatgttacatacgctcaaagcaatgtgattaagactttttgcctatttcttgtataagttaaggcagccataaatgaaaatacaaaacaaacgtttgcttttgtatttgattcacaagaggattctccctgagtgtcaggggaggctgtgggacttcaccacgtggacaaacgaaagcacaggctactcagacttggccacaggtcataggtcagagaattttttcttcaaatgtagaaatgtaaattttcagcaataaaatatctgcatgccta

SEQ ID NO: 147356 - DNA, 4544 bp, Homo sapiens
  Payload ID: 9147
  Gene Symbol: LVRN
  Gene Name: laeverin
  ENST ID: ENST00000395528
  CDS Start-End: 125-3061
aggaggaagaggcacgatacaagagaggaggggcaggggtcgcagcactgaacaccctggccggggttttgacagctgccacagtctctgagctccagcctcgcgcctgaacccggtccctgccatggggcccccttccagctcaggcttctatgtgagccgcgcagtggccctgctgctggctgggctggtagccgccctcctgctggcgctggccgtactcgccgccttgtacggccactgcgagcgcgtcccaccgtcggagctgcctggactcagggacttggaagccgagtcttcccctcccctcaggcagaagccgacgccaaccccgaaacccagcagtgcacgcgagctagcggtgacgaccaccccgagcaactggcgacccccggggccctgggaccagctacgcctgccgccctggctcgtgccgctgcactacgatctggagctgtggccgcagctgaggcccgacgagcttccggccgggtctttgcccttcactggccgcgtgaacatcacggtgcgctgcacggtggccacctctcgactgctgctgcatagcctcttccaggactgcgagcgcgccgaggtgcggggacccctttccccggacgacgtgtggttcgcgctggacacggaatacatggtgctggagctcagtgagcccctgaaacctggtagcagctacgagctgcagcttagcttctcgggcctggtgaaggaagacctcagggagggactcttcctcaacgtctacaccgaccagggcgagcgcagggccctgttagcgtcccagctggaaccaacatttgccaggtatgttttcccttgttttgatgagccagctctgaaggcaacttttaatattacaatgattcatcatccaagttatgtggccctttccaacatgccaaagctaggtcagtctgaaaaagaagatgtgaatggaagcaaatggactgttacaaccttttccactacgccccacatgccaacttacttagtcgcatttgttatatgtgactatgaccacgtcaacagaacagaaaggggcaaggagatacgcatctgggcccggaaagatgcaattgcaaatggaagtgcagactttgctttgaacatcacaggtcccatcttctcttttctggaggatttgtttaatatcagttactctcttccaaaaacagatataattgccttgcctagttttgacaaccatgcaatggaaaactggggactaatgatatttgatgaatcaggattgttgttggaaccaaaagatcaactgacagaaaaaaagactctgatctcctatgttgtctcccacgagattggacaccagtggtttggaaacttggttaccatgaattggtggaacaatatctggctcaacgagggttttgcatcttattttgagtttgaagtaattaactactttaatcctaaactcccaagaaatgagatctttttttctaacattttacataatatcctcagagaagatcacgccctggtgactagagctgtggccatgaaggtggaaaatttcaaaacaagtgaaatacaggaactctttgacatatttacttacagcaagggagcgtctatggcccggatgctttcttgtttcttgaatgagcatttatttgtcagtgcactcaagtcatatttgaagacattttcctactcaaacgctgagcaagatgatctatggaggcattttcaaatggccatagatgaccagagtacagttattttgccagcaacaataaaaaacataatggacagttggacacaccagagtggttttccagtgatcactttaaatgtgtctactggcgtcatgaaacaggagccattttatcttgaaaacattaaaaatcggactcttctaaccagcaatgacacatggattgtccctattctttggataaaaaatggaactacacaacctttagtctggctagatcaaagcagcaaagtattcccagaaatgcaagtttcagattctgaccatgactgggtgattttgaatttgaatatgactggatattatagagttaattatgataaattaggttggaagaaactaaatcaacaacttgaaaaggatcctaaggcgattcctgttattcacagactgcagttgattgatgatgccttttccttgtctaaaaacaattatattgagattgaaacagcacttgagttaaccaagtaccttgctgaagaagatgaaattatagtatggcatacagtcttggtaaacttggtaaccagggatcttgtttctgaggtgaacatctatgatatatactcattattaaagaggtacctattaaagagacttaatttaatatggaatatttattcaactataattcgtgaaaatgtgttggcattacaagatgactacttagctctaatatcactggaaaaactttttgtaactgcgtgttggttgggccttgaagactgccttcagctgtcaaaagaacttttcgcaaaatgggtggatcatccagaaaatgaaataccttatccaattaaagatgtggttttatgttatggcattgccttgggaagtgataaagagtgggacatcttgttaaatacttacactaatacaacaaacaaagaagaaaagattcaacttgcttatgcaatgagctgcagcaaagacccatggatacttaacagatatatggagtatgccatcagcacatctccattcacttctaatgaaacaaatataattgaggttgtggcttcatctgaagttggccggtatgtcgcaaaagacttcttagtcaacaactggcaagctgtgagtaaaaggtatggaacacaatcattgattaatctaatatatacaatagggagaaccgtaactacagatttacagattgtggagctgcagcagtttttcagtaacatgttggaggaacaccagaggatcagagttcatgccaacttacagacaataaagaatgaaaatctgaaaaacaagaagctaagtgccaggatagctgcgtggctaaggagaaacacatagcttgtggctatctttcagcactcctcttgcatattataatgtagtttgttcacagttttgtcttccaatactttgtgagtctggaaaaccacacattttatttgtatttcagtcacatttattactcagagtgccattcttctcatattgtcatgtttggccctgagggtgggtgattgctgacaattttgccaatgctgctgtatttctgggaaagatgtcacttcatgttgggttataatcccacagaatttactttaaatgtcacgtaaaaacaaattcacctaagatagtcttgcttattttgttgcgaaggccagtggaatataaaaatcaatggcattaatgaggagcacattctttgctgagggaaataacagtttttccaggccctagggtttatttagttcaacattgaagattgaaaagactaatgagaagataacatgacaatataaaaagacagaaactcaaaaagtatattcactagaagacagtggagccaaagaaaagcaagttgaaaaagaaagaggagacaatttaacgagccctaaaggcaagaagtgtgtcttctcctgcccatttctctctcccacagtacatcctgcattgaaccacgtgttgctggttactaaactttatggtgtcacaaaaagacaaatgattgtaggatccatggaagtgcacttaggcttgctgtggtggaggccatagtggagatgaaggctctgctctgaagctcttaattgtgtattcaccagtgggatggacaccctttcagcctaagcgtacgagtgaaaacaatgatgtcaaaagacaatagcaagtataggctactatttagggcaaaaggaatcttgaaatgaaagaaacagaactaaaaggctaactggagcataatccttacagttttgcactcaggggattaagtttgaaacatagtgtcttttggccaaattgaacctacttgtaatgtggaccaacttactttacacattttcatcagtcccaatgtatggaattagcttagttttctcatgcttgattaaaacaagacaactaaagctaatcattcctcttctagactttgtgtatatgatttaatcttttatttttatttttgtagaatgggggtaaaactacaaatctcctcctcagggtgatatttttaaagattaaggagtatgacatcaattaacagtctttaaagatgttacatacgctcaaagcaatgtgattaagactttttgcctatttcttgtataagttaaggcagccataaatgaaaatacaaaacaaacgtttgcttttgtatttgattcacaagaggattctccctgagtgtcaggggaggctgtgggacttcaccacgtggacaaacgaaagcacaggctactcagacttggccacaggtcataggtcagagaattttttcttcaaatgtagaaatgtaaattttcagcaataaaatatctgcatgcct

SEQ ID NO: 147357 - DNA, 3322 bp, Homo sapiens
  Payload ID: 9147
  Gene Symbol: LVRN
  Gene Name: laeverin
  Uniprot ID: Q6Q4G3
  ENST ID: ENST00000504467
  CDS Start-End: 165-2270
aaccgctgtctgctgagctccagtccgtccaggctcttccaggaggaagaggcacgatacaagagaggaggggcaggggtcgcagcactgaacaccctggccggggttttgacagctgccacagtctctgagctccagcctcgcgcctgaacccggtccctgccatggggcccccttccagctcaggcttctatgtgagccgcgcagtggccctgctgctggctgggctggtagccgccctcctgctggcgctggccgtactcgccgccttgtacggccactgcgagcgcgtcccaccgtcggagctgcctggactcagggacttggaagccgagtcttcccctcccctcaggcagaagccgacgccaaccccgaaacccagcagtgcacgcgagctagcggtgacgaccaccccgagcaactggcgacccccggggccctgggaccagctacgcctgccgccctggctcgtgccgctgcactacgatctggagctgtggccgcagctgaggcccgacgagcttccggccgggtctttgcccttcactggccgcgtgaacatcacggtgcgctgcacggtggccacctctcgactgctgctgcatagcctcttccaggactgcgagcgcgccgaggtgcggggacccctttccccgggcactgggaacgccacagtgggccgcgtgcccgtggacgacgtgtggttcgcgctggacacggaatacatggtgctggagctcagtgagcccctgaaacctggtagcagctacgagctgcagcttagcttctcgggcctggtgaaggaagacctcagggagggactcttcctcaacgtctacaccgaccagggcgagcgcagggccctgttagcgtcccagctggaaccaacatttgccaggtatgttttcccttgttttgatgagccagctctgaaggcaacttttaatattacaatgattcatcatccaagttatgtggccctttccaacatgccaaagctaggtcagtctgaaaaagaagatgtgaatggaagcaaatggactgttacaaccttttccactacgccccacatgccaacttacttagtcgcatttgttatatgtgactatgaccacgtcaacagaacagaaaggggcaaggagatacgcatctgggcccggaaagatgcaattgcaaatggaagtgcagactttgctttgaacatcacaggtcccatcttctcttttctggaggatttgtttaatatcagttactctcttccaaaaacagatataattgccttgcctagttttgacaaccatgcaatggaaaactggggactaatgatatttgatgaatcaggattgttgttggaaccaaaagatcaactgacagaaaaaaagactctgatctcctatgttgtctcccacgagattggacaccagtggtttggaaacttggttaccatgaattggtggaacaatatctggctcaacgagggttttgcatcttattttgagtttgaagtaattaactactttaatcctaaactcccaagaaatgagatctttttttctaacattttacataatatcctcagagaagatcacgccctggtgactagagctgtggccatgaaggtggaaaatttcaaaacaagtgaaatacaggaactctttgacatatttacttacagcaagggagcgtctatggcccggatgctttcttgtttcttgaatgagcatttatttgtcagtgcactcaagtcatatttgaagacattttcctactcaaacgctgagcaagatgatctatggaggcattttcaaatggccatagatgaccagagtacagttattttgccagcaacaataaaaaacataatggacagttggacacaccagagtggttttccagtgatcactttaaatgtgtctactggcgtcatgaaacaggagccattttatcttgaaaacattaaaaatcggactcttctaaccagcaatgacacatggattgtccctattctttggataaaaaatggaactacacaacctttagtctggctagatcaaagcagcaaagtattcccagaaatgcaagtttcagattctgaccatgactgggtgattttgaatttgaatatgactggatattatagagttaattatgataaattaggttggaagaaactaaatcaacaacttgaaaaggatcctaaggcgattcctgttattcacagactgcagttgattgatgatgccttttccttgtctaaaggtacctattaaagagacttaatttaatatggaatatttattcaactataattcgtgaaaatgtgttggcattacaagatgactacttagctctaatatcactggaaaaactttttgtaactgcgtgttggttgggccttgaagactgccttcagctgtcaaaagaacttttcgcaaaatgggtggatcatccagaaaatgaaataccttatccaattaaagatgtggttttatgttatggcattgccttgggaagtgataaagagtgggacatcttgttaaatacttacactaatacaacaaacaaagaagaaaagattcaacttgcttatgcaatgagctgcagcaaagacccatggatacttaacagatatatggagtatgccatcagcacatctccattcacttctaatgaaacaaatataattgaggttgtggcttcatctgaagttggccggtatgtcgcaaaagacttcttagtcaacaactggcaagctgtgagtaaaagtcttttatttacttttttaactacagccacactttgagcaggtatggaacacaatcattgattaatctaatatatacaatagggagaaccgtaactacagatttacagattgtggagctgcagcagtttttcagtaacatgttggaggaacaccagaggatcagagttcatgccaacttacagacaataaagaatgaaaatctgaaaaacaagaagctaagtgccaggatagctgcgtggctaaggagaaacacatagcttgtggctatctttcagcactcctcttgcatattataatgtagtttgttcacagttttgtcttccaatactttgtgagtctggaaaaccacacattttatttgtatttcagtcacatttattactcagagtgccattcttctcatattgtcatgtttggccctgagggtgggtgattgctgacaattttgccaatgctgctgtatttctgggaaagatgtcacttcatgttgggttataatcccacagaatttactttaaatgtcacgtaaaaacaaattcacctaagatagtcttg

SEQ ID NO: 147358 - DNA, 3676 bp, Homo sapiens
  Payload ID: 9147
  Gene Symbol: LVRN
  Gene Name: laeverin
  Uniprot ID: Q6Q4G3
  ENST ID: ENST00000503329
  CDS Start-End: 262-858
gagttccatgccacctccccgccctttacagacatgctataaggtccccagcccagtcactccgcagtgcctctctcttcctccccatggactatacacaggccctgcttgtcctggaggaaagtttggacgtcattatatagatcaggagactgaagtactgaaaggttaaatgacttgccaaagaatgagatctttttttctaacattttacataatatcctcagagaagatcacgccctggtgactagagctgtggccatgaaggtggaaaatttcaaaacaagtgaaatacaggaactctttgacatatttacttacagcaagggagcgtctatggcccggatgctttcttgtttcttgaatgagcatttatttgtcagtgcactcaagtcatatttgaagacattttcctactcaaacgctgagcaagatgatctatggaggcattttcaaatggccatagatgaccagagtacagttattttgccagcaacaataaaaaacataatggacagttggacacaccagagtggttttccagtgatcactttaaatgtgtctactggcgtcatgaaacaggagccattttatcttgaaaacattaaaaatcggactcttctaaccagcaatgacacatggattgtccctattctttggataaaaaatggaactacacaacctttagtctggctagatcaaagcagcaaagtattcccagaaatgcaagtttcagattctgaccatgactgggtgattttgaatttgaatatgactggatattatagagttaattatgataaattaggttggaagaaactaaatcaacaacttgaaaaggatcctaagatgagataagtcacgtgaaggtgctttataggcagcagtaatctttaaattgttgttattttgaaaactttgcggaaaaatgttctcatcttcttctgggcatatttgggtctaattctgcaggcgattcctgttattcacagactgcagttgattgatgatgccttttccttgtctaaccttcaagactttggacacttgaaagtaccaaattgaaatggaaggactgtcaactttgcttgggtttcatcctttctataagatgggacatttaccttctcgtttcttgacttattcacatgccttattgaagtcatgcattgaaacatggaacaaatatcgaacgtatgcaaattacttagcaagtgaaggttttttgagtgtgtgtgtttttaaatcaaacagaaacaattatattgagattgaaacagcacttgagttaaccaagtaccttgctgaagaagatgaaattatagtatggcatacagtcttggtaaacttggtaaccagggatcttgtttctgaggtgaacatctatgatatatactcattattaaagaggtacctattaaagagacttaatttaatatggaatatttattcaactataattcgtgaaaatgtgttggcattacaagatgactacttagctctaatatcactggaaaaactttttgtaactgcgtgttggttgggccttgaagactgccttcagctgtcaaaagaacttttcgcaaaatgggtggatcatccagaaaatgaaataccttatccaattaaagatgtggttttatgttatggcattgccttgggaagtgataaagagtgggacatcttgttaaatacttacactaatacaacaaacaaagaagaaaagattcaacttgcttatgcaatgagctgcagcaaagacccatggatacttaacagatatatggagtatgccatcagcacatctccattcacttctaatgaaacaaatataattgaggttgtggcttcatctgaagttggccggtatgtcgcaaaagacttcttagtcaacaactggcaagctgtgagtaaaagtcttttatttacttttttaactacagccacactttgagcaggtatggaacacaatcattgattaatctaatatatacaatagggagaaccgtaactacagatttacagattgtggagctgcagcagtttttcagtaacatgttggaggaacaccagaggatcagagttcatgccaacttacagacaataaagaatgaaaatctgaaaaacaagaagctaagtgccaggatagctgcgtggctaaggagaaacacatagcttgtggctatctttcagcactcctcttgcatattataatgtagtttgttcacagttttgtcttccaatactttgtgagtctggaaaaccacacattttatttgtatttcagtcacatttattactcagagtgccattcttctcatattgtcatgtttggccctgagggtgggtgattgctgacaattttgccaatgctgctgtatttctgggaaagatgtcacttcatgttgggttataatcccacagaatttactttaaatgtcacgtaaaaacaaattcacctaagatagtcttgcttattttgttgcgaaggccagtggaatataaaaatcaatggcattaatgaggagcacattctttgctgagggaaataacagtttttccaggccctagggtttatttagttcaacattgaagattgaaaagactaatgagaagataacatgacaatataaaaagacagaaactcaaaaagtatattcactagaagacagtggagccaaagaaaagcaagttgaaaaagaaagaggagacaatttaacgagccctaaaggcaagaagtgtgtcttctcctgcccatttctctctcccacagtacatcctgcattgaaccacgtgttgctggttactaaactttatggtgtcacaaaaagacaaatgattgtaggatccatggaagtgcacttaggcttgctgtggtggaggccatagtggagatgaaggctctgctctgaagctcttaattgtgtattcaccagtgggatggacaccctttcagcctaagcgtacgagtgaaaacaatgatgtcaaaagacaatagcaagtataggctactatttagggcaaaaggaatcttgaaatgaaagaaacagaactaaaaggctaactggagcataatccttacagttttgcactcaggggattaagtttgaaacatagtgtcttttggccaaattgaacctacttgtaatgtggaccaacttactttacacattttcatcagtcccaatgtatggaattagcttagttttctcatgcttgattaaaacaagacaactaaagctaatcattcctcttctagactttgtgtatatgatttaatcttttatttttatttttgtagaatgggggtaaaactacaaatctcctcctcagggtgatatttttaaagattaaggagtatgacatcaattaacagtctttaaagatgttacatacgctcaaagcaatgtgattaagactttttgcctatttcttgtataagttaaggcagccataaatgaaaatacaaaacaaacgtttgcttttgtatttgattcacaagaggattctccctgagtgtcaggggaggctgtgggacttcaccacgtggacaaacgaaagcacaggctactcagacttggccacaggtcataggtcagagaattttttcttcaaatgtagaaatgtaaattttcagcaataaaatatctgcatgcctacaaagtgttgtagctga

SEQ ID NO: 147359 - DNA, 2067 bp, Homo sapiens
  Payload ID: 9147
  Gene Symbol: LVRN
  Gene Name: laeverin
  Uniprot ID: Q6Q4G3
  ENST ID: ENST00000512314
  CDS Start-End: 242-838
gccctttacagacatgctataaggtccccagcccagtcactccgcagtgcctctctcttcctccccatggactatacacaggccctgcttgtcctggaggaaagtttggacgtcattatatagatcaggagactgaagtactgaaaggttaaatgacttgccaaagaatgagatctttttttctaacattttacataatatcctcagagaagatcacgccctggtgactagagctgtggccatgaaggtggaaaatttcaaaacaagtgaaatacaggaactctttgacatatttacttacagcaagggagcgtctatggcccggatgctttcttgtttcttgaatgagcatttatttgtcagtgcactcaagtcatatttgaagacattttcctactcaaacgctgagcaagatgatctatggaggcattttcaaatggccatagatgaccagagtacagttattttgccagcaacaataaaaaacataatggacagttggacacaccagagtggttttccagtgatcactttaaatgtgtctactggcgtcatgaaacaggagccattttatcttgaaaacattaaaaatcggactcttctaaccagcaatgacacatggattgtccctattctttggataaaaaatggaactacacaacctttagtctggctagatcaaagcagcaaagtattcccagaaatgcaagtttcagattctgaccatgactgggtgattttgaatttgaatatgactggatattatagagttaattatgataaattaggttggaagaaactaaatcaacaacttgaaaaggatcctaagatgagataagtcacgtgaaggtgctttataggcagcagtaatctttaaattgttgttattttgaaaactttgcggaaaaatgttctcatcttcttctgggcatatttgggtctaattctgcaggcgattcctgttattcacagactgcagttgattgatgatgccttttccttgtctaaaggtacctattaaagagacttaatttaatatggaatatttattcaactataattcgtgaaaatgtgttggcattacaagatgactacttagctctaatatcactggaaaaactttttgtaactgcgtgttggttgggccttgaagactgccttcagctgtcaaaagaacttttcgcaaaatgggtggatcatccagaaaatgaaataccttatccaattaaagatgtggttttatgttatggcattgccttgggaagtgataaagagtgggacatcttgttaaatacttacactaatacaacaaacaaagaagaaaagattcaacttgcttatgcaatgagctgcagcaaagacccatggatacttaacagatatatggagtatgccatcagcacatctccattcacttctaatgaaacaaatataattgaggttgtggcttcatctgaagttggccggtatgtcgcaaaagacttcttagtcaacaactggcaagctgtgagtaaaagtcttttatttacttttttaactacagccacactttgagcaggtatggaacacaatcattgattaatctaatatatacaatagggagaaccgtaactacagatttacagattgtggagctgcagcagtttttcagtaacatgttggaggaacaccagaggatcagagttcatgccaacttacagacaataaagaatgaaaatctgaaaaacaagaagctaagtgccaggatagctgcgtggctaaggagaaacacatagcttgtggctatctttcagcactcctcttgcatattataatgtagtttgttcacagttttgtcttccaatactttgtgagtctggaaaaccacacattttatttgtatttcagtcacatttattactcagagtgccattcttctcatattgtcatgtttggccctgagggtgggtgattgctgacaattttgccaatgctgctgtatttctgggaaagatgtcacttcatgttgggttataatcccacagaatttactttaaatgtcacgtaaaaacaaattcacctaagata

SEQ ID NO: 147360 - DNA, 2354 bp, Homo sapiens
  Payload ID: 9147
  Gene Symbol: LVRN
  Gene Name: laeverin
  Uniprot ID: Q6Q4G3
  ENST ID: ENST00000514509
  CDS Start-End: 262-942
gagttccatgccacctccccgccctttacagacatgctataaggtccccagcccagtcactccgcagtgcctctctcttcctccccatggactatacacaggccctgcttgtcctggaggaaagtttggacgtcattatatagatcaggagactgaagtactgaaaggttaaatgacttgccaaagaatgagatctttttttctaacattttacataatatcctcagagaagatcacgccctggtgactagagctgtggccatgaaggtggaaaatttcaaaacaagtgaaatacaggaactctttgacatatttacttacagcaagggagcgtctatggcccggatgctttcttgtttcttgaatgagcatttatttgtcagtgcactcaagtcatatttgaagacattttcctactcaaacgctgagcaagatgatctatggaggcattttcaaatggccatagatgaccagagtacagttattttgccagcaacaataaaaaacataatggacagttggacacaccagagtggttttccagtgatcactttaaatgtgtctactggcgtcatgaaacaggagccattttatcttgaaaacattaaaaatcggactcttctaaccagcaatgacacatggattgtccctattctttggataaaaaatggaactacacaacctttagtctggctagatcaaagcagcaaagtattcccagaaatgcaagtttcagattctgaccatgactgggtgattttgaatttgaatatgactggatattatagagttaattatgataaattaggttggaagaaactaaatcaacaacttgaaaaggatcctaaggcgattcctgttattcacagactgcagttgattgatgatgccttttccttgtctaaccttcaagactttggacacttgaaagtaccaaattgaaatggaaggactgtcaactttgcttgggtttcatcctttctataagatgggacatttaccttctcgtttcttgacttattcacatgccttattgaagtcatgcattgaaacatggaacaaatatcgaacgtatgcaaattacttagcaagtgaaggttttttgagtgtgtgtgtttttaaatcaaacagaaacaattatattgagattgaaacagcacttgagttaaccaagtaccttgctgaagaagatgaaattatagtatggcatacagtcttggtaaacttggtaaccagggatcttgtttctgaggtgaacatctatgatatatactcattattaaagaggtacctattaaagagacttaatttaatatggaatatttattcaactataattcgtgaaaatgtgttggcattacaagatgactacttagctctaatatcactggaaaaactttttgtaactgcgtgttggttgggccttgaagactgccttcagctgtcaaaagaacttttcgcaaaatgggtggatcatccagaaaatgaaataccttatccaattaaagatgtggttttatgttatggcattgccttgggaagtgataaagagtgggacatcttgttaaatacttacactaatacaacaaacaaagaagaaaagattcaacttgcttatgcaatgagctgcagcaaagacccatggatacttaacagatatatggagtatgccatcagcacatctccattcacttctaatgaaacaaatataattgaggttgtggcttcatctgaagttggccggtatgtcgcaaaagacttcttagtcaacaactggcaagctgtgagtaaaagtcttttatttacttttttaactacagccacactttgagcaggtatggaacacaatcattgattaatctaatatatacaatagggagaaccgtaactacagatttacagattgtggagctgcagcagtttttcagtaacatgttggaggaacaccagaggatcagagttcatgccaacttacagacaataaagaatgaaaatctgaaaaacaagaagctaagtgccaggatagctgcgtggctaaggagaaacacatagcttgtggctatctttcagcactcctcttgcatattataatgtagtttgttcacagttttgtcttccaatactttgtgagtctggaaaaccacacattttatttgtatttcagtcacatttattactcagagtgccattcttctcatattgtcatgtttggccctgagggtgggtgattgctgacaattttgccaatgctgctgtatttctgggaaagatgtcacttcatgttgggttataatcccacagaatttactttaaatgtcacgtaaaaacaaattcacctaagatagtcttgctta

SEQ ID NO: 147361 - DNA, 3137 bp, Homo sapiens
  Payload ID: 9148
  Gene Symbol: LMNA
  Gene Name: lamin A/C
  Uniprot ID: P02545
  ENST ID: ENST00000347559
  CDS Start-End: 250-2154
aggaggacctattagagcctttgccccggcgtcggtgactcagtgttcgcgggagcgccgcacctacaccagccaacccagatcccgaggtccgacagcgcccggcccagatccccacgcctgccaggagcaagccgagagccagccggccggcgcactccgactccgagcagtctctgtccttcgacccgagccccgcgccctttccgggacccctgccccgcgggcagcgctgccaacctgccggccatggagaccccgtcccagcggcgcgccacccgcagcggggcgcaggccagctccactccgctgtcgcccacccgcatcacccggctgcaggagaaggaggacctgcaggagctcaatgatcgcttggcggtctacatcgaccgtgtgcgctcgctggaaacggagaacgcagggctgcgccttcgcatcaccgagtctgaagaggtggtcagccgcgaggtgtccggcatcaaggccgcctacgaggccgagctcggggatgcccgcaagacccttgactcagtagccaaggagcgcgcccgcctgcagctggagctgagcaaagtgcgtgaggagtttaaggagctgaaagcgcgcaataccaagaaggagggtgacctgatagctgctcaggctcggctgaaggacctggaggctctgctgaactccaaggaggccgcactgagcactgctctcagtgagaagcgcacgctggagggcgagctgcatgatctgcggggccaggtggccaagcttgaggcagccctaggtgaggccaagaagcaacttcaggatgagatgctgcggcgggtggatgctgagaacaggctgcagaccatgaaggaggaactggacttccagaagaacatctacagtgaggagctgcgtgagaccaagcgccgtcatgagacccgactggtggagattgacaatgggaagcagcgtgagtttgagagccggctggcggatgcgctgcaggaactgcgggcccagcatgaggaccaggtggagcagtataagaaggagctggagaagacttattctgccaagctggacaatgccaggcagtctgctgagaggaacagcaacctggtgggggctgcccacgaggagctgcagcagtcgcgcatccgcatcgacagcctctctgcccagctcagccagctccagaagcagctggcagccaaggaggcgaagcttcgagacctggaggactcactggcccgtgagcgggacaccagccggcggctgctggcggaaaaggagcgggagatggccgagatgcgggcaaggatgcagcagcagctggacgagtaccaggagcttctggacatcaagctggccctggacatggagatccacgcctaccgcaagctcttggagggcgaggaggagaggctacgcctgtcccccagccctacctcgcagcgcagccgtggccgtgcttcctctcactcatcccagacacagggtgggggcagcgtcaccaaaaagcgcaaactggagtccactgagagccgcagcagcttctcacagcacgcacgcactagcgggcgcgtggccgtggaggaggtggatgaggagggcaagtttgtccggctgcgcaacaagtccaatgaggaccagtccatgggcaattggcagatcaagcgccagaatggagatgatcccttgctgacttaccggttcccaccaaagttcaccctgaaggctgggcaggtggtgacgatctgggctgcaggagctggggccacccacagcccccctaccgacctggtgtggaaggcacagaacacctggggctgcgggaacagcctgcgtacggctctcatcaactccactggggaaggctcccactgcagcagctcgggggaccccgctgagtacaacctgcgctcgcgcaccgtgctgtgcgggacctgcgggcagcctgccgacaaggcatctgccagcggctcaggagcccaggtgggcggacccatctcctctggctcttctgcctccagtgtcacggtcactcgcagctaccgcagtgtggggggcagtgggggtggcagcttcggggacaatctggtcacccgctcctacctcctgggcaactccagcccccgaacccagagcccccagaactgcagcatcatgtaatctgggacctgccaggcaggggtgggggtggaggcttcctgcgtcctcctcacctcatgcccaccccctgccctgcacgtcatgggagggggcttgaagccaaagaaaaataaccctttggtttttttcttctgtatttttttttctaagagaagttattttctacagtggttttatactgaaggaaaaacacaagcaaaaaaaaaaaaaagcatctatctcatctatctcaatcctaatttctcctcccttccttttccctgcttccaggaaactccacatctgccttaaaaccaaagagggcttcctctagaagccaagggaaaggggtgcttttatagaggctagcttctgcttttctgccctggctgctgcccccaccccggggaccctgtgacatggtgcctgagaggcaggcatagaggcttctccgccagcctcctctggacggcaggctcactgccaggccagcctccgagagggagagagagagagagaggacagcttgagccgggcccctgggcttggcctgctgtgattccactacacctggctgaggttcctctgcctgccccgcccccagtccccacccctgcccccagccccggggtgagtccattctcccaggtaccagctgcgcttgcttttctgtattttatttagacaagagatgggaatgaggtgggaggtggaagaagggagaagaaaggtgagtttgagctgccttccctagctttagaccctgggtgggctctgtgcagtcactggaggttgaagccaagtggggtgctgggaggagggagagggaggtcactggaaaggggagagcctgctggcacccaccgtggaggaggaaggcaagagggggtggaggggtgtggcagtggttttggcaaacgctaaagagcccttgcctccccatttcccatctgcaccccttctctcctccccaaatcaatacactagttgtttctacccctggc

SEQ ID NO: 147362 - DNA, 1713 bp, Homo sapiens
  Payload ID: 9148
  Gene Symbol: LMNA
  Gene Name: lamin A/C
  ENST ID: ENST00000361308
  CDS Start-End: 250-1713
aggaggacctattagagcctttgccccggcgtcggtgactcagtgttcgcgggagcgccgcacctacaccagccaacccagatcccgaggtccgacagcgcccggcccagatccccacgcctgccaggagcaagccgagagccagccggccggcgcactccgactccgagcagtctctgtccttcgacccgagccccgcgccctttccgggacccctgccccgcgggcagcgctgccaacctgccggccatggagaccccgtcccagcggcgcgccacccgcagcggggcgcaggccagctccactccgctgtcgcccacccgcatcacccggctgcaggagaaggaggacctgcaggagctcaatgatcgcttggcggtctacatcgaccgtgtgcgctcgctggaaacggagaacgcagggctgcgccttcgcatcaccgagtctgaagaggtggtcagccgcgaggtgtccggcatcaaggccgcctacgaggccgagctcggggatgcccgcaagacccttgactcagtagccaaggagcgcgcccgcctgcagctggagctgagcaaagtgcgtgaggagtttaaggagctgaaagcgcgcaataccaagaaggagggtgacctgatagctgctcaggctcggctgaaggacctggaggctctgctgaactccaaggaggccgcactgagcactgctctcagtgagaagcgcacgctggagggcgagctgcatgatctgcggggccaggtggccaagcttgaggcagccctaggtgaggccaagaagcaacttcaggatgagatgctgcggcgggtggatgctgagaacaggctgcagaccatgaaggaggaactggacttccagaagaacatctacagtgaggagctgcgtgagaccaagcgccgtcatgagacccgactggtggagattgacaatgggaagcagcgtgagtttgagagccggctggcggatgcgctgcaggaactgcgggcccagcatgaggaccaggtggagcagtataagaaggagctggagaagacttattctgccaagctggacaatgccaggcagtctgctgagaggaacagcaacctggtgggggctgcccacgaggagctgcagcagtcgcgcatccgcatcgacagcctctctgcccagctcagccagctccagaagcagctggcagccaaggaggcgaagcttcgagacctggaggactcactggcccgtgagcgggacaccagccggcggctgctggcggaaaaggagcgggagatggccgagatgcgggcaaggatgcagcagcagctggacgagtaccaggagcttctggacatcaagctggccctggacatggagatccacgcctaccgcaagctcttggagggcgaggaggagaggctacgcctgtcccccagccctacctcgcagcgcagccgtggccgtgcttcctctcactcatcccagacacagggtgggggcagcgtcaccaaaaagcgcaaactggagtccactgagagccgcagcagcttctcacagcacgcacgcactagcgggaacagcctgcgtacggctctcatcaactccactggggaagaagtggccatgcgcaagctggtgcgctcagtgactgtggttgaggacgacgaggatgaggatggagatgacctgctccatcaccaccacgtgagtggtagccgccgctga

SEQ ID NO: 147363 - DNA, 1679 bp, Homo sapiens
  Payload ID: 9148
  Gene Symbol: LMNA
  Gene Name: lamin A/C
  ENST ID: ENST00000368297
  CDS Start-End: 103-1578
gtgtgctgcctggcaatggggaactctgagggctgatttgccagtgatgggaagagttagaaacaggatgcccagcccttctcgcctcaagaggccactgggatgcagccactcctgtgcttggggaacctggaggatgcaagggaaaggactggcactctgctggcacagcacccggcctggggcaggacacgggcgaagccagggtctcccctcaataccaagaaggagggtgacctgatagctgctcaggctcggctgaaggacctggaggctctgctgaactccaaggaggccgcactgagcactgctctcagtgagaagcgcacgctggagggcgagctgcatgatctgcggggccaggtggccaagcttgaggcagccctaggtgaggccaagaagcaacttcaggatgagatgctgcggcgggtggatgctgagaacaggctgcagaccatgaaggaggaactggacttccagaagaacatctacagtgaggagctgcgtgagaccaagcgccgtcatgagacccgactggtggagattgacaatgggaagcagcgtgagtttgagagccggctggcggatgcgctgcaggaactgcgggcccagcatgaggaccaggtggagcagtataagaaggagctggagaagacttattctgccaagctggacaatgccaggcagtctgctgagaggaacagcaacctggtgggggctgcccacgaggagctgcagcagtcgcgcatccgcatcgacagcctctctgcccagctcagccagctccagaagcagctggcagccaaggaggcgaagcttcgagacctggaggactcactggcccgtgagcgggacaccagccggcggctgctggcggaaaaggagcgggagatggccgagatgcgggcaaggatgcagcagcagctggacgagtaccaggagcttctggacatcaagctggccctggacatggagatccacgcctaccgcaagctcttggagggcgaggaggagaggctacgcctgtcccccagccctacctcgcagcgcagccgtggccgtgcttcctctcactcatcccagacacagggtgggggcagcgtcaccaaaaagcgcaaactggagtccactgagagccgcagcagcttctcacagcacgcacgcactagcgggcgcgtggccgtggaggaggtggatgaggagggcaagtttgtccggctgcgcaacaagtccaatgaggaccagtccatgggcaattggcagatcaagcgccagaatggagatgatcccttgctgacttaccggttcccaccaaagttcaccctgaaggctgggcaggtggtgacgatctgggctgcaggagctggggccacccacagcccccctaccgacctggtgtggaaggcacagaacacctggggctgcgggaacagcctgcgtacggctctcatcaactccactggggaagaagtggccatgcgcaagctggtgcgctcagtgactgtggttgaggacgacgaggatgaggatggagatgacctgctccatcaccaccacgtgagtggtagccgccgctgaggccgagcctgcactggggccacccagccaggcctgggggcagcctctccccagcctccccgtgccaaaaatcttttcattaaagaatgttttggaacttt

SEQ ID NO: 147364 - DNA, 2253 bp, Homo sapiens
  Payload ID: 9148
  Gene Symbol: LMNA
  Gene Name: lamin A/C
  Uniprot ID: P02545
  ENST ID: ENST00000368299
  CDS Start-End: 198-2042
gagcgccgcacctacaccagccaacccagatcccgaggtccgacagcgcccggcccagatccccacgcctgccaggagcaagccgagagccagccggccggcgcactccgactccgagcagtctctgtccttcgacccgagccccgcgccctttccgggacccctgccccgcgggcagcgctgccaacctgccggccatggagaccccgtcccagcggcgcgccacccgcagcggggcgcaggccagctccactccgctgtcgcccacccgcatcacccggctgcaggagaaggaggacctgcaggagctcaatgatcgcttggcggtctacatcgaccgtgtgcgctcgctggaaacggagaacgcagggctgcgccttcgcatcaccgagtctgaagaggtggtcagccgcgaggtgtccggcatcaaggccgcctacgaggccgagctcggggatgcccgcaagacccttgactcagtagccaaggagcgcgcccgcctgcagctggagctgagcaaagtgcgtgaggagtttaaggagctgaaagcgcgcaataccaagaaggagggtgacctgatagctgctcaggctcggctgaaggacctggaggctctgctgaactccaaggaggccgcactgagcactgctctcagtgagaagcgcacgctggagggcgagctgcatgatctgcggggccaggtggccaagcttgaggcagccctaggtgaggccaagaagcaacttcaggatgagatgctgcggcgggtggatgctgagaacaggctgcagaccatgaaggaggaactggacttccagaagaacatctacagtgaggagctgcgtgagaccaagcgccgtcatgagacccgactggtggagattgacaatgggaagcagcgtgagtttgagagccggctggcggatgcgctgcaggaactgcgggcccagcatgaggaccaggtggagcagtataagaaggagctggagaagacttattctgccaagctggacaatgccaggcagtctgctgagaggaacagcaacctggtgggggctgcccacgaggagctgcagcagtcgcgcatccgcatcgacagcctctctgcccagctcagccagctccagaagcagctggcagccaaggaggcgaagcttcgagacctggaggactcactggcccgtgagcgggacaccagccggcggctgctggcggaaaaggagcgggagatggccgagatgcgggcaaggatgcagcagcagctggacgagtaccaggagcttctggacatcaagctggccctggacatggagatccacgcctaccgcaagctcttggagggcgaggaggagaggctacgcctgtcccccagccctacctcgcagcgcagccgtggccgtgcttcctctcactcatcccagacacagggtgggggcagcgtcaccaaaaagcgcaaactggagtccactgagagccgcagcagcttctcacagcacgcacgcactagcgggcgcgtggccgtggaggaggtggatgaggagggcaagtttgtccggctgcgcaacaagtccaatgaggaccagtccatgggcaattggcagatcaagcgccagaatggagatgatcccttgctgacttaccggttcccaccaaagttcaccctgaaggctgggcaggtggtgacgatctgggctgcaggagctggggccacccacagcccccctaccgacctggtgtggaaggcacagaacacctggggctgcgggaacagcctgcgtacggctctcatcaactccactggggaagaagtggccatgcgcaagctggtgcgctcagtgactgtggttgaggacgacgaggatgaggatggagatgacctgctccatcaccaccacggctcccactgcagcagctcgggggaccccgctgagtacaacctgcgctcgcgcaccgtgctgtgcgggacctgcgggcagcctgccgacaaggcatctgccagcggctcaggagcccagagcccccagaactgcagcatcatgtaatctgggacctgccaggcaggggtgggggtggaggcttcctgcgtcctcctcacctcatgcccaccccctgccctgcacgtcatgggagggggcttgaagccaaagaaaaataaccctttggtttttttcttctgtatttttttttctaagagaagttattttctacagtggttttatactgaaggaaaaacacaagcaaaaaaaaaaaaaa

SEQ ID NO: 147365 - DNA, 3190 bp, Homo sapiens
  Payload ID: 9148
  Gene Symbol: LMNA
  Gene Name: lamin A/C
  Uniprot ID: P02545
  ENST ID: ENST00000368300
  CDS Start-End: 213-2207
actcagtgttcgcgggagcgccgcacctacaccagccaacccagatcccgaggtccgacagcgcccggcccagatccccacgcctgccaggagcaagccgagagccagccggccggcgcactccgactccgagcagtctctgtccttcgacccgagccccgcgccctttccgggacccctgccccgcgggcagcgctgccaacctgccggccatggagaccccgtcccagcggcgcgccacccgcagcggggcgcaggccagctccactccgctgtcgcccacccgcatcacccggctgcaggagaaggaggacctgcaggagctcaatgatcgcttggcggtctacatcgaccgtgtgcgctcgctggaaacggagaacgcagggctgcgccttcgcatcaccgagtctgaagaggtggtcagccgcgaggtgtccggcatcaaggccgcctacgaggccgagctcggggatgcccgcaagacccttgactcagtagccaaggagcgcgcccgcctgcagctggagctgagcaaagtgcgtgaggagtttaaggagctgaaagcgcgcaataccaagaaggagggtgacctgatagctgctcaggctcggctgaaggacctggaggctctgctgaactccaaggaggccgcactgagcactgctctcagtgagaagcgcacgctggagggcgagctgcatgatctgcggggccaggtggccaagcttgaggcagccctaggtgaggccaagaagcaacttcaggatgagatgctgcggcgggtggatgctgagaacaggctgcagaccatgaaggaggaactggacttccagaagaacatctacagtgaggagctgcgtgagaccaagcgccgtcatgagacccgactggtggagattgacaatgggaagcagcgtgagtttgagagccggctggcggatgcgctgcaggaactgcgggcccagcatgaggaccaggtggagcagtataagaaggagctggagaagacttattctgccaagctggacaatgccaggcagtctgctgagaggaacagcaacctggtgggggctgcccacgaggagctgcagcagtcgcgcatccgcatcgacagcctctctgcccagctcagccagctccagaagcagctggcagccaaggaggcgaagcttcgagacctggaggactcactggcccgtgagcgggacaccagccggcggctgctggcggaaaaggagcgggagatggccgagatgcgggcaaggatgcagcagcagctggacgagtaccaggagcttctggacatcaagctggccctggacatggagatccacgcctaccgcaagctcttggagggcgaggaggagaggctacgcctgtcccccagccctacctcgcagcgcagccgtggccgtgcttcctctcactcatcccagacacagggtgggggcagcgtcaccaaaaagcgcaaactggagtccactgagagccgcagcagcttctcacagcacgcacgcactagcgggcgcgtggccgtggaggaggtggatgaggagggcaagtttgtccggctgcgcaacaagtccaatgaggaccagtccatgggcaattggcagatcaagcgccagaatggagatgatcccttgctgacttaccggttcccaccaaagttcaccctgaaggctgggcaggtggtgacgatctgggctgcaggagctggggccacccacagcccccctaccgacctggtgtggaaggcacagaacacctggggctgcgggaacagcctgcgtacggctctcatcaactccactggggaagaagtggccatgcgcaagctggtgcgctcagtgactgtggttgaggacgacgaggatgaggatggagatgacctgctccatcaccaccacggctcccactgcagcagctcgggggaccccgctgagtacaacctgcgctcgcgcaccgtgctgtgcgggacctgcgggcagcctgccgacaaggcatctgccagcggctcaggagcccaggtgggcggacccatctcctctggctcttctgcctccagtgtcacggtcactcgcagctaccgcagtgtggggggcagtgggggtggcagcttcggggacaatctggtcacccgctcctacctcctgggcaactccagcccccgaacccagagcccccagaactgcagcatcatgtaatctgggacctgccaggcaggggtgggggtggaggcttcctgcgtcctcctcacctcatgcccaccccctgccctgcacgtcatgggagggggcttgaagccaaagaaaaataaccctttggtttttttcttctgtatttttttttctaagagaagttattttctacagtggttttatactgaaggaaaaacacaagcaaaaaaaaaaaaaagcatctatctcatctatctcaatcctaatttctcctcccttccttttccctgcttccaggaaactccacatctgccttaaaaccaaagagggcttcctctagaagccaagggaaaggggtgcttttatagaggctagcttctgcttttctgccctggctgctgcccccaccccggggaccctgtgacatggtgcctgagaggcaggcatagaggcttctccgccagcctcctctggacggcaggctcactgccaggccagcctccgagagggagagagagagagagaggacagcttgagccgggcccctgggcttggcctgctgtgattccactacacctggctgaggttcctctgcctgccccgcccccagtccccacccctgcccccagccccggggtgagtccattctcccaggtaccagctgcgcttgcttttctgtattttatttagacaagagatgggaatgaggtgggaggtggaagaagggagaagaaaggtgagtttgagctgccttccctagctttagaccctgggtgggctctgtgcagtcactggaggttgaagccaagtggggtgctgggaggagggagagggaggtcactggaaaggggagagcctgctggcacccaccgtggaggaggaaggcaagagggggtggaggggtgtggcagtggttttggcaaacgctaaagagcccttgcctccccatttcccatctgcaccccttctctcctccccaaatcaatacactagttgtttctacccctggc

SEQ ID NO: 147366 - DNA, 2461 bp, Homo sapiens
  Payload ID: 9148
  Gene Symbol: LMNA
  Gene Name: lamin A/C
  Uniprot ID: P02545
  ENST ID: ENST00000368301
  CDS Start-End: 642-2360
attccttgacccgaggaggatagggatgtggccttcggtctttcctcgcagctccggggcaagctaggagtgggatggaagtcgagagtcgatcccggagcccggccgcggggagaggttctcggcagagaagacaaagcccgcagcagcgatggggggagagctgggctctgcgtgttgtgggggccaggaaagggtgccaggctggggctggaaccccctggcaaaggatggggtcccctcatccctaaacagcaagccatctcccctcgcccgccccccgcccccccagtctcggagatctcagaggcaccgactgggagacttgatgtaattgtcttcacaattctgtgaagatggacttggtgtctctgcttcacatgaagggacctgaggttcagagaggctaagtaactttcctaggtcacagagctgtgttcgcgggagcgccgcacctacaccagccaacccagatcccgaggtccgacagcgcccggcccagatccccacgcctgccaggagcaagccgagagccagccggccggcgcactccgactccgagcagtctctgtccttcgacccgagccccgcgccctttccgggacccctgccccgcgggcagcgctgccaacctgccggccatggagaccccgtcccagcggcgcgccacccgcagcggggcgcaggccagctccactccgctgtcgcccacccgcatcacccggctgcaggagaaggaggacctgcaggagctcaatgatcgcttggcggtctacatcgaccgtgtgcgctcgctggaaacggagaacgcagggctgcgccttcgcatcaccgagtctgaagaggtggtcagccgcgaggtgtccggcatcaaggccgcctacgaggccgagctcggggatgcccgcaagacccttgactcagtagccaaggagcgcgcccgcctgcagctggagctgagcaaagtgcgtgaggagtttaaggagctgaaagcgcgcaataccaagaaggagggtgacctgatagctgctcaggctcggctgaaggacctggaggctctgctgaactccaaggaggccgcactgagcactgctctcagtgagaagcgcacgctggagggcgagctgcatgatctgcggggccaggtggccaagcttgaggcagccctaggtgaggccaagaagcaacttcaggatgagatgctgcggcgggtggatgctgagaacaggctgcagaccatgaaggaggaactggacttccagaagaacatctacagtgaggagctgcgtgagaccaagcgccgtcatgagacccgactggtggagattgacaatgggaagcagcgtgagtttgagagccggctggcggatgcgctgcaggaactgcgggcccagcatgaggaccaggtggagcagtataagaaggagctggagaagacttattctgccaagctggacaatgccaggcagtctgctgagaggaacagcaacctggtgggggctgcccacgaggagctgcagcagtcgcgcatccgcatcgacagcctctctgcccagctcagccagctccagaagcagctggcagccaaggaggcgaagcttcgagacctggaggactcactggcccgtgagcgggacaccagccggcggctgctggcggaaaaggagcgggagatggccgagatgcgggcaaggatgcagcagcagctggacgagtaccaggagcttctggacatcaagctggccctggacatggagatccacgcctaccgcaagctcttggagggcgaggaggagaggctacgcctgtcccccagccctacctcgcagcgcagccgtggccgtgcttcctctcactcatcccagacacagggtgggggcagcgtcaccaaaaagcgcaaactggagtccactgagagccgcagcagcttctcacagcacgcacgcactagcgggcgcgtggccgtggaggaggtggatgaggagggcaagtttgtccggctgcgcaacaagtccaatgaggaccagtccatgggcaattggcagatcaagcgccagaatggagatgatcccttgctgacttaccggttcccaccaaagttcaccctgaaggctgggcaggtggtgacgatctgggctgcaggagctggggccacccacagcccccctaccgacctggtgtggaaggcacagaacacctggggctgcgggaacagcctgcgtacggctctcatcaactccactggggaagaagtggccatgcgcaagctggtgcgctcagtgactgtggttgaggacgacgaggatgaggatggagatgacctgctccatcaccaccacgtgagtggtagccgccgctgaggccgagcctgcactggggccacccagccaggcctgggggcagcctctccccagcctccccgtgccaaaaatcttttcattaaagaatgttttggaacttt

SEQ ID NO: 147367 - DNA, 1943 bp, Homo sapiens
  Payload ID: 9148
  Gene Symbol: LMNA
  Gene Name: lamin A/C
  Uniprot ID: P02545
  ENST ID: ENST00000448611
  CDS Start-End: 45-1769
gagaccctctgctcttctgctcccttcctgtgtgctgcctggcaatggggaactctgagggctgcaataccaagaaggagggtgacctgatagctgctcaggctcggctgaaggacctggaggctctgctgaactccaaggaggccgcactgagcactgctctcagtgagaagcgcacgctggagggcgagctgcatgatctgcggggccaggtggccaagcttgaggcagccctaggtgaggccaagaagcaacttcaggatgagatgctgcggcgggtggatgctgagaacaggctgcagaccatgaaggaggaactggacttccagaagaacatctacagtgaggagctgcgtgagaccaagcgccgtcatgagacccgactggtggagattgacaatgggaagcagcgtgagtttgagagccggctggcggatgcgctgcaggaactgcgggcccagcatgaggaccaggtggagcagtataagaaggagctggagaagacttattctgccaagctggacaatgccaggcagtctgctgagaggaacagcaacctggtgggggctgcccacgaggagctgcagcagtcgcgcatccgcatcgacagcctctctgcccagctcagccagctccagaagcagctggcagccaaggaggcgaagcttcgagacctggaggactcactggcccgtgagcgggacaccagccggcggctgctggcggaaaaggagcgggagatggccgagatgcgggcaaggatgcagcagcagctggacgagtaccaggagcttctggacatcaagctggccctggacatggagatccacgcctaccgcaagctcttggagggcgaggaggagaggctacgcctgtcccccagccctacctcgcagcgcagccgtggccgtgcttcctctcactcatcccagacacagggtgggggcagcgtcaccaaaaagcgcaaactggagtccactgagagccgcagcagcttctcacagcacgcacgcactagcgggcgcgtggccgtggaggaggtggatgaggagggcaagtttgtccggctgcgcaacaagtccaatgaggaccagtccatgggcaattggcagatcaagcgccagaatggagatgatcccttgctgacttaccggttcccaccaaagttcaccctgaaggctgggcaggtggtgacgatctgggctgcaggagctggggccacccacagcccccctaccgacctggtgtggaaggcacagaacacctggggctgcgggaacagcctgcgtacggctctcatcaactccactggggaagaagtggccatgcgcaagctggtgcgctcagtgactgtggttgaggacgacgaggatgaggatggagatgacctgctccatcaccaccacggctcccactgcagcagctcgggggaccccgctgagtacaacctgcgctcgcgcaccgtgctgtgcgggacctgcgggcagcctgccgacaaggcatctgccagcggctcaggagcccaggtgggcggacccatctcctctggctcttctgcctccagtgtcacggtcactcgcagctaccgcagtgtggggggcagtgggggtggcagcttcggggacaatctggtcacccgctcctacctcctgggcaactccagcccccgaacccagagcccccagaactgcagcatcatacaagagatgggaatgaggtgggaggtggaagaagggagaagaaaggtgagtttgagctgccttccctagctttagaccctgggtgggctctgtgcagtcactggaggttgaagccaagtggggtgctgggaggagggagagggaggtcactggaaaggggagagcctgctggcacccaccgtggaggaggaaggcaagagggggtggaggggtgtggcagtggttttggcaaacgctaaagag

SEQ ID NO: 147368 - DNA, 2015 bp, Homo sapiens
  Payload ID: 9148
  Gene Symbol: LMNA
  Gene Name: lamin A/C
  Uniprot ID: P02545
  ENST ID: ENST00000473598
  CDS Start-End: 121-1818
aaacagccccaagggcccgggcctgctgcagctggggagccggacttccttgtcccaccaggcacagctcttcagacccctgccttgggtcacatttggaggcttaaagctggggcccagatggacctggaggcctgggatccacatctggaaccagatgctgaggctatggtagatggcaataccaagaaggagggtgacctgatagctgctcaggctcggctgaaggacctggaggctctgctgaactccaaggaggccgcactgagcactgctctcagtgagaagcgcacgctggagggcgagctgcatgatctgcggggccaggtggccaagcttgaggcagccctaggtgaggccaagaagcaacttcaggatgagatgctgcggcgggtggatgctgagaacaggctgcagaccatgaaggaggaactggacttccagaagaacatctacagtgaggagctgcgtgagaccaagcgccgtcatgagacccgactggtggagattgacaatgggaagcagcgtgagtttgagagccggctggcggatgcgctgcaggaactgcgggcccagcatgaggaccaggtggagcagtataagaaggagctggagaagacttattctgccaagctggacaatgccaggcagtctgctgagaggaacagcaacctggtgggggctgcccacgaggagctgcagcagtcgcgcatccgcatcgacagcctctctgcccagctcagccagctccagaagcagctggcagccaaggaggcgaagcttcgagacctggaggactcactggcccgtgagcgggacaccagccggcggctgctggcggaaaaggagcgggagatggccgagatgcgggcaaggatgcagcagcagctggacgagtaccaggagcttctggacatcaagctggccctggacatggagatccacgcctaccgcaagctcttggagggcgaggaggagaggctacgcctgtcccccagccctacctcgcagcgcagccgtggccgtgcttcctctcactcatcccagacacagggtgggggcagcgtcaccaaaaagcgcaaactggagtccactgagagccgcagcagcttctcacagcacgcacgcactagcgggcgcgtggccgtggaggaggtggatgaggagggcaagtttgtccggctgcgcaacaagtccaatgaggaccagtccatgggcaattggcagatcaagcgccagaatggagatgatcccttgctgacttaccggttcccaccaaagttcaccctgaaggctgggcaggtggtgacgatctgggctgcaggagctggggccacccacagcccccctaccgacctggtgtggaaggcacagaacacctggggctgcgggaacagcctgcgtacggctctcatcaactccactggggaagaagtggccatgcgcaagctggtgcgctcagtgactgtggttgaggacgacgaggatgaggatggagatgacctgctccatcaccaccacggctcccactgcagcagctcgggggaccccgctgagtacaacctgcgctcgcgcaccgtgctgtgcgggacctgcgggcagcctgccgacaaggcatctgccagcggctcaggagcccaggtgggcggacccatctcctctggctcttctgcctccagtgtcacggtcactcgcagctaccgcagtgtggggggcagtgggggtggcagcttcggggacaatctggtcacccgctcctacctcctgggcaactccagcccccgaacccagagcccccagaactgcagcatcatgtaatctgggacctgccaggcaggggtgggggtggaggcttcctgcgtcctcctcacctcatgcccaccccctgccctgcacgtcatgggagggggcttgaagccaaagaaaaataaccctttggtttttttcttctgtatttttttttctaagagaagttattttctacagtggttttatactgaaggaaaaacacaagc

SEQ ID NO: 147369 - DNA, 757 bp, Homo sapiens
  Payload ID: 9148
  Gene Symbol: LMNA
  Gene Name: lamin A/C
  ENST ID: ENST00000515459
  CDS Start-End: 118-234
ttctgctcccttcctgtgtgctgcctggcaatggggaactctgagggctgatttgccagtgatgggaagagttagaaacaggatgcccagcccttctcgcctcaagaggccactgggatgcagccactcctgtgcttggggaacctggaggatgcaagggaaaggactggcactctgctggcacagcacccggcctggggcaggacacgggcgaagccagggtctcccctgtgagcactagaggatttcccgacccctgcccggcaataccaagaaggagggtgacctgatagctgctcaggctcggctgaaggacctggaggctctgctgaactccaaggaggccgcactgagcactgctctcagtgagaagcgcacgctggagggcgagctgcatgatctgcggggccaggtggccaagcttgaggcagccctaggtgaggccaagaagcaacttcaggatgagatgctgcggcgggtggatgctgagaacaggctgcagaccatgaaggaggaactggacttccagaagaacatctacagtgaggagctgcgtgagaccaagcgccgtcatgagacccgactggtggagattgacaatgggaagcagcgtgagtttgagagccggctggcggatgcgctgcaggaactgcgggcccagcatgaggaccaggtggagcagtataagaaggagctggagaagacttattctgccaagctggacaatgccaggcagtctgctgagaggaacagcaac

SEQ ID NO: 147370 - DNA, 848 bp, Homo sapiens
  Payload ID: 9148
  Gene Symbol: LMNA
  Gene Name: lamin A/C
  ENST ID: ENST00000508500
  CDS Start-End: 1-783
gcctaccgcaagctcttggagggcgaggaggagaggctacgcctgtcccccagccctacctcgcagcgcagccgtggccgtgcttcctctcactcatcccagacacagggtgggggcagcgtcaccaaaaagcgcaaactggagtccactgagagccgcagcagcttctcacagcacgcacgcactagcgggcgcgtggccgtggaggaggtggatgaggagggcaagtttgtccggctgcgcaacaagtccaatgaggaccagtccatgggcaattggcagatcaagcgccagaatggagatgatcccttgctgacttaccggttcccaccaaagttcaccctgaaggctgggcaggtggtgacgatctgggctgcaggagctggggccacccacagcccccctaccgacctggtgtggaaggcacagaacacctggggctgcgggaacagcctgcgtacggctctcatcaactccactggggaaggctcccactgcagcagctcgggggaccccgctgagtacaacctgcgctcgcgcaccgtgctgtgcgggacctgcgggcagcctgccgacaaggcatctgccagcggctcaggagcccaggtgggcggacccatctcctctggctcttctgcctccagtgtcacggtcactcgcagctaccgcagtgtggggggcagtgggggtggcagcttcggggacaatctggtcacccgctcctacctcctgggcaactccagcccccgaacccagagcccccagaactgcagcatcatgtaatctgggacctgccaggcaggggtgggggtggaggcttcctgcgtcctcctcacctcatgcccacc

SEQ ID NO: 147371 - DNA, 546 bp, Homo sapiens
  Payload ID: 9148
  Gene Symbol: LMNA
  Gene Name: lamin A/C
  ENST ID: ENST00000504687
  CDS Start-End: 1-546
tttcttccccaaacagccccaagggcccgggcctgctgcagctggggagccggacttccttgtcccaccaggcacagctcttcagacccctgccttgggtcacatttcaataccaagaaggagggtgacctgatagctgctcaggctcggctgaaggacctggaggctctgctgaactccaaggaggccgcactgagcactgctctcagtgagaagcgcacgctggagggcgagctgcatgatctgcggggccaggtggccaagcttgaggcagccctaggtgaggccaagaagcaacttcaggatgagatgctgcggcgggtggatgctgagaacaggctgcagaccatgaaggaggaactggacttccagaagaacatctacagtgaggagctgcgtgagaccaagcgccgtcatgagacccgactggtggagattgacaatgggaagcagcgtgagtttgagagccggctggcggatgcgctgcaggaactgcgggcccagcatgaggaccaggtggagcagtataagaaggagctggagaag

SEQ ID NO: 147372 - DNA, 3745 bp, Homo sapiens
  Payload ID: 9149
  Gene Symbol: LBR
  Gene Name: lamin B receptor
  Uniprot ID: Q14739
  ENST ID: ENST00000272163
  CDS Start-End: 97-1944
gtcgcgcgcgtggatctgccgccgggttgctgtgcgactattctccgggagccgtccgtgtcaccgccggaacctggcgcaggttaattatagaaaatgccaagtaggaaatttgccgatggtgaagtggtaagaggtcgatggcctgggagttcactttattatgaagtagaaattctgagccacgacagcacctcccagctttacactgtgaagtataaagatggaacagagcttgaattgaaagagaatgatattaagcctttaacttcctttaggcaaaggaaaggtggctcaacttccagttccccttccagacgccgagggagtcgatcaaggtcacgctcccgatcccctggtcgaccacctaaaagtgcccgccgatctgcttctgcttcccaccaggccgacattaaggaagcaaggagggaagtggaagttaaattgactccgctgattctgaagccatttggaaatagcatcagcagatataatggggagcctgagcatattgagagaaatgacgcacctcataaaaatacacaggaaaaattcagtttgtcacaagaaagcagttacatagcaacacagtatagccttcgtccaagaagagaagaagtcaaattaaaagaaatagattctaaggaagaaaaatacgttgcaaaagaactggcagtgagaacctttgaagtgacccccatccgggcaaaggacttggagtttggaggagtacctggtgtgtttctcatcatgtttggcctgcctgtgttcctcttcctgttgctgttgatgtgtaaacagaaagatcccagtcttctgaatttccctcctcctttgccagctttgtatgagttatgggaaaccagagtatttggggtctacctcctgtggtttttgattcaagtcctgttctacctactgccaattggaaaggttgtagaaggaacgcctcttattgatggaagaagactcaagtatagattaaatggattctatgcttttatcctgacatctgcagtcatcggaacatctctcttccagggcgtagagtttcattacgtgtacagtcattttcttcagtttgcacttgcggccactgttttttgtgtggtcttgagtgtgtatctctacatgcgctctttgaaagcgccccggaatgacctgtcgcctgccagctctggaaatgctgtctatgatttcttcattggccgtgaattaaaccctcgaattggtacttttgatctcaaatacttttgtgaattgcgccccggattgattggatgggtggttattaacttggtgatgcttttggctgaaatgaaaatacaggaccgcgctgttccatccttggccatgattttagttaatagtttccagcttctctatgtggtggatgctctctggaatgaggaagcgttgttgacgaccatggacatcatccacgatggatttggattcatgctggcttttggagacttggtgtgggttccctttatttacagcttccaagccttttatttagtcagtcatccaaatgaagtgtcttggccaatggcttctctaattattgttctgaaactttgtggttatgtaatcttccgaggtgcaaattctcagaaaaatgcattccggaaaaatcccagtgatccaaagcttgcacatttaaaaaccattcatacttcaacgggaaaaaatcttctagtttctggatggtggggctttgttcgccaccccaattacttgggtgatctcatcatggccttggcgtggtccctcccatgtggttttaaccacattctgccttatttctacataatttatttcaccatgttgcttgtccaccgagaagctcgtgacgagtaccactgtaagaagaaatacggcgtggcttgggaaaagtactgtcagcgtgtgccctaccgtatatttccatacatctactaatgctcttctggcttttctacaaaatactcctgcaattccagctgccatttgcaaaaacaaggaaaaaaatccgaaactttcttttgttgcactgacagggtctgtacttttttttttctttttgagtcaggactatggagccgagtagttgatcttttaatatagccgtgtttacttgtattaacttacagttaacataggaaaaatacaagtaaggatgtgagaatttgcattttaatgggaaattttcaacccttaatctgaaaacagaagacagtcttaatataaatgtactgtgaagaatgctattgatgtttatggtttctgattacttttcaaattttgatgtttttttgccagttggcttttcttaaatgaaaacactgttccatttaaagtacatttatgttttattcagtaagagaatagaattttcatttgtttttctttaaatcctttactaattatataatttgaaagcaaaaagaagggcctatattaaatgctgaaagtgaaaagtgatgacattattagcagacactgcttaaaggagaccatttgtagcagttggcttaacctcaacttctaaaactacattgaaaatgtaaatacatagcttagttttttgtaatatatggtgacttcagatttttttgtacagtattttgaatgtgagatgattgtcaggactaactgtctttttaacaaaacattttcagtattttaaataaaattttgtaaagtaatgtgaattaaaaattttggaacaattagaattcattcactattgtatagaagatgctgttaaaacataggaagggtatttttcttgatccaaagtttgtgaatttggctttgctacctcaattgcaggtgtttgtttgcctttataaactgttgcaaatagaaaaaaaatagaataagtatatatttttggagtaacatcaatatttaaacatttttacacagatcggtgtttgaaaatttgccatttcaggctaatatttttatatatttttgactttttaaaagttcatcagtgtttttgctactgttaagcttatgcagtttatactgtattttttatgtatcctttatatttaccaaacctgactccctgtaaaggagtgctgtcttaaaaacaactgaaggggttaaagtcgtttcttttagtttaatagatgtgcataaggtagctttagcaattaaattctagtgaagttgatatagtctcatttttaattgtcctgtaatggaacagtagcaaattcactaaacttttgtgttcagagttaaattgttctcagtactttcaatgtaggggaatgtaataaacatagtgtgtatgtttgggttttaattacacattttatatatgagccatttagatatgcagtgttaattctatactgcatttgaagtgtatgtaacttagcttatgttaatgcagtcatgaagttggtttgctccagcatccggtagtctttaaacattcttttagtgaaattgtcattgttttatcagtgctaatgtgtgcaagcagtttttttattttgcttttctcctggcatcagaaagtggtggcgttttctgtactggattgcaccaaggaagcttttggggaggaaggaaggacattaaattctttccctggtaatgaaaagagccctttatcaatacagtgctgcaatttctggatatcagctacactttgtttttaagtttgtttttgacatgtttatttggcaaattttataatgaagttttaagttgaaaataaaatgtagcaacattttgatca

SEQ ID NO: 147373 - DNA, 3812 bp, Homo sapiens
  Payload ID: 9149
  Gene Symbol: LBR
  Gene Name: lamin B receptor
  Uniprot ID: Q14739
  ENST ID: ENST00000338179
  CDS Start-End: 165-2012
gttcaattaaaaccaggcttgtaggttgcaggtcaagttgtgtttcggtgtgtaacgcataaaacttcttgttccacgctccgcggtgttggggattttctactgcatctcgacagcatctcgggtaacaaccgagcccctcctcgcagcgttaattatagaaaatgccaagtaggaaatttgccgatggtgaagtggtaagaggtcgatggcctgggagttcactttattatgaagtagaaattctgagccacgacagcacctcccagctttacactgtgaagtataaagatggaacagagcttgaattgaaagagaatgatattaagcctttaacttcctttaggcaaaggaaaggtggctcaacttccagttccccttccagacgccgagggagtcgatcaaggtcacgctcccgatcccctggtcgaccacctaaaagtgcccgccgatctgcttctgcttcccaccaggccgacattaaggaagcaaggagggaagtggaagttaaattgactccgctgattctgaagccatttggaaatagcatcagcagatataatggggagcctgagcatattgagagaaatgacgcacctcataaaaatacacaggaaaaattcagtttgtcacaagaaagcagttacatagcaacacagtatagccttcgtccaagaagagaagaagtcaaattaaaagaaatagattctaaggaagaaaaatacgttgcaaaagaactggcagtgagaacctttgaagtgacccccatccgggcaaaggacttggagtttggaggagtacctggtgtgtttctcatcatgtttggcctgcctgtgttcctcttcctgttgctgttgatgtgtaaacagaaagatcccagtcttctgaatttccctcctcctttgccagctttgtatgagttatgggaaaccagagtatttggggtctacctcctgtggtttttgattcaagtcctgttctacctactgccaattggaaaggttgtagaaggaacgcctcttattgatggaagaagactcaagtatagattaaatggattctatgcttttatcctgacatctgcagtcatcggaacatctctcttccagggcgtagagtttcattacgtgtacagtcattttcttcagtttgcacttgcggccactgttttttgtgtggtcttgagtgtgtatctctacatgcgctctttgaaagcgccccggaatgacctgtcgcctgccagctctggaaatgctgtctatgatttcttcattggccgtgaattaaaccctcgaattggtacttttgatctcaaatacttttgtgaattgcgccccggattgattggatgggtggttattaacttggtgatgcttttggctgaaatgaaaatacaggaccgcgctgttccatccttggccatgattttagttaatagtttccagcttctctatgtggtggatgctctctggaatgaggaagcgttgttgacgaccatggacatcatccacgatggatttggattcatgctggcttttggagacttggtgtgggttccctttatttacagcttccaagccttttatttagtcagtcatccaaatgaagtgtcttggccaatggcttctctaattattgttctgaaactttgtggttatgtaatcttccgaggtgcaaattctcagaaaaatgcattccggaaaaatcccagtgatccaaagcttgcacatttaaaaaccattcatacttcaacgggaaaaaatcttctagtttctggatggtggggctttgttcgccaccccaattacttgggtgatctcatcatggccttggcgtggtccctcccatgtggttttaaccacattctgccttatttctacataatttatttcaccatgttgcttgtccaccgagaagctcgtgacgagtaccactgtaagaagaaatacggcgtggcttgggaaaagtactgtcagcgtgtgccctaccgtatatttccatacatctactaatgctcttctggcttttctacaaaatactcctgcaattccagctgccatttgcaaaaacaaggaaaaaaatccgaaactttcttttgttgcactgacagggtctgtacttttttttttctttttgagtcaggactatggagccgagtagttgatcttttaatatagccgtgtttacttgtattaacttacagttaacataggaaaaatacaagtaaggatgtgagaatttgcattttaatgggaaattttcaacccttaatctgaaaacagaagacagtcttaatataaatgtactgtgaagaatgctattgatgtttatggtttctgattacttttcaaattttgatgtttttttgccagttggcttttcttaaatgaaaacactgttccatttaaagtacatttatgttttattcagtaagagaatagaattttcatttgtttttctttaaatcctttactaattatataatttgaaagcaaaaagaagggcctatattaaatgctgaaagtgaaaagtgatgacattattagcagacactgcttaaaggagaccatttgtagcagttggcttaacctcaacttctaaaactacattgaaaatgtaaatacatagcttagttttttgtaatatatggtgacttcagatttttttgtacagtattttgaatgtgagatgattgtcaggactaactgtctttttaacaaaacattttcagtattttaaataaaattttgtaaagtaatgtgaattaaaaattttggaacaattagaattcattcactattgtatagaagatgctgttaaaacataggaagggtatttttcttgatccaaagtttgtgaatttggctttgctacctcaattgcaggtgtttgtttgcctttataaactgttgcaaatagaaaaaaaatagaataagtatatatttttggagtaacatcaatatttaaacatttttacacagatcggtgtttgaaaatttgccatttcaggctaatatttttatatatttttgactttttaaaagttcatcagtgtttttgctactgttaagcttatgcagtttatactgtattttttatgtatcctttatatttaccaaacctgactccctgtaaaggagtgctgtcttaaaaacaactgaaggggttaaagtcgtttcttttagtttaatagatgtgcataaggtagctttagcaattaaattctagtgaagttgatatagtctcatttttaattgtcctgtaatggaacagtagcaaattcactaaacttttgtgttcagagttaaattgttctcagtactttcaatgtaggggaatgtaataaacatagtgtgtatgtttgggttttaattacacattttatatatgagccatttagatatgcagtgttaattctatactgcatttgaagtgtatgtaacttagcttatgttaatgcagtcatgaagttggtttgctccagcatccggtagtctttaaacattcttttagtgaaattgtcattgttttatcagtgctaatgtgtgcaagcagtttttttattttgcttttctcctggcatcagaaagtggtggcgttttctgtactggattgcaccaaggaagcttttggggaggaaggaaggacattaaattctttccctggtaatgaaaagagccctttatcaatacagtgctgcaatttctggatatcagctacactttgtttttaagtttgtttttgacatgtttatttggcaaattttataatgaagttttaagttgaaaataaaatgtagcaacattttgatc

SEQ ID NO: 147374 - DNA, 874 bp, Homo sapiens
  Payload ID: 9149
  Gene Symbol: LBR
  Gene Name: lamin B receptor
  ENST ID: ENST00000425080
  CDS Start-End: 235-874
agcagaaaaaaaaaagcttaggatccgtaacagattcggagtcaacaatgacatgactcagcattttggggttcaattaaaaccaggcttgtaggttgcaggtcaagttgtgtttcggtgtgtaacgcataaaacttcttgttccacgctccgcggtgttggggattttctactgcatctcgacagcatctcgggtaacaaccgagcccctcctcgcagcgttaattatagaaaatgccaagtaggaaatttgccgatggtgaagtggtaagaggtcgatggcctgggagttcactttattatgaagtagaaattctgagccacgacagcacctcccagctttacactgtgaagtataaagatggaacagagcttgaattgaaagagaatgatattaagcctttaacttcctttaggcaaaggaaaggtggctcaacttccagttccccttccagacgccgagggagtcgatcaaggtcacgctcccgatcccctggtcgaccacctaaaagtgcccgccgatctgcttctgcttcccaccaggccgacattaaggaagcaaggagggaagtggaagttaaattgactccgctgattctgaagccatttggaaatagcatcagcagatataatggggagcctgagcatattgagagaaatgacgcacctcataaaaatacacaggaaaaattcagtttgtcacaagaaagcagttacatagcaacacagtatagccttcgtccaagaagagaagaagtcaaattaaaagaaatagattctaaggaagaaaaatacgttgcaaaagaactggcagtgagaacctttgaagtgacccccatccgggcaaaggacttggagtttggaggagtacctg

SEQ ID NO: 147375 - DNA, 736 bp, Homo sapiens
  Payload ID: 9149
  Gene Symbol: LBR
  Gene Name: lamin B receptor
  ENST ID: ENST00000421383
  CDS Start-End: 582-736
gccgctgggggaggaagcccgaggccggcgcagcggccgggccggggaccctgggcgcggggcctggcgcggcggccttcccctcctctcctcgcctcctcgtctcctcccctcctcgccttttctggcccagtcgggtggtcggggcggcggcgggcgaggctggagctcgcccgagccgggcccgctgcggaaatggagctgggggttttaaactgcggacgtttccctccatgttggcggcgcggcgcggctgtggagcggcggcggcagggagggttcgtgggcgcctttgtcctgccccaccgcagcctggctcccggcccctccgagcgcccgtctgacagatgagcaggcggccccgcggtcctgcagtaggaggctgacagggcgcggcggcctggcgggacggggaagggtctgcggccgaggtgggcttagattcgcgctgcttgtcactggctttgagggtcgtggtcgtcgcggtttggtgattctccaggcacactgcatggctgctcgctcctatgcgttgaattccttcgcccggacagtctcaaaaatcgggttaattatagaaaatgccaagtaggaaatttgccgatggtgaagtggtaagaggtcgatggcctgggagttcactttattatgaagtagaaattctgagccacgacagcacctcccagctttacactgtgaagtataaagatggaacagagcttgaattgaaagagaa

SEQ ID NO: 147376 - DNA, 2878 bp, Homo sapiens
  Payload ID: 9150
  Gene Symbol: LMNB1
  Gene Name: lamin B1
  Uniprot ID: P20700
  ENST ID: ENST00000261366
  CDS Start-End: 362-2122
ctgagaggaaacaaagtgctgcgagcaggagacggcggcggcgcgaaccctgctgggcctccagtcaccctcgtcttgcattttcccgcgtgcgtgtgtgagtgggtgtgtgtgttttcttacaaagggtatttcgcgatcgatcgattgattcgtagttcccccccgcgcgcctttgccctttgtgctgtaatcgagctcccgccatcccaggtgcttctccgttcctctaaacgccagcgtctggacgtgagcgcaggtcgccggtttgtgccttcggtccccgcttcgccccctgccgtcccctccttatcacggtcccgctcgcggcctcgccgccccgctgtctccgccgcccgccatggcgactgcgacccccgtgccgccgcggatgggcagccgcgctggcggccccaccacgccgctgagccccacgcgcctgtcgcggctccaggagaaggaggagctgcgcgagctcaatgaccggctggcggtgtacatcgacaaggtgcgcagcctggagacggagaacagcgcgctgcagctgcaggtgacggagcgcgaggaggtgcgcggccgtgagctcaccggcctcaaggcgctctacgagaccgagctggccgacgcgcgacgcgcgctcgacgacacggcccgcgagcgcgccaagctgcagatcgagctgggcaagtgcaaggcggaacacgaccagctgctcctcaactatgctaagaaggaatctgatcttaatggcgcccagatcaagcttcgagaatatgaagcagcactgaattcgaaagatgcagctcttgctactgcacttggtgacaaaaaaagtttagagggagatttggaggatctgaaggatcagattgcccagttggaagcctccttagctgcagccaaaaaacagttagcagatgaaactttacttaaagtagatttggagaatcgttgtcagagccttactgaggacttggagtttcgcaaaagcatgtatgaagaggagattaacgagaccagaaggaagcatgaaacgcgcttggtagaggtggattctgggcgtcaaattgagtatgagtacaagctggcgcaagcccttcatgagatgagagagcaacatgatgcccaagtgaggctgtataaggaggagctggagcagacttaccatgccaaacttgagaatgccagactgtcatcagagatgaatacttctactgtcaacagtgccagggaagaactgatggaaagccgcatgagaattgagagcctttcatcccagctttctaatctacagaaagagtctagagcatgtttggaaaggattcaagaattagaggacttgcttgctaaagaaaaagacaactctcgtcgcatgctgacagacaaagagagagagatggcggaaataagggatcaaatgcagcaacagctgaatgactatgaacagcttcttgatgtaaagttagccctggacatggaaatcagtgcttacaggaaactcttagaaggcgaagaagagaggttgaagctgtctccaagcccttcttcccgtgtgacagtatcccgagcatcctcaagtcgtagtgtacgtacaactagaggaaagcggaagagggttgatgtggaagaatcagaggcgagtagtagtgttagcatctctcattccgcctcagccactggaaatgtttgcatcgaagaaattgatgttgatgggaaatttatccgcttgaagaacacttctgaacaggatcaaccaatgggaggctgggagatgatcagaaaaattggagacacatcagtcagttataaatatacctcaagatatgtgctgaaggcaggccagactgttacaatttgggctgcaaacgctggtgtcacagccagccccccaactgacctcatctggaagaaccagaactcgtggggcactggcgaagatgtgaaggttatattgaaaaattctcagggagaggaggttgctcaaagaagtacagtctttaaaacaaccatacctgaagaagaggaggaggaggaagaagcagctggagtggttgttgaggaagaacttttccaccagcagggaaccccaagagcatccaatagaagctgtgcaattatgtaaaattttcaactgtcttcctcaaaataaagaagtatggtaatctttacctgtatacagtgcagagccttctcagaagcacagaatatttttatatttcctttatgtgaatttttaagctgcaaatctgatggccttaatttcctttttgacactgaaagttttgtaaaagaaatcatgtccatacactttgttgcaagatgtgaattattgacactgaacttaataactgtgtactgttcggaaggggttcctcaaattttttgactttttttgtatgtgtgttttttctttttttttaagttcttatgaggaggggagggtaaataaaccactgtgcgtcttggtgtaatttgaagattgccccatctagactagcaatctcttcattattctctgctatatataaaacggtgctgtgagggaggggaaaagcatttttcaatatattgaacttttgtactgaatttttttgtaataagcaatcaaggttataattttttttaaaatagaaattttgtaagaaggcaatattaacctaatcaccatgtaagcactctggatgatggattccacaaaacttggttttatggttacttcttctcttagattcttaattcatgaggagggtgggggagggaggtggagggagggaagggtttctctattaaaatgcattcgttgtgttttttaagatagtgtaacttgcttaaatttcttatgtgacattaacaaataaaaaagctcttttaatattga

SEQ ID NO: 147377 - DNA, 1572 bp, Homo sapiens
  Payload ID: 9150
  Gene Symbol: LMNB1
  Gene Name: lamin B1
  ENST ID: ENST00000395354
  CDS Start-End: 321-1484
cgcgaaccctgctgggcctccagtcaccctcgtcttgcattttcccgcgtgcgtgtgtgagtgggtgtgtgtgttttcttacaaagggtatttcgcgatcgatcgattgattcgtagttcccccccgcgcgcctttgccctttgtgctgtaatcgagctcccgccatcccaggtgcttctccgttcctctaaacgccagcgtctggacgtgagcgcaggtcgccggtttgtgccttcggtccccgcttcgccccctgccgtcccctccttatcacggtcccgctcgcggcctcgccgccccgctgtctccgccgcccgccatggcgactgcgacccccgtgccgccgcggatgggcagccgcgctggcggccccaccacgccgctgagccccacgcgcctgtcgcggctccaggagaaggaggagctgcgcgagctcaatgaccggctggcggtgtacatcgacaaggtgcgcagcctggagacggagaacagcgcgctgcagctgcaggtgacggagcgcgaggaggtgcgcggccgtgagctcaccggcctcaaggcgctctacgagaccgagctggccgacgcgcgacgcgcgctcgacgacacggcccgcgagcgcgccaagctgcagatcgagctgggcaagtgcaaggcggaacacgaccagctgctcctcaactatgctaagaaggaatctgatcttaatggcgcccagatcaagcttcgagaatatgaagcagcactgaattcgaaagatgcagctcttgctactgcacttggtgacaaaaaaagtttagagggagatttggaggatctgaaggatcagattgcccagttggaagcctccttagctgcagccaaaaaacagttagcagatgaaactttacttaaagtagatttggagaatcgttgtcagagccttactgaggacttggagtttcgcaaaagcatgtatgaagaggagattaacgagaccagaaggaagcatgaaacgcgcttggtagaggtggattctgggcgtcaaattgagtatgagtacaagctggcgcaagcccttcatgagatgagagagcaacatgatgcccaagtgaggctgtataaggaggagctggagcagacttaccatgccaaacttgagaatgccagactgtcatcagagatgaatacttctactgtcaacagtgccagggaagaactgatggaaagccgcatgagaattgagagcctttcatcccagctttctaatctacagaaagagtctagagcatgtttggaaaggattcaagaattagaggacttgcttgctaaagaaaaagacaactctcgtcgcatgctgacagacaaagagagagagatggcggaaataagggatcaaatgcagcaacagctgaatgactatgaacagcttcttgatgtaaagttagccctggacatggaaatcagtgcttacaggaaactcttagaaggcgaagaagagaggtaaggaacttaagggtcaccctaccttatggtccactttttgcctctcaccctttttattgaaataaaaataaatagcattttaaaaagaa

SEQ ID NO: 147378 - DNA, 3475 bp, Homo sapiens
  Payload ID: 9150
  Gene Symbol: LMNB1
  Gene Name: lamin B1
  ENST ID: ENST00000460265
  CDS Start-End: 887-1876
ggagcgggggataaggttaccacgcccgcggtggccggggacactctgagtttcgcgtgtggcttttagggacgtttatatttgaatttccctgaaccgccgagtgtgggcggtggcgcagatccgtcccggaaacctccgggctccttcccgcctttctcaggcccggcccctccaaggggtccccgcggggcggcgggagggccctgggcccagagccgcgcgggtgggcagtcccaggcgtccttccttacagccctgagcctggtccgggaaccgcccagccgggagggccgagctgacggttgcccaagggccagattttaaatttacaggcccggcccccgaaccgccgaagcgcgctgcctgctccccattggcccatggtagtcacgtggaggcgccggggcgtgccggccatgttggggagtgcggcgccgcggcccgcgccacctccgccccccgcggcttgcctccagcccgcccctcccggccctcctccccccgcccgccgctccgtgcagcctgagaggaaacaaagtgctgcgagcaggagacggcggcggcgcgaaccctgctgggcctccagtcaccctcgtcttgcattttcccgcgtgcgtgtgtgagtgggtgtgtgtgttttcttacaaagggtatttcgcgatcgatcgattgattcgtagttcccccccgcgcgcctttgccctttgtgctgtaatcgagctcccgccatcccaggtgcttctccgttcctctaaacgccagcgtctggacgtgagcgcaggtcgccggtttgtgccttcggtccccgcttcgccccctgccgtcccctccttatcacggtcccgctcgcggcctcgccgccccgctgtctccgccgcccgccatggcgactgcgacccccgtgccgccgcggatgggcagccgcgctggcggccccaccacgccgctgagccccacgcgcctgtcgcggctccaggagaaggaggagctgcgcgagctcaatgaccggctggcggtgtacatcgacaaggtgcgcagcctggagacggagaacagcgcgctgcagctgcaggtgacggagcgcgaggaggtgcgcggccgtgagctcaccggcctcaaggcgctctacgagaccgagctggccgacgcgcgacgcgcgctcgacgacacggcccgcgagcgcgccaagctgcagatcgagctgggcaagtgcaaggcggaacacgaccagctgctcctcaactatgctaagaaggaatctgatcttaatggcgcccagatcaagcttcgagaatatgaagcagcactgaattcgaaagatgcagctcttgctactgcacttggtgacaaaaaaagtttagagggagatttggaggatctgaaggatcagattgcccagttggaagcctccttagctgcagccaaaaaacagttagcagatgaaactttacttaaagtagatttggagaatcgttgtcagagccttactgaggacttggagtttcgcaaaagcatgtatgaagaggagattaacgagaccagaaggaagcatgaaacgcgcttggtagaggtggattctgggcgtcaaattgagtatgagtacaagctggcgcaagcccttcatgagatgagagagcaacatgatgcccaagtgaggctgtataaggaggagctggagcagacttaccatgccaaacttgagaatgccagactgtcatcagagatgaatacttctactgtcaacagtgccagggaagaactgatggaaagccgcatgagaattgagagcctttcatcccagctttctaatctacagaaagagtgtttgttgctgagtcatatcagtttcatcatgctgcctattaggccataagaatttccttttggttaaataactcagtctagagcatgtttggaaaggattcaagaattagaggacttgcttgctaaagaaaaagacaactctcgtcgcatgctgacagacaaagagagagagatggcggaaataagggatcaaatgcagcaacagctgaatgactatgaacagcttcttgatgtaaagttagccctggacatggaaatcagtgcttacaggaaactcttagaaggcgaagaagagaggttgaagctgtctccaagcccttcttcccgtgtgacagtatcccgagcatcctcaagtcgtagtgtacgtacaactagaggaaagcggaagagggttgatgtggaagaatcagaggcgagtagtagtgttagcatctctcattccgcctcagccactggaaatgtttgcatcgaagaaattgatgttgatgggaaatttatccgcttgaagaacacttctgaacaggatcaaccaatgggaggctgggagatgatcagaaaaattggagacacatcagtcagttataaatatacctcaagatatgtgctgaaggcaggccagactgttacaatttgggctgcaaacgctggtgtcacagccagccccccaactgacctcatctggaagaaccagaactcgtggggcactggcgaagatgtgaaggttatattgaaaaattctcagggagaggaggttgctcaaagaagtacagtctttaaaacaaccatacctgaagaagaggaggaggaggaagaagcagctggagtggttgttgaggaagaacttttccaccagcagggaaccccaagagcatccaatagaagctgtgcaattatgtaaaattttcaactgtcttcctcaaaataaagaagtatggtaatctttacctgtatacagtgcagagccttctcagaagcacagaatatttttatatttcctttatgtgaatttttaagctgcaaatctgatggccttaatttcctttttgacactgaaagttttgtaaaagaaatcatgtccatacactttgttgcaagatgtgaattattgacactgaacttaataactgtgtactgttcggaaggggttcctcaaattttttgactttttttgtatgtgtgttttttctttttttttaagttcttatgaggaggggagggtaaataaaccactgtgcgtcttggtgtaatttgaagattgccccatctagactagcaatctcttcattattctctgctatatataaaacggtgctgtgagggaggggaaaagcatttttcaatatattgaacttttgtactgaatttttttgtaataagcaatcaaggttataattttttttaaaatagaaattttgtaagaaggcaatattaacctaatcaccatgtaagcactctggatgatggattccacaaaacttggttttatggttacttcttctcttagattcttaattcatgaggagggtgggggagggaggtggagggagggaagggtttctctattaaaatgcattcgttgtgttttttaagatagtgtaacttgcttaaatttcttatgtgacattaacaaataaaaaagctcttttaa

SEQ ID NO: 147379 - DNA, 738 bp, Homo sapiens
  Payload ID: 9150
  Gene Symbol: LMNB1
  Gene Name: lamin B1
  ENST ID: ENST00000492190
  CDS Start-End: 241-738
aagtgctgcgagcaggagacggcggcggcgcgaaccctgctgggcctccagtcaccctcgtcttgcattttcccgcgtgcgtgtgtgagtgggtgcttctccgttcctctaaacgccagcgtctggacgtgagcgcaggtcgccggtttgtgccttcggtccccgcttcgccccctgccgtcccctccttatcacggtcccgctcgcggcctcgccgccccgctgtctccgccgcccgccatggcgactgcgacccccgtgccgccgcggatgggcagccgcgctggcggccccaccacgccgctgagccccacgcgcctgtcgcggctccaggagaaggaggagctgcgcgagctcaatgaccggctggcggtgtacatcgacaaggtgcgcagcctggagacggagaacagcgcgctgcagctgcaggtgacggagcgcgaggaggtgcgcggccgtgagctcaccggcctcaaggcgctctacgagaccgagctggccgacgcgcgacgcgcgctcgacgacacggcccgcgagcgcgccaagctgcagatcgagctgggcaagtgcaaggcggaacacgaccagctgctcctcaactatgctaagaaggaatctgatcttaatggcgcccagatcaagcttcgagaatatgaagcagcactgaattcgaaagatgcagctcttgctactgcacttggtgacaaaaaaagtttagagggagatttggaggatctg

SEQ ID NO: 147380 - DNA, 4671 bp, Homo sapiens
  Payload ID: 9151
  Gene Symbol: LMNB2
  Gene Name: lamin B2
  ENST ID: ENST00000325327
  CDS Start-End: 64-1926
gccgcggcgggcggcgggcgcggcgcggcgcggcgccatcttgcagccggcggcgcggattgaatgagcccgccgagcccgggccgccgtcgggagcagcgcaggccgcgagccgccgccaccatggccacgccgctgcccggccgcgcgggcgggcccgccacgccgctgtcgcccacgcgcctgtcgcggctgcaggagaaggaggagctgcgcgagctcaacgaccgcctggcgcactacatcgaccgcgtccgcgcgctggagctggagaacgaccggctcctgctcaagatctcagagaaggaggaggtgaccacgcgcgaggtgagtggcatcaaggcgctgtacgagtcggagctggccgatgcccggagagtcctggatgagacggctcgagagcgtgcccggctgcagatagagattgggaagctgagggcagagttggacgaggtcaacaagagcgccaagaagagggagggcgagcttacggtggcccagggccgtgtgaaggacctggagtccctgttccaccggagcgaggtggagctggcagctgccctcagcgacaagcgcggcctggagagtgacgtggctgagctgcgggcccagctggccaaggccgaggacggtcatgcagtggccaaaaagcagctggagaaggagacgctgatgcgtgtggacctggagaaccgctgccagagcctgcaggaggagctggacttccggaagagtgtgttcgaggaggaggtgcgggagacgcggcggcggcacgagcggcgcctggtggaggtggacagcagccggcagcaggagtacgacttcaagatggcacaggcgctggaggagctgcggagccagcacgacgagcaagtgcggctctacaagctggagctggagcagacctaccaggccaagctggacagcgccaagctgagctctgaccagaacgacaaggcggccagtgcggctcgcgaggagctgaaggaggcccgcatgcgcctggagtccctcagctaccagctctccggcctccagaagcaggccagtgccgctgaagatcgcattcgggagctggaggaggccatggccggggagcgggacaagttccggaagatgctggacgccaaggagcaggagatgacggagatgcgggacgtgatgcagcagcagctggccgagtaccaggagctgctggacgtgaagctggccctggacatggagatcaacgcctaccggaagctcctggagggcgaggaggagaggctgaagctgtcccccagcccatcctcgcgcgtcaccgtctcacgagccacctcgagcagcagcggcagcttgtccgccaccgggcgcctgggccgcagtaagcggaagcggctggaggtggaggagcccttgggcagcggcccaagcgtcctgggcacgggcacgggtggcagcggtggcttccacctggcccagcaggcctcggcctcgggtagcgtcagcatcgaggagatcgacctggagggcaagtttgtgcagctcaagaacaactcggacaaggatcagtctctggggaactggagaatcaagaggcaggtcttggagggggaggagatcgcctacaagttcacgcccaagtacatcctgcgcgccggccagatggtcacggtgtgggcagctggtgcgggggtggcccacagccccccctcgacgctggtgtggaagggccagagcagctggggcacgggcgagagcttccgcaccgtcctggttaacgcggatggcgaggaagtggccatgaggactgtgaagaagtcctcggtgatgcgtgagaatgagaatggggaggaagaggaggaggaagccgagtttggcgaggaggatcttttccaccaacagggggacccgaggaccacctcaagaggctgctacgtgatgtgaacccacactcctcatccacacacctttctttacccagagccactgaaaactatttttatatcattggctttctttagttcttgatacatttctagagaatttctaagcgaactgccagaacgtgtgggtgggtctcccccagccctccctcctggcgggtctcctccagcctcacttcgctgccacttcgccgctgccccggagacttttcaatcccaccccactcctcatctcaccatttggtcaaattggaagcccagggccaggacccggaggtttagaagatgcttgggcttggagggaggagggccggcgaggctagcgaggggacaggagacggccctgctgcggacggagcgcggaaactgcgtaggaattcagtggtggtgggtttttttaaggctttctacaaaaccaaattcagaatccaggcgtcgacctggtggggcccggggccaagcctgcattctggctgcccagcttcggacagcgggaactcctcaggcagccacgcagcgggtgtgggccagcatggggatggcgtggcccccagggcgggttttcactccgctgcctgggcttccagattcccgttctggcagcgcaccggccgggtttctcggaccgttgactttatttgggggagttttcccgcagttcagttcctgactgtgcaaggccaacagggcaggggaggggaagacctggggaaggaagaatgaggacagtcccgtcgtaagacctgtcacaacaataagcagggaggggagatgtggaggggacacatctggttgccttggaggcagaagctgtgagtttcagaacagctgtctgcagggaacgccaccatgttgaccctctggaggagagcgctgtggagcccctcccgtgttccagctccgtctgccctgtgcctatatatacacatgcgtctatccatactgtgcttttatctgtgattttctcgctgaaaccatgtttctcagacaggccaaggccacctgactcctatcacgacgcacccaagcccctcagtccagcttcccaatgcctggcaccccccttcggcaatagctcaccgtttacaccctccctcatagatacacagaagttatttttttaatggatatttatttttttacattggtcagtacacaggtcaggagctcacgccagggccttgaggacaggctgaccctcctccccggggtggcgtggggctggggcaccctccgacggcagagcctccttcagaaagtgcagctcaagtcttaaagacaccaaaactgagccatgggcacgcgccgtctccgggccatggcgttcactgcagggcgggggcggcaccgctcccctgtgactgcatcccgcctccctggggacctgcctgtggcaggaaggaatggggggccccagccccaggccgggaaggagccagcggccgacaaagcagaaacacccgctgctccacgtagcccctgctcgctgtccttgctctcagaagtcccggtcccatgtagatagaggggggcgcatcttaccaaagcatttcctcctggaggctacgccgctgtgctcccagtcaggcggctggtagggagctttgcctgccccggggataccctctgccagccgctggaagtgggaatgctggcgacagactgtgtcctctttcccaccttcatagcaggaatcacccggacccgactggctgggcttcgtgctagcgagggttctgggggtgggtcttggtgatcttgtcctatggggagtctgcagtggtctcagccacatcctatgtattttggctctggaggagcaaagctgtatcctggagttggtctgtgatttgccgacagccttgcaggctgggctcagggacaaagtcccccccaaaacccgcaggtcctcatgtccagacgctgcccagtcctgtcctgaaaacagcacgccccaggcccacagaaccccccaccctacatttgccttgggtggagctgggggtggtcctaggactgcgggtgcccttagctgaagggggtggggagaagcgtggactgggcagcctgtgggtaattggaggttcattgagaattgagtctttggaaacactaagaaaatcaaatttttaaaagttatttatggcctgggaaacaatttgcatttgtccccaaatacgcttagctgtgtgccgcttagaacgatgcgaaaccatccctctgtgtaagcccgtgccgtgtgactcgaagcctagcgccctccctgcgaagcatcagacgccacccagccctggggggaggcccacgcctgctggaccaacgcgggttctggggtgcacagcgccaggttaacgctgaagcctgccccgctgagcccaggagccgggaggcctgcgggctgacccagaatccgatcatgcacctgtcctcatgccagcggctttggctggggttggtctgaagcctgcacgcggcagttctttgttaaagatctgagggactcctcagtcctggggcgtcgccgcctgcagcctcttccaagccctgcgtccagcgagcgtcacagcacaacctgcaaaaacggagctgggctgcagctggggctggcatggactttcatttcagagattcggtttttaagaagatgcatgcctaatgtgttcttttttttttccaatgatttgtaatatacattttatgactggaaacttttttgtacaacactccaataaacattttgatttta

SEQ ID NO: 147381 - DNA, 1718 bp, Homo sapiens
  Payload ID: 9152
  Gene Symbol: LMNTD1
  Gene Name: lamin tail domain containing 1
  Uniprot ID: Q8N9Z9
  ENST ID: ENST00000282881
  CDS Start-End: 151-1317
aagctgcttccagtgaatgctacacacctgcaccatggtttgtccgacatccttagccaagatcaggattggctatgttggtacttacatatcctcatgagaattgtggttctggtactagtttggtaaagaaattattaaacctagctgatgcttgaaggtagttggattaacagaagagaagacaaacttggagtatattctttagtacatttttccccaaagatgttgggttcagttgccacaacactgccattgtcatcttcaaattccagtggaatgcctcttggttactatctgtctagtcctcagattagtagagtaactatatcaacaactggacaattgacttctaaagctactgtaggtagctgttccagagtggaaaacagcttggatgccagccccttctcagttccgaagaaacaggatgaatcacccatgattggggatggagaagattatttcctttctttgtttggtgattcaaagaaacttacagcacactcaaactacactcagaaaactttaaaatacttttctatgattcttgaagaagttggccaatttacctccagttctcttggagatgttgaaatagctgaagtgaatgtcaagggtttgttcgtgaagctcattaactcttcccttgacaaagaaatggcaattggagatcatattctccagcaaaatgtgaatggacaaaccatttctttgtaccgattccttccaaacatcgtaatgcaggcaaattccacagtaacagtgtgggcagcagcatctgaagcaaagcatcaacctccatcagattttctttggaaggaacaagacaagtttagagcaagtcctgattgtataacaatcctgtgcaaaccgaacggtcaagccattgcgtggtacacccctatccactggaagcaagcgtgggaaaaattagatgctgacgttgaatttaacagatgttcagtagtatctccaacattccgaaagcgtgtgtttcagtggacagcatctacagctacaataactaaagaaaaacaagatcaacctaagaaagatatctcaaattatcaggtggaacaagctcaagttcttcttaagagagagaaggaaatcccaccaaccgttttccctaatcgcagcccttggtgccagaatccctatgtctctgcacatccttactgtcctctgattgaaccacacaatacatccaccgctggaggcagattggatagacagcccaggactcggtcaaccagacctaatcgagcctcagggtctaagaaaaagaagacatctgagtcacaaaagcaataagcagtcaactcaacctttaaagtaatctagtccaccctcaaccagctactagaaaagcaaaagagaactcaaatccctgaggcctgctctgcaacctccctgctattccatgagagggtgaagacatcacatttctatatggaaaaaggatccaaaatttgtattgctgtagaattggtgaattatagatgcttgatgaaatcacaagtcctaccactcctgccttccaaatccctgcagaaaacaagcagatggttagtattattcaatggataaaattgctatttgccttagatttctctttttgtaaacaaagttattttgggtacagaactcacaaaagaagagcacgtgcaattgtttaaccattttacattgactgataaatctcttttttccat

SEQ ID NO: 147382 - DNA, 1520 bp, Homo sapiens
  Payload ID: 9152
  Gene Symbol: LMNTD1
  Gene Name: lamin tail domain containing 1
  Uniprot ID: Q8N9Z9
  ENST ID: ENST00000413632
  CDS Start-End: 244-1353
agtcataaaggtctctttgccaagttactgccctctcaagctgcttccagtgaatgctacacacctgcaccatggtttgtccgacatccttagccaagatcaggattggctatgttggtacttacatatcctcatgagaattgtggttctggtactagtttggtaaagaaattattaaacctagctgatgcttgaaggtagttggattaacaggaaagaaaagagacttcttttctagccaagatgaaagatacacaagacattcaggaagcttcgaaggcaatgcagaataaagtccatgagcaggaagataagaatgagaaacaaaaacaaagagaagacaaacttggagtatattctttagtacatttttccccaaagatgttgggttcagttgccacaacactgccattgtcatcttcaaattccagtggaatgcctcttggttactatctgtctagtcctcagattagtagagtaactatatcaacaactggacaattgacttctaaagctactgtaggtagctgttccagagtggaaaacagcttggatgccagccccttctcagttccgaagaaacaggatgaatcacccatgattggggatggagaagattatttcctttctttgtttggtgattcaaagaaacttacagcacactcaaactacactcagaaaactttaaaatacttttctatgattcttgaagaagttggccaatttacctccagttctcttggagatgttgaaatagctgaagtgaatgtcaagggtttgttcgtgaagctcattaactcttcccttgacaaagaaatggcaattggagatcatattctccagcaaaatgtgaatggacaaaccatttctttgtaccgattccttccaaacatcgtaatgcaggcaaattccacagtaacagccattgcgtggtacacccctatccactggaagcaagcgtgggaaaaattagatgctgacgttgaatttaacagatgttcagtagtatctccaacattccgaaagcgtgtgtttcagtggacagcatctacagctacaataactaaagaaaaacaagatcaacctaagaaagatatctcaaattatcaggtggaacaagctcaagttcttcttaagagagagaaggaaatcccaccaaccgttttccctaatcgcagcccttggtgccagaatccctatgtctctgcacatccttactgtcctctgattgaaccacacaatacatccaccgctggaggcagattggatagacagcccaggactcggtcaaccagacctaatcgagcctcagggtctaagaaaaagaagacatctgagtcacaaaagcaataagcagtcaactcaacctttaaagctttacctttatggtgtcatggtccagttgtatggaagagtaaaaagacctgcaatctaggctccctgccatgctggccaaagacattccacaacttaaagaaaatcaaatgcctgagcaaacgtagcgggttccgctttcatag

SEQ ID NO: 147383 - DNA, 1285 bp, Homo sapiens
  Payload ID: 9152
  Gene Symbol: LMNTD1
  Gene Name: lamin tail domain containing 1
  Uniprot ID: Q8N9Z9
  ENST ID: ENST00000445693
  CDS Start-End: 4-981
tacatgcaacagccagtgagagcaggagacatcggtgtttccagagtccagacccaccacaatgccagccccttctcagttccgaagaaacaggatgaatcacccatgattggggatggagaagattatttcctttctttgtttggtgattcaaagaaacttacagcacactcaaactacactcagaaaactttaaaatacttttctatgattcttgaagaagttggccaatttacctccagttctcttggagatgttgaaatagctgaagtgaatgtcaagggtttgttcgtgaagctcattaactcttcccttgacaaagaaatggcaattggagatcatattctccagcaaaatgtgaatggacaaaccatttctttgtaccgattccttccaaacatcgtaatgcaggcaaattccacagtaacagtgtgggcagcagcatctgaagcaaagcatcaacctccatcagattttctttggaaggaacaagacaagtttagagcaagtcctgattgtataacaatcctgtgcaaaccgaacggtcaagccattgcgtggtacacccctatccactggaagcaagcgtgggaaaaattagatgctgacgttgaatttaacagatgttcagtagtatctccaacattccgaaagcgtgtgtttcagtggacagcatctacagctacaataactaaagaaaaacaagatcaacctaagaaagatatctcaaattatcaggtggaacaagctcaagttcttcttaagagagagaaggaaatcccaccaaccgttttccctaatcgcagcccttggtgccagaatccctatgtctctgcacatccttactgtcctctgattgaaccacacaatacatccaccgctggaggcagattggatagacagcccaggactcggtcaaccagacctaatcgagcctcagggtctaagaaaaagaagacatctgagtcacaaaagcaataagcagtcaactcaacctttaaagatggagtctcactctgttgcccaggctggagtgcagtggtgtgatctccactaactgcagcctccgcctcccaggttcaagtgagtctcctgcgtcagcctcccgagtagctgggattacaggcatccgccaccctgcatggctaatttttgtatttttagtagcaacgaggtttcaccatgttggccaggctggtctcgaattcctgacctcaggtgatctgcctgccttggcctcccaaagtgctgggattacacgcatgagccaccatgcccggcgcaa

SEQ ID NO: 147384 - DNA, 1677 bp, Homo sapiens
  Payload ID: 9152
  Gene Symbol: LMNTD1
  Gene Name: lamin tail domain containing 1
  Uniprot ID: Q8N9Z9
  ENST ID: ENST00000458174
  CDS Start-End: 246-1475
gtagtcataaaggtctctttgccaagttactgccctctcaagctgcttccagtgaatgctacacacctgcaccatggtttgtccgacatccttagccaagatcaggattggctatgttggtacttacatatcctcatgagaattgtggttctggtactagtttggtaaagaaattattaaacctagctgatgcttgaaggtagttggattaacaggaaagaaaagagacttcttttctagccaagatgaaagatacacaagacattcaggaagcttcgaaggcaatgcagaataaagtccatgagcaggaagataagaatgagaaacaaaaacaaagagaagacaaacttggagtatattctttagtacatttttccccaaagatgttgggttcagttgccacaacactgccattgtcatcttcaaattccagtggaatgcctcttggttactatctgtctagtcctcagattagtagagtaactatatcaacaactggacaattgacttctaaagctactgtaggtagctgttccagagtggaaaacagcttggatgccagccccttctcagttccgaagaaacaggatgaatcacccatgattggggatggagaagattatttcctttctttgtttggtgattcaaagaaacttacagcacactcaaactacactcagaaaactttaaaatacttttctatgattcttgaagaagttggccaatttacctccagttctcttggagatgttgaaatagctgaagtgaatgtcaagggtttgttcgtgaagctcattaactcttcccttgacaaagaaatggcaattggagatcatattctccagcaaaatgtgaatggacaaaccatttctttgtaccgattccttccaaacatcgtaatgcaggcaaattccacagtaacagtgtgggcagcagcatctgaagcaaagcatcaacctccatcagattttctttggaaggaacaagacaagtttagagcaagtcctgattgtataacaatcctgtgcaaaccgaacggtcaagccattgcgtggtacacccctatccactggaagcaagcgtgggaaaaattagatgctgacgttgaatttaacagatgttcagtagtatctccaacattccgaaagcgtgtgtttcagtggacagcatctacagctacaataactaaagaaaaacaagatcaacctaagaaagatatctcaaattatcaggtggaacaagctcaagttcttcttaagagagagaaggaaatcccaccaaccgttttccctaatcgcagcccttggtgccagaatccctatgtctctgcacatccttactgtcctctgattgaaccacacaatacatccaccgctggaggcagattggatagacagcccaggactcggtcaaccagacctaatcgagcctcagggtctaagaaaaagaagacatctgagtcacaaaagcaataagcagtcaactcaacctttaaagtaatctagtccaccctcaaccagctactagaaaagcaaaagagaactcaaatccctgaggcctgctctgcaacctccctgctattccatgagagggtgaagacatcacatttctatatggaaaaaggatccaaaatttgtattgctgtagaattggtgaattatagatgcttgatgaaat

SEQ ID NO: 147385 - DNA, 454 bp, Homo sapiens
  Payload ID: 9152
  Gene Symbol: LMNTD1
  Gene Name: lamin tail domain containing 1
  ENST ID: ENST00000539523
  CDS Start-End: 1-318
cagtggacagcatctacagctacaataactaaagaaaaacaagatcaacctaagaaagatatctcaaattatcaggtggaacaagctcaagttcttcttaagagagagaaggaaatcccaccaaccgttttccctaatcgcagcccttggtgccagaatccctatgtctctgcacatccttactgtcctctgattgaaccacacaatacatccaccgctggaggcagattggatagacagcccaggactcggtcaaccagacctaatcgagcctcagggtctaagaaaaagaagacatctgagtcacaaaagcaataagcagtcaactcaacctttaaaggcttcctattctttacttgacttaagatgaaaactacagccacgtgaaccctaacttgttggtattctggactctcctggtagaaatgacttaattttactactccatacagcc

SEQ ID NO: 147386 - DNA, 636 bp, Homo sapiens
  Payload ID: 9152
  Gene Symbol: LMNTD1
  Gene Name: lamin tail domain containing 1
  ENST ID: ENST00000543629
  CDS Start-End: 1-490
agacaagtttagagcaagtcctgattgtataacaatcctgtgcaaaccgaacggtcaagccattgcgtggtacacccctatccactggaagcaagcgtgggaaaaattagatgctgacgttgaatttaacagatgttcagtagtatctccaacattccgaaagcgtgtgtttcagtggacagcatctacagctacaataactaaagaaaaacaagatcaacctaagaaagatatctcaaattatcaggtggaacaagctcaagttcttcttaagagagagaaggaaatcccaccaaccgttttccctaatcgcagcccttggtgccagaatccctatgtctctgcacatccttactgtcctctgattgaaccacacaatacatccaccgctggaggcagattggatagacagcccaggactcggtcaaccagacctaatcgagcctcagggtctaagaaaaagaagacatctgagtcacaaaagcaataagcagtcaactcaacctttaaagactttcaggattaagcatttcctggccaagaaacaaaagcaaaatcgtcccattccccagtggattcggatgaaaactggtaatacaatcaggtacaactccaaaaggagacaatggagaagaa

SEQ ID NO: 147387 - DNA, 716 bp, Homo sapiens
  Payload ID: 9152
  Gene Symbol: LMNTD1
  Gene Name: lamin tail domain containing 1
  ENST ID: ENST00000538178
  CDS Start-End: 206-716
gcctcctcctcctgctcctccggtcgccctcccaatggatccctgtggtgccaggcaggaatgggctgcttgaggacccagcaagctcaaggggcctttctgctgcttcctctacccctgtatttcactcagctctctaaattgactcagctccagaagagaagacaaacttggagtatattctttagtacatttttccccaaagatgttgggttcagttgccacaacactgccattgtcatcttcaaattccagtggaatgcctcttggttactatctgtctagtcctcagattagtagagtaactatatcaacaactggacaattgacttctaaagctactgtaggtagctgttccagagtggaaaacagcttggatgccagccccttctcagttccgaagaaacaggatgaatcacccatgattggggatggagaagattatttcctttctttgtttggtgattcaaagaaacttacagcacactcaaactacactcagaaaactttaaaatacttttctatgattcttgaagaagttggccaatttacctccagttctcttggagatgttgaaatagctgaagtgaatgtcaagggtttgttcgtgaagctcattaactcttcccttgacaaagaaatggcaattggagatcatattctccagcaaaatgtgaatggacaaaccatttctttgtaccgattccttccaaaca

SEQ ID NO: 147388 - DNA, 1729 bp, Homo sapiens
  Payload ID: 9152
  Gene Symbol: LMNTD1
  Gene Name: lamin tail domain containing 1
  Uniprot ID: Q8N9Z9
  ENST ID: ENST00000539744
  CDS Start-End: 481-1356
gccctctcaagctgcttccagtgaatgctacacacctgcaccatggtttgtccgacatccttagccaagatcaggattggctatgttgaagagaagacaaacttggagtatattctttagtacatttttccccaaagatgttgggttcagttgccacaacactgccattgtcatcttcaaattccagtggaatgcctcttggttactatctgtctagtcctcagattagtagagtaactatatcaacaactggacaattgacttctaaagctactgtaggtagctgttccagagtggaaaacagcttgggaaaacggaaacttggaaaacttacatcacgtggcttagtaaatggcagaactgaaatataattacaagtctgtctaaatgcaagacacgttgttctttccacttcatcacgacgcgtctttgtaatatgccagccccttctcagttccgaagaaacaggatgaatcacccatgattggggatggagaagattatttcctttctttgtttggtgattcaaagaaacttacagcacactcaaactacactcagaaaactttaaaatacttttctatgattcttgaagaagttggccaatttacctccagttctcttggagatgttgaaatagctgaagtgaatgtcaagggtttgttcgtgaagctcattaactcttcccttgacaaagaaatggcaattggagatcatattctccagcaaaatgtgaatggacaaaccatttctttgtaccgattccttccaaacatcgtaatgcaggcaaattccacagtaacagtgtgggcagcagcatctgaagcaaagcatcaacctccatcagattttctttggaaggaacaagacaagtttagagcaagtcctgattgtataacaatcctgtgcaaaccgaacggtcaagccattgcgtggtacacccctatccactggaagcaagcgtgggaaaaattagatgctgacgttgaatttaacagatgttcagtagtatctccaacattccgaaagcgtgtgtttcagtggacagcatctacagctacaataactaaagaaaaacaagatcaacctaagaaagatatctcaaattatcaggtggaacaagctcaagttcttcttaagagagagaaggaaatcccaccaaccgttttccctaatcgcagcccttggtgccagaatccctatgtctctgcacatccttactgtcctctgattgaaccacacaatacatccaccgctggaggcagattggatagacagcccaggactcggtcaaccagacctaatcgagcctcagggtctaagaaaaagaagacatctgagtcacaaaagcaataagcagtcaactcaacctttaaagtaatctagtccaccctcaaccagctactagaaaagcaaaagagaactcaaatccctgaggcctgctctgcaacctccctgctattccatgagagggtgaagacatcacatttctatatggaaaaaggatccaaaatttgtattgctgtagaattggtgaattatagatgcttgatgaaatcacaagtcctaccactcctgccttccaaatccctgcagaaaacaagcagatggttagtattattcaatggataaaattgctatttgccttagatttctctttttgtaaacaaagttattttgggtacagaactcacaaaagaagagcacgtgcaattgtttaaccatttta

SEQ ID NO: 147389 - DNA, 525 bp, Homo sapiens
  Payload ID: 9152
  Gene Symbol: LMNTD1
  Gene Name: lamin tail domain containing 1
  ENST ID: ENST00000542224
  CDS Start-End: 309-525
cataacagaagaagcttaaggacactacatgcaacagccagtgagagcaggagacatcggtgtttccagagtccagacccaccacagcttctgagcaagatcaccatttggagacagacttatctaaagattttgtgattgggaagctccatgaagattactttgaacaaactgtctgaaacttgaaacttccaatacatgtcctctagcctctcttgaaatacccctcgtaggagcttaatgtgactctaacttgaagaagagaagacaaacttggagtatattctttagtacatttttccccaaagatgttgggttcagttgccacaacactgccattgtcatcttcaaattccagtggaatgcctcttggttactatctgtctagtcctcagattagtagagtaactatatcaacaactggacaattgacttctaaagctactgtaggtagctgttccagagtggaaaacagcttggatgccagccccttctcagttccgaagaaacaggatgaatcaccca

SEQ ID NO: 147390 - DNA, 582 bp, Homo sapiens
  Payload ID: 9152
  Gene Symbol: LMNTD1
  Gene Name: lamin tail domain containing 1
  ENST ID: ENST00000545543
  CDS Start-End: 152-582
aaggacactacatgcaacagccagtgagagcaggagacatcggtgtttccagagtccagacccaccacattctcttggagatgttgaaatagctgaagtgaatgtcaagggtttgttcgtgaagctcattaactcttcccttgacaaagaaatggcaattggagatcatattctccagcaaaatgtgaatggacaaaccatttctttgtaccgattccttccaaacatcgtaatgcaggcaaattccacagtaacagtgtgggcagcagcatctgaagcaaagcatcaacctccatcagattttctttggaaggaacaagacaagtttagagcaagtcctgattgtataacaatcctgtgcaaaccgaacggtcaagccattgcgtggtacacccctatccactggaagcaagcgtgggaaaaattagatgctgacgttgaatttaacagatgttcagtagtatctccaacattccgaaagcgtgtgtttcagtggacagcatctacagctacaataactaaagaaaaacaagatcaacctaagaaagatatctcaaattatcaggtggaacaagctcaagt

SEQ ID NO: 147391 - DNA, 597 bp, Homo sapiens
  Payload ID: 9152
  Gene Symbol: LMNTD1
  Gene Name: lamin tail domain containing 1
  ENST ID: ENST00000540106
  CDS Start-End: 101-597
agccagtgagagcaggagacatcggtgtttccagagtccagacccaccacaaagagaagacaaacttggagtatattctttagtacatttttccccaaagatgttgggttcagttgccacaacactgccattgtcatcttcaaattccagtggaatgcctcttggttactatctgtctagtcctcagattagtagagtaactatatcaacaactggacaattgacttctaaagctactgtaggtagctgttccagagtggaaaacagcttggatgccagccccttctcagttccgaagaaacaggatgaatcacccatgattggggatggagaagattatttcctttctttgtttggtgattcaaagaaacttacagcacactcaaactacactcagaaaactttaaaatacttttctatgattcttgaagaagttggccaatttacctccagttctcttggagatgttgaaatagctgaagtgaatgtcaagggtttgttcgtgaagctcattaactcttcccttgacaaagaaatggcaattggagatcatattctccagcaaaatgtgaatggacaaaccatttctttgtaccg

SEQ ID NO: 147392 - DNA, 2084 bp, Homo sapiens
  Payload ID: 9153
  Gene Symbol: LMNTD2
  Gene Name: lamin tail domain containing 2
  Uniprot ID: Q8IXW0
  ENST ID: ENST00000329451
  CDS Start-End: 64-1968
cggaggggggcgccgagccgcagtccccgcccccacctcccgcctaccgcgaaaaacgcggaaatgcggtggctgcggcccgcgggcaggcgtcgggagcaagagtcggtcagtggtcacctgggacctccagcaggcgcacctgcagcccccgagactcccacgtgcctgccagacaccacgccccaccccgcaccggtggtctgctctgccgacccgcagttggctcttgagtccctggaccctcgcacactgcggctgctgtggagacagcgagaactggagatccaggccttgcggtgggccatccagaatggcgaggacgcccggctctgccacatcctggaagaggtggcggggcttccgcccaagaggagctcccacagtcaggagaaactcctgcagaaccaggtccagaagctgatccaggagttgaaggaacagaaggagcgagcccagtgggagaaggagcacctggaggagcggctgctgcagaccacccgcacgctccaggagatggaggccgagctgcagaacttgcagaagtcctgcctcctgcagctggcccgctcctcgtgggtgggccgcatgctacgatcccagactggcagtgtggaggtagtgacggcagagactctgatggacccaagcgacctctctgaaaacattcaggcccccaccggggagggctttcggctggaggacgtggattggaacagcgttgcccgccggtatcccaacctcttcaccaacatggagcccagctcaaagcaaaagcagccccggccctggccacagctggacacagggagcccagagtcctctggaaagcattccgagcggcatcacaagaccgtggagtggggctccctgccctgtctgaacaccagcagctcagggggcgctgactccgactccagcagctgccggccgggcctgccttccttcgtgcaggtgatagggcacccgccccgggaccaccgcgcttcctccgagcaagcgctggtgcaggccggcagctacagcagggactcagaagatctccagaaaacccactcacccaggcacggcgagccggtcctgtcgccccagccctgcacagacccggaccactggagcccggaactcctgcagagcccgacaggcctgaagatcgtggctgtgagctgccgggagaagttcgtccgcatcttcaacccgtcgcaggagagcacggccgacctgagcggcatggtgctgaagcagctggtgcgcggcttcccggagcgcctgtaccgcttcccgccgggcacgctgctggccccgcggcaccacgtcacggtctggggcgaggcgacccgcagcgccaagaagccgctgcgcgcgtcctcgagccgggagcccgttcccctcctctccatccgcggctgcgcgacgctgctcctgagccccaagggcgaggtcctcagtgagcaccggatcccacgccgcgagactccggccccgagggtcttcgccgacggcaccgacttgtccatcgaccgcttcccgctccctgaggccgggcccggcgccgacacccgcaagccgccgcgcccacctcgacccctgcgcaaaggccgggtgcgggagccccgggtcagtcgccggagaccagggacgcggggcctgctgcccccagtgagctcggggaagctcttccacgcgcgggaggggcctgcgcggcccgagaaccccgagatccccgcgccgcagcacctgcccgccatcccgggtgaccccaccctgccgtcgcctcccgcagaggccgggctgggcctggaggactgtcggctccagaaagaacaccgagttcgggtgtgccggaagagcgtggaccgtagctgccccctggtggccctgtcggtgcagaacacggcggagagcagattcggcttccgcttcctcagctgcctgccggtcaccgcggacacctgccgcggcgcctaggggcggaggagtggggccgggaccgcgagggagggcgcgggcgggcgccggggctgggcgggctgtgtccgctgcatcatttattgaaccaacgtggcctacaaagtaaaccgcat

SEQ ID NO: 147393 - DNA, 1051 bp, Homo sapiens
  Payload ID: 9153
  Gene Symbol: LMNTD2
  Gene Name: lamin tail domain containing 2
  ENST ID: ENST00000441853
  CDS Start-End: 146-1051
cgaaaaacgcggaaatgcggtggctgcggcccgcgggcaggcgtcggggctgggctggcccagaactcacctaggggcctggtctggggtctccctggaggctcctggtaacaaacagccccaccccttctgggtgctggtatccatggcaacggtatacagcccttccctcccaggcctgcttggaggtcgggcctcagagcaagagtcggtcagtggtcacctgggacctccagcaggcgcacctgcagcccccgagactcccacgtgcctgccagacaccacgccccaccccgcaccggtggtctgctctgccgacccgcagttggctcttgagtccctggaccctcgcacactgcggctgctgtggagacagcgagaactggagatccaggccttgcggtgggccatccagaatggcgaggacgcccggctctgccacatcctggaagaggtggcggggcttccgcccaagaggagctcccacagtcaggagaaactcctgcagaaccaggtccagaagctgatccaggagttgaaggaacagaaggagcgagcccagtgggagaaggagcacctggaggagcggctgctgcagaccacccgcacgctccaggagatggaggccgagctgcagaacttgcagaagtcctgcctcctgcagctggcccgctcctcgtgggtgggccgcatgctacgatcccagactggcagtgtggaggtagtgacggcagagactctgatggacccaagcgacctctctgaaaacattcaggcccccaccggggagggctttcggctggaggacgtggattggaacagcgttgcccgccggtatcccaacctcttcaccaacatggagcccagctcaaagcaaaagcagccccggccctggccacagctggacacagggagcccagagtcctctggaaagcattccgagcggcatcacaagaccgtggagtggggctccctgccctgtctgaacaccagcagctcagggggcgctgactccgactccagcagctgccggccgggcctgccttccttc

SEQ ID NO: 147394 - DNA, 798 bp, Homo sapiens
  Payload ID: 9153
  Gene Symbol: LMNTD2
  Gene Name: lamin tail domain containing 2
  ENST ID: ENST00000486629
  CDS Start-End: 56-798
cttccctcccaggcctgcttggaggtcgggcctcagctcccgaagaacattgagaatggcccccaagtctggccaggaggttgaagaaaccgaggaagaggctctcctgtcccccacagagcaagagtcggtcagtggtcacctgggacctccagcaggcgcacctgcagcccccgagactcccacgtgcctgccagacaccacgccccaccccgcaccggtggtctgctctgccgacccgcagttggctcttgagtccctggaccctcgcacactgcggctgctgtggagacagcgagaactggagatccaggccttgcggtgggccatccagaatggcgaggacgcccggctctgccacatcctggaagaggtggcggggcttccgcccaagaggagctcccacagtcaggagaaactcctgcagaaccaggtccagaagctgatccaggagttgaaggaacagaaggagcgagcccagtgggagaaggagcacctggaggagcggctgctgcagaccacccgcacgctccaggagatggaggccgagctgcagaacttgcagaagtcctgcctcctgcagctggcccgctcctcgtgggtgggccgcatgctacgatcccagactggcagtgtggaggtagtgacggcagagactctgatggacccaagcgacctctctgaaaacattcaggcccccaccggggagggctttcggctggaggacgtggattggaacagcgttgcccgccggtatcccaacctcttcaccaacatggagcccagctcaaagcaaaa

SEQ ID NO: 147395 - DNA, 2091 bp, Homo sapiens
  Payload ID: 9153
  Gene Symbol: LMNTD2
  Gene Name: lamin tail domain containing 2
  Uniprot ID: Q8IXW0
  ENST ID: ENST00000621319
  CDS Start-End: 64-1968
cggaggggggcgccgagccgcagtccccgcccccacctcccgcctaccgcgaaaaacgcggaaatgcggtggctgcggcccgcgggcaggcgtcgggagcaagagtcggtcagtggtcacctgggacctccagcaggcgcacctgcagcccccgagactcccacgtgcctgccagacaccacgccccaccccacaccggtggtctgctctgccgacccgcagttggctcttgagtccctggaccctcgcacactgcggctgctgtggagacagcgagaactggagatccaggccttgcggtgggccatccagaatggcgaggacgcccggctctgccacatcctggaagaggtggcggggcttccgcccaagaggagctcccacagtcaggagaaactcctgcagaaccaggtccagaagctgatccaggagttgaaggaacagaaggagcgagcccagtgggagaaggagcacctggaggagcggctgctgcagaccacccgcacgctccaagagatggaggccgagctgcagaacttgcagaagtcctgcctcctgcagctggcccgctcctcgtgggtgggccgcatgctacgatcccagactggcagtgtggaggtagtgacggcagagactctgatggacccaagcgacctctctgaaaacattcaggcccccaccggggagggctttcggctggaggacgtggattggaacagcgttgcccgccggtatcccaacctcttcaccaacatggagcccagctcaaagcaaaagcagccccggccctggccacagctggacacagggagcccagagtcctctggaaagcattccgagcggcatcacaagaccgtggagtggggctccctgccctgtctgaacaccagcagctcagggggcgctgactccgactccagcagctgccggccgggcctgccttccttcgtgcaggtgatagggcacccgccccgggaccaccgcgcttcctccgagcaagcgctggtgcaggccgggagctacagcagggactcagaagatctccagaaaacccactcacccaggcacggcgagccggtcctgtcgccccagccctgcacagaccccgaccactggagcccggaactcctgcagagcccgacaggcctgaagatcgtggctgtgagctgccgggagaagttcgtccgcatcttcaacccgtcgcaggagagcacggccgacctgagcggcatggtgctgaagcagctggtgcgcggcttcccggagcgcctgtaccgcttcccgccgggcacgctgctggccccgcggcaccacgtcacggtctggggcgaggcgacccgcagcgccaagaagccgctgcgcgcgtcctcgagccgggagcccgttcccctcctctccatccgcggctgcgcgacgctgctcctgagccccaagggcgaggtcctcagtgagcaccggatcccacgccgcgagactccggccccgagggtcttcgccgacggcaccgacttgtccatcgaccgcttcccgctccctgaggccgggcccggcgccgacacccgcaagccgccgcgcccacctcgacccctgcgcaaaggccgggtgcgggagccccgggtcagtcgccggagaccagggacgcggggcctgctgcccccagtgagctcggggaagctcttccacgcgcgggaggggcctgcgcggcccgagaaccccgagatccccgcgccgcagcacctgcccgccatcccgggtgaccccaccctgccgtcgcctcccgcagaggccgggctgggcctggaggactgtcggctccagaaagaacaccgagttcgggtgtgccggaagagcgtggaccgtagctgccccctggtggccctgtcggtgcagaacacggcggagagcagattcggcttccgcttcctcagctgcctgccggtcaccgcggacacctgccgcggcgcctaggggcggaggagtggggccgggaccgcgagggagggcgcgggcgggcgccggggctgggcgggctgtgtccgctgcatcatttattgaaccaacgtggcctacaaagtaaaccgcatttctgta

SEQ ID NO: 147396 - DNA, 1051 bp, Homo sapiens
  Payload ID: 9153
  Gene Symbol: LMNTD2
  Gene Name: lamin tail domain containing 2
  ENST ID: ENST00000631419
  CDS Start-End: 146-1051
cgaaaaacgcggaaatgcggtggctgcggcccgcgggcaggcgtcggggctgggctggcccagaactcacctaggggcctggtctggggtctccctggaggctcctggtaacaaacagccccaccccttctgggtgctggtatccatggcaacggtatacagcccttccctcccaggcctgcttggaggtcgggcctcagagcaagagtcggtcagtggtcacctgggacctccagcaggcgcacctgcagcccccgagactcccacgtgcctgccagacaccacgccccaccccacaccggtggtctgctctgccgacccgcagttggctcttgagtccctggaccctcgcacactgcggctgctgtggagacagcgagaactggagatccaggccttgcggtgggccatccagaatggcgaggacgcccggctctgccacatcctggaagaggtggcggggcttccgcccaagaggagctcccacagtcaggagaaactcctgcagaaccaggtccagaagctgatccaggagttgaaggaacagaaggagcgagcccagtgggagaaggagcacctggaggagcggctgctgcagaccacccgcacgctccaagagatggaggccgagctgcagaacttgcagaagtcctgcctcctgcagctggcccgctcctcgtgggtgggccgcatgctacgatcccagactggcagtgtggaggtagtgacggcagagactctgatggacccaagcgacctctctgaaaacattcaggcccccaccggggagggctttcggctggaggacgtggattggaacagcgttgcccgccggtatcccaacctcttcaccaacatggagcccagctcaaagcaaaagcagccccggccctggccacagctggacacagggagcccagagtcctctggaaagcattccgagcggcatcacaagaccgtggagtggggctccctgccctgtctgaacaccagcagctcagggggcgctgactccgactccagcagctgccggccgggcctgccttccttc

SEQ ID NO: 147397 - DNA, 798 bp, Homo sapiens
  Payload ID: 9153
  Gene Symbol: LMNTD2
  Gene Name: lamin tail domain containing 2
  ENST ID: ENST00000633856
  CDS Start-End: 56-798
cttccctcccaggcctgcttggaggtcgggcctcagctcccgaagaacattgagaatggcccccaagtctggccaggaggttaaagaaaccgaggaagaggctctcctgtcccccacagagcaagagtcggtcagtggtcacctgggacctccagcaggcgcacctgcagcccccgagactcccacgtgcctgccagacaccacgccccaccccacaccggtggtctgctctgccgacccgcagttggctcttgagtccctggaccctcgcacactgcggctgctgtggagacagcgagaactggagatccaggccttgcggtgggccatccagaatggcgaggacgcccggctctgccacatcctggaagaggtggcggggcttccgcccaagaggagctcccacagtcaggagaaactcctgcagaaccaggtccagaagctgatccaggagttgaaggaacagaaggagcgagcccagtgggagaaggagcacctggaggagcggctgctgcagaccacccgcacgctccaagagatggaggccgagctgcagaacttgcagaagtcctgcctcctgcagctggcccgctcctcgtgggtgggccgcatgctacgatcccagactggcagtgtggaggtagtgacggcagagactctgatggacccaagcgacctctctgaaaacattcaggcccccaccggggagggctttcggctggaggacgtggattggaacagcgttgcccgccggtatcccaacctcttcaccaacatggagcccagctcaaagcaaaa

SEQ ID NO: 147398 - DNA, 9657 bp, Homo sapiens
  Payload ID: 9154
  Gene Symbol: LAMA1
  Gene Name: laminin, alpha 1
  Uniprot ID: P25391
  ENST ID: ENST00000389658
  CDS Start-End: 95-9322
cggggccagggcagcgcggactcgcgtcccgtggagcgttccaggcgggcgcgcggctttctccccagacccaccgagtggcggcggaggcgagatgcgcgggggcgtgctcctggtcttgctgctgtgtgtcgccgcgcagtgccggcagagaggcctgtttcctgccattctcaatcttgccagcaatgctcacatcagcaccaatgccacctgtggcgagaaggggccggagatgttctgcaaacttgtggagcatgtgccaggtcggcccgtccgaaacccacagtgccggatctgtgatggcaacagcgcaaaccccagagaacgccatccaatatcacatgccatagatggcaccaataactggtggcaaagtcccagcattcagaatgggagagaatatcactgggtcacaatcactctggacttaagacaggtctttcaagttgcatatgtcatcattaaagctgccaatgcccctcgacctggaaactggattttggagcgttctctggatggcaccacgttcagcccctggcagtattatgcagtcagcgactcagagtgtttgtctcgttacaatataactccaagacgagggccacccacctacagggctgatgatgaagtgatctgcacctcctattattccagattggtgccacttgagcatggagagattcatacatcactcatcaatggcagaccaagcgctgacgatctttcacccaagttgttggaattcacttctgcacgatatattcgccttcgcttgcaacgcattagaacgctcaatgcagatctcatgacccttagccaccgggaacctaaagaactggatcctattgttaccagacgctattattattcaataaaggacatttctgttggaggcatgtgtatctgctatggccatgctagtagctgcccatgggatgaaactacaaagaaactgcagtgtcaatgtgagcataatacttgcggggagagctgtaacaggtgctgtcctgggtaccatcagcagccctggaggccgggaaccgtgtcctccggcaatacatgtgaagcatgtaattgtcacaataaagccaaagactgttactatgatgaaagtgttgcaaagcagaagaaaagtttgaatactgctggacagttcagaggaggaggggtttgcataaattgcttgcagaacaccatgggaatcaactgtgaaacctgtattgatggatattatagaccacacaaagtgtctccttatgaggatgagccttgccgcccctgtaattgtgaccctgtggggtccctcagttctgtctgtattaaggatgacctccattctgacttacacaatgggaagcagccaggtcagtgcccatgtaaggaaggttatacaggagaaaaatgtgatcgctgccaacttggctataaggattacccgacctgtgtctcctgtgggtgcaacccagtgggcagtgccagtgatgagccctgcacagggccctgtgtttgtaaggaaaacgttgaggggaaggcctgtgatcgctgcaagccaggattctataacttgaaggaaaaaaacccccggggctgctccgagtgcttctgctttggcgtttctgatgtctgcagcagcctctcttggcctgttggtcaggtaaacagtatgtccgggtggctggtcaccgacttgatcagtcccaggaagatcccgtctcagcaagatgcactaggcgggcgccatcaggtcagcatcaacaacaccgcggtcatgcagagactggctcccaagtactactgggcagcccccgaggcctaccttggaaataagctgactgcgtttggcggattcctgaaatacacggtgtcctacgatattccggtagagacggtagacagtaacctcatgtcgcatgctgacgtcatcattaagggaaacggactcactttaagcacacaggctgagggtctgtcattgcagccttatgaagagtacctaaacgtggttagacttgtgcctgaaaacttccaagattttcacagcaaaaggcagattgatcgtgaccagctgatgactgtccttgccaatgtgacacatcttttgatcagagccaactacaattctgcaaaaatggctctttacaggttggagtccgtctctctggacatagccagctctaatgccatcgacctggtggtggccgctgatgtggagcactgtgaatgtccgcaaggctacacagggacctcctgtgagtcgtgcctctctggctattaccgcgtggatggaatactctttggaggaatttgtcaaccctgtgaatgccacggccatgcagctgagtgtaatgttcacggcgtttgcattgcgtgtgcgcacaacaccaccggcgtccactgtgagcagtgcttgcccggcttctacggggagccttcccgagggacacctggggactgccagccctgcgcctgccctctcaccatagcctccaacaatttcagccccacctgccacctcaatgatggagatgaagtggtctgtgactggtgtgccccgggctactcaggagcttggtgtgagagatgtgcagatggttactatggaaacccaacagtgcctggcgaatcttgtgttccctgtgactgcagcggcaacgtggacccctcggaggctggtcactgtgactcagtcaccggggagtgcctgaagtgcctggggaacacagatggcgcccactgtgaaaggtgtgctgacgggttctatggggacgctgtgacagccaagaactgccgcgcctgtgaatgccatgtgaaaggctcccattctgccgtgtgccatcttgagaccgggctctgtgactgcaaaccaaacgtgactggacagcagtgtgaccagtgcttgcatggctattatgggctggactcaggccatggctgccggccctgcaactgcagcgtggcaggctccgtgtcagatggctgcacggatgaaggccagtgtcactgtgtcccaggtgtggcagggaaaaggtgtgacaggtgtgcccatggcttctacgcctaccaggatggtagctgtacaccctgtgactgcccacacactcagaatacctgcgacccagaaactggagagtgtgtctgcccccctcacacacagggtgtgaagtgtgaagaatgtgaggatgggcactggggctacgatgcggaggtggggtgccaggcctgcaattgcagtctcgtggggtcgactcatcatcggtgcgatgtggtcaccggccattgccagtgcaagtcaaaatttggtggccgggcctgcgatcagtgttccttgggttacagagactttcccgactgtgttccctgtgactgtgacctgagggggacgtcgggggacgcctgcaacctggagcagggtctctgcggctgtgtggaggaaaccggggcctgcccttgcaaggaaaatgtctttggtcctcagtgcaacgaatgtcgagagggcaccttcgctctccgcgcagacaaccccctgggctgcagcccgtgcttctgctccgggctgtcccacctctgctcagagctggaggactacgtgaggaccccagtaacgctgggctccgatcagcctcttctgcgtgtggtttctcagagtaacttgaggggcacgaccgagggggtttactaccaggcccccgacttcctgctggatgccgccaccgtccggcagcacatccgtgcagagccgttttactggcggctgccgcagcagttccaaggagaccagctcatggcctatggtggcaaactgaagtacagcgtggccttctattctttggatggcgtcggcacctccaattttgagcctcaagttctcatcaaaggtggtcggatcagaaagcaagtcatttacatggatgcaccagccccagagaatggagtgagacaggaacaagaagtagcaatgagagagaatttttggaaatattttaactctgtttctgaaaaacctgtcacgcgagaggattttatgtctgtcctcagcgatattgagtacatcctcatcaaggcatcgtatggtcaaggattacagcagagcagaatctcagacatttcaatggaggttggcagaaaggctgaaaagctgcacccagaagaagaggttgcatctcttttagagaattgtgtctgtcctcctggcactgtgggattctcatgtcaggactgcgcccctgggtaccacagagggaagctcccagcagggagtgacaggggaccacgccctctggttgctccttgtgttccctgcagttgcaacaaccacagtgacacctgtgaccccaacaccgggaagtgtctgaactgtggcgataacacagcaggtgaccattgtgatgtgtgtacttctggctactacgggaaggtgactggctcagcaagtgactgtgctctgtgtgcctgtcctcacagccctcctgccagttttagtcccacttgtgtcttggaaggggaccacgatttccgttgtgacgcctgtctcctgggctatgaaggaaaacactgtgaaaggtgctcctcaagctattatgggaaccctcaaacaccaggtggcagttgccagaagtgtgactgcaacccgcacggctctgtccacggtgactgtgaccgcacatctgggcagtgcgtttgcaggctgggggcctcggggctccggtgcgatgagtgtgaaccgaggcacattctgatggaaacagattgtgtttcctgtgatgatgagtgtgtaggtgtgctgctgaatgacttggatgagattggtgatgccgttctttctctgaacctcactggcattatccctgtcccatatggaattttgtcaaacctggaaaatacaactaaatatctccaggaatctttattaaaagaaaatatgcaaaaggacctgggaaaaattaagcttgaaggtgttgcagaagaaacggacaacctgcaaaagaagctcactaggatgttagcgagtacccaaaaggtgaatagggcaactgagagaatcttcaaggagagtcaagacctggccatagccattgagaggctgcagatgagcatcacagaaattatggaaaagacaactttaaatcagactttggatgaagatttcctactacccaattctactcttcagaacatgcaacagaatggtacatctttgctagaaatcatgcagataagagacttcacacagttgcaccaaaatgccacccttgaactcaaggctgctgaagatttattgtcacaaattcaggaaaattaccagaagccgctggaagaattggaggtattgaaagaagcagcaagccacgtcctttcaaagcacaacaatgaactaaaggcggctgaggcgctcgtgagggaagctgaggcaaagatgcaggaaagcaaccacctgctgctcatggtcaatgctaatctgagagaattcagtgataaaaagctgcatgttcaagaagaacaaaatctgacctcagagctcattgtccaaggaagaggattgatagatgctgctgctgcacaaacagatgctgtacaagatgctctagagcacttagaggatcaccaggataagctacttttatggtctgccaaaatcaggcaccacatagatgacctggtcatgcacatgtcccaaaggaacgcagtcgacctggtctacagagctgaggaccatgccgctgagttccagagactagcagatgttctgtacagtggccttgaaaacatcagaaatgtgtccctgaatgccaccagtgcagcctatgtccattacaacatccagagcctgattgaagaatcggaggaactggccagagatgctcacaggactgtgactgagacgagcctgctctcagaatcccttgtttctaacgggaaagcggccgtgcagcgcagctccagatttctaaaagaaggcaacaacctcagcaggaagcttccaggtattgcattggaactgagtgaattgagaaataagacaaacagatttcaagagaatgctgttgaaattaccaggcaaaccaatgaatcactcttgatacttagagcaattcctaaaggtataagagacaagggagccaaaaccaaagagctggccacgtctgcaagccagagcgcggtgagcacgctgagggacgtggcggggctgagccaggagctgctgaacacatctgccagcctgtccagggtcaacaccacattacgagagacacaccagcttctgcaggactccaccatggccactctgttggctggaagaaaagtcaaagacgtggaaattcaagccaaccttttgtttgatcggttgaagcctttgaagatgttagaggagaatctgagcagaaacctatcagaaattaaactgttgatcagccaggcccgcaaacaagcagcttctattaaagtcgccgtgtctgcagacagagattgcatccgggcctaccagcctcagatttcctctaccaactacaataccttaacactaaatgttaagacacaggaacccgataatcttctcttctacctcggtagcagcaccgcttctgatttccttgcagtggagatgcggcgagggagagtggccttcctgtgggacctgggctccgggtccacacgcttggagtttccagactttcccattgatgacaacagatggcacagtatccatgtagccagatttggaaacattggttcactgagtgtaaaggaaatgagctcaaatcaaaagtcaccaacaaaaacaagtaaatcccctgggacagctaatgttctggatgtaaacaattcaacactcatgtttgttggaggtcttggaggacaaatcaagaaatctcctgctgtgaaggttactcattttaaaggctgcttgggggaggccttcctgaatggaaaatccataggcctatggaactatattgaaagggaaggcaagtgccgtgggtgcttcggaagctcccagaatgaagacccttccttccattttgacgggagtgggtactctgtcgtggagaagtcacttccggctaccgtgacccagataatcatgctttttaataccttttcacctaatggacttcttctctacctgggttcatacggcacaaaagactttttatccatcgagctgtttcgtggcagagtgaaggttatgactgacctgggttcaggacccattacccttttgacagacagacgttataacaatggaacctggtacaaaattgccttccagcgaaaccggaagcaaggagtgctagcagttatcgatgcctataacaccagtaataaagaaaccaagcagggcgagactccgggagcatcttctgacctcaaccgcctagacaaggacccgatttatgtgggtggattaccaaggtcaagagttgtaaggagaggtgtcaccaccaaaagctttgtgggctgcatcaagaacctggaaatatccagatcaacctttgacttactcagaaattcctatggagtgagaaaaggctgtttactggagcccatccggagtgttagcttcctgaaaggcggctacattgaattgccacccaaatctttgtcaccagaatcagaatggctggtaacatttgccaccacgaacagcagtggcatcatcctggctgccctcggcggggatgtggagaagcggggtgatcgtgaggaagcacacgtgcccttcttttccgtcatgctgatcggaggcaacattgaggtacatgtcaatcctggggatgggacaggcctgagaaaagctctcctgcacgctcccacgggtacctgcagtgatggacaagcgcattccatctccttggtcaggaatcggagaattatcactgtccaattggatgagaacaatcctgtggaaatgaagttgggcacattagtagaaagcaggacgataaatgtgtccaatctgtacgtcgggggaattccagagggagaggggacgtcactgctcacaatgagaagatcgttccatggctgtatcaaaaacctgatcttcaatttggaacttttggatttcaacagtgcagttggccatgagcaagtcgacctggacacctgctggctgtcagaaaggcctaagctggctcccgatgcagaggacagcaagctcttgccagagccccgggcttttccagaacagtgtgtggtggatgcagctctggagtacgttcccggcgctcaccagtttggtctcacacaaaacagccatttcatcttgccttttaatcagtcggctgtcagaaagaagctctcggttgagctaagcatccgcacgttcgcctccagcggcctgatttactacatggctcatcagaaccaagcagactacgctgtgctccagctgcacgggggccgcctccacttcatgtttgaccttggcaaaggcagaacaaaggtctctcaccctgcactgctcagtgatggcaagtggcacacggtcaagacagactatgttaaaagaaaaggcttcataactgtcgacggccgagagtctcccatggtgactgtggtgggagatggaaccatgctggatgtggagggtttgttctacctaggaggcctgccctcccagtaccaggccaggaaaattggaaatatcacccacagcatccctgcctgcattggggatgtgacggttaacagcaaacagctggacaaggacagcccggtgtctgccttcacggtgaacaggtgctacgcagtggcccaggaaggaacatactttgacggaagcggatatgcagctcttgtcaaagagggctacaaagtccagtcagatgtgaacatcacactggagtttcgaacctcctcgcagaatggcgtcctcctggggatcagcactgccaaagtggatgccattggactagagcttgtggacggcaaggtcttgttccatgtcaacaatggtgctggcaggataacagctgcatatgagcccaaaaccgccactgtgctctgtgatggaaaatggcacactcttcaagctaacaaaagcaaacaccgtatcactctgattgttgacgggaacgcagttggcgctgaaagtccacacacccagtctacctcagtggacaccaacaatcccatttatgttggtggctatcctgctggtgtgaagcaaaaatgcctgcgcagccagacctcgttccgcgggtgtttgaggaagctagctctgattaagagcccgcaggtgcagtcctttgacttcagcagagcgttcgaactgcacggagttttccttcattcctgtcctgggaccgagtcctgaacttcaagcagaatcctcagttggaatcattgctaatattttgaggagaagtgtatgtgtgaattaagaatctcttcagttcatatttcatttccaactcaggttaagtgtttctggggagagatgttgtgtttacgttacactaaaaccacatgtgcaacaaatacctccattaaatggtctaaaatgtaaattgaattccctggctctctttttaaacgtatttttaaaaaaatctttatacacattgaatgttctgttgattacttgatagtattttatgtttttcattttgagctttttaaaaaagtatcaatacagatgataacagatca

SEQ ID NO: 147399 - DNA, 9640 bp, Homo sapiens
  Payload ID: 9155
  Gene Symbol: LAMA2
  Gene Name: laminin, alpha 2
  Uniprot ID: P24043
  ENST ID: ENST00000421865
  CDS Start-End: 50-9418
cagcgactcctctggctcccgagaagtggatccggtcgcggccactacgatgccgggagccgccggggtcctcctccttctgctgctctccggaggcctcgggggcgtacaggcgcagcggccgcagcagcagcggcagtcacaggcacatcagcaaagaggtttattccctgctgtcctgaatcttgcttctaatgctcttatcacgaccaatgcaacatgtggagaaaaaggacctgaaatgtactgcaaattggtagaacatgtccctgggcagcctgtgaggaacccgcagtgtcgaatctgcaatcaaaacagcagcaatccaaaccagagacacccgattacaaatgctattgatggaaagaacacttggtggcagagtcccagtattaagaatggaatcgaataccattatgtgacaattaccctggatttacagcaggtgttccagatcgcgtatgtgattgtgaaggcagctaactccccccggcctggaaactggattttggaacgctctcttgatgatgttgaatacaagccctggcagtatcatgctgtgacagacacggagtgcctaacgctttacaatatttatccccgcactgggccaccgtcatatgccaaagatgatgaggtcatctgcacttcattttactccaagatacaccccttagaaaatggagagattcacatctctttaatcaatgggagaccaagtgccgatgatccttctccagaactgctagaatttacctccgctcgctatattcgcctgagatttcagaggatccgcacactgaatgctgacttgatgatgtttgctcacaaagacccaagagaaattgaccccattgtcaccagaagatattactactcggtcaaggatatttcagttggagggatgtgcatctgctatggtcatgccagggcttgtccacttgatccagcgacaaataaatctcgctgtgagtgtgagcataacacatgtggcgatagctgtgatcagtgctgtccaggattccatcagaaaccctggagagctggaacttttctaactaaaactgaatgtgaagcatgcaattgtcatggaaaagctgaagaatgctattatgatgaaaatgttgccagaagaaatctgagtttgaatatacgtggaaagtacattggagggggtgtctgcattaattgtacccaaaacactgctggtataaactgcgagacatgtactgatggcttcttcagacccaaaggggtatctccaaattatccaaggccatgccagccatgtcattgcgatccaattggttccttaaatgaagtctgtgtcaaggatgagaaacatgctcgacgaggtttggcacctggatcctgtcattgcaaaactggttttggaggtgtgagctgtgatcggtgtgccaggggctacactggctacccggactgcaaagcctgtaactgcagtgggttagggagcaaaaatgaggatccttgttttggcccctgtatctgcaaggaaaatgttgaaggaggagactgtagtcgttgcaaatccggcttcttcaatttgcaagaggataattggaaaggctgcgatgagtgtttctgttcaggggtttcaaacagatgtcagagttcctactggacctatggcaaaatacaagatatgagtggctggtatctgactgaccttcctggccgcattcgagtggctccccagcaggacgacttggactcacctcagcagatcagcatcagtaacgcggaggcccggcaagccctgccgcacagctactactggagcgcgccggctccctatctgggaaacaaactcccagcagtaggaggacagttgacatttaccatatcatatgaccttgaagaagaggaagaagatacagaacgtgttctccagcttatgattatcttagagggtaatgacttgagcatcagcacagcccaagatgaggtgtacctgcacccatctgaagaacatactaatgtattgttacttaaagaagaatcatttaccatacatggcacacattttccagtccgtagaaaggaatttatgacagtgcttgcgaatttgaagagagtcctcctacaaatcacatacagctttgggatggatgccatcttcaggttgagctctgttaaccttgaatccgctgtctcctatcctactgatggaagcattgcagcagctgtagaagtgtgtcagtgcccaccagggtatactggctcctcttgtgaatcttgttggcctaggcacaggcgagttaacggcactatttttggtggcatctgtgagccatgtcagtgctttggtcatgcggagtcctgtgatgacgtcactggagaatgcctgaactgtaaggatcacacaggtggcccatattgtgataaatgtcttcctggtttctatggcgagcctactaaaggaacctctgaagactgtcaaccctgtgcctgtccactcaatatcccatccaataactttagcccaacgtgccatttagaccggagtcttggattgatctgtgatggatgccctgtcgggtacacaggaccacgctgtgagaggtgtgcagaaggctattttggacaaccctctgtacctggaggatcatgtcagccatgccaatgcaatgacaaccttgacttctccatccctggcagctgtgacagcttgtctggctcctgtctgatatgtaaaccaggtacaacaggccggtactgtgagctctgtgctgatggatattttggagatgcagttgatgcgaagaactgtcagccctgtcgctgtaatgccggtggctctttctctgaggtttgccacagtcaaactggacagtgtgagtgcagagccaacgttcagggtcagagatgtgacaaatgcaaggctgggacctttggcctacaatcagcaaggggctgtgttccctgcaactgcaattcttttgggtctaagtcattcgactgtgaagagagtggacaatgttggtgccaacctggagtcacagggaagaaatgtgaccgctgtgcccacggctatttcaacttccaagaaggaggctgcacagcttgtgaatgttctcatctgggtaataattgtgacccaaagactgggcgatgcatttgccctcccaataccattggagagaaatgttctaaatgtgcacccaatacctggggccacagcattaccactggttgtaaggcttgtaactgcagcacagtgggatccttggatttccaatgcaatgtaaatacaggccaatgcaactgtcatccaaaattctctggtgcaaaatgtacagagtgcagtcgaggtcactggaactaccctcgctgcaatctctgtgactgcttcctccctgggacagatgccacaacctgtgattcagagactaaaaaatgctcctgtagtgatcaaactgggcagtgcacttgtaaggtgaatgtggaaggcatccactgtgacagatgccggcctggcaaattcggactcgatgccaagaatccacttggctgcagcagctgctattgcttcggcactactacccagtgctctgaagcaaaaggactgatccggacgtgggtgactctgaaggctgagcagaccattctacccctggtagatgaggctctgcagcacacgaccaccaagggcattgtttttcaacatccagagattgttgcccacatggacctgatgagagaagatctccatttggaacctttttattggaaacttccagaacaatttgaaggaaagaagttgatggcctatgggggcaaactcaagtatgcaatctatttcgaggctcgggaagaaacaggtttctctacatataatcctcaagtgatcattcgaggtgggacacctactcatgctagaattatcgtcaggcatatggctgctcctctgattggccaattgacaaggcatgaaattgaaatgacagagaaagaatggaaatattatggggatgatcctcgagtccatagaactgtgacccgagaagacttcttggatatactatatgatattcattacattcttatcaaagctacttatggaaatttcatgcgacaaagcaggatttctgaaatctcaatggaggtagctgaacaaggacgtggaacaacaatgactcctccagctgacttgattgaaaaatgtgattgtcccctgggctattctggcctgtcctgtgaggcatgcttgccgggattttatcgactgcgttctcaaccaggtggccgcacccctggaccaaccctgggcacctgtgttccatgtcaatgtaatggacacagcagcctgtgtgaccctgaaacatcgatatgccagaattgtcaacatcacactgctggtgacttctgtgaacgatgtgctcttggatactatggaattgtcaagggattgccaaatgactgtcagcaatgtgcctgccctctgatttcttccagtaacaatttcagcccctcttgtgtcgcagaaggacttgacgactaccgctgcacggcttgtccacggggatatgaaggccagtactgtgaaaggtgtgcccctggctatactggcagtccaggcaaccctggaggctcctgccaagaatgtgagtgtgatccctatggctcactgcctgtgccctgtgaccctgtcacaggattctgcacgtgccgacctggagccacgggaaggaagtgtgacggctgcaagcactggcatgcacgcgagggctgggagtgtgttttttgtggagatgagtgcactggccttcttctcggtgacttggctcgcctggagcagatggtcatgagcatcaacctcactggtccgctgcctgcgccatataaaatgctgtatggtcttgaaaatatgactcaggagctaaagcacttgctgtcacctcagcgggccccagagaggcttattcagctggcagagggcaatctgaatacactcgtgaccgaaatgaacgagctgctgaccagggctaccaaagtgacagcagatggcgagcagaccggacaggatgctgagaggaccaacacaagagcaaagtccctgggagaattcattaaggagcttgcccgggatgcagaagctgtaaatgaaaaagctataaaactaaatgaaactctaggaactcgagacgaggcctttgagagaaatttggaagggcttcagaaagagattgaccagatgattaaagaactgaggaggaaaaatctagagacacaaaaggaaattgctgaagatgagttggtagctgcagaagcccttctgaaaaaagtgaagaagctgtttggagagtcccggggggaaaatgaagaaatggagaaggatctccgggaaaaactggctgactacaaaaacaaagttgatgatgcttgggaccttttgagagaagccacagataaaatcagagaagctaatcgcctatttgcagtaaatcagaaaaacatgactgcattggagaaaaagaaggaggctgttgaaagcggcaaacgacaaattgagaacactttaaaagagggcaatgacatactcgatgaagccaaccgtcttgcagatgaaatcaactccatcatagactatgttgaagacatccaaactaaattgccacctatgtctgaggagcttaatgataaaatagatgacctctcccaagaaataaaggacaggaagcttgctgagaaggtgtcccaggctgagagccacgcagctcagttgaatgactcatctgctgtccttgatggaatccttgatgaggctaaaaacatctccttcaatgccactgcagccttcaaagcttacagcaatattaaggactatattgatgaagctgagaaagttgccaaagaagccaaagatcttgcacatgaagctacaaaactggcaacaggtcctcggggtttattaaaggaagatgccaaaggctgtcttcagaaaagcttcaggattcttaacgaagccaagaagttagcaaatgatgtaaaagaaaatgaagaccatctaaatggcttaaaaaccaggatagaaaatgctgatgctagaaatggggatctcttgagaactttgaatgacactttgggaaagttatcagctattccaaatgatacagctgctaaactgcaagctgttaaggacaaagccagacaagccaacgacacagctaaagatgtactggcacagattacagagctccaccagaacctcgatggcctgaagaagaattacaataaactagcagacagcgtcgccaaaacgaatgctgtggttaaagatccttccaagaacaaaatcattgccgatgcagatgccactgtcaaaaatttagaacaggaagctgaccggctaatagataaactcaaacccatcaaggaacttgaggataacctaaagaaaaacatctctgagataaaggaattgataaaccaagctcggaaacaagccaattctatcaaagtatctgtgtcttcaggaggtgactgcattcgaacatacaaaccagaaatcaagaaaggaagttacaataatattgttgtcaacgtaaagacagctgttgctgataacctcctcttttatcttggaagtgccaaatttattgactttctggctatagaaatgcgtaaaggcaaagtcagcttcctctgggatgttggatctggagttggacgtgtagagtacccagatttgactattgatgactcatattggtaccgtatcgtagcatcaagaactgggagaaatggaactatttctgtgagagccctggatggacccaaagccagcattgtgcccagcacacaccattcgacgtctcctccagggtacacgattctagatgtggatgcaaatgcaatgctgtttgttggtggcctgactgggaaattaaagaaggctgatgctgtacgtgtgattacattcactggctgcatgggagaaacatactttgacaacaaacctataggtttgtggaatttccgagaaaaagaaggtgactgcaaaggatgcactgtcagtcctcaggtggaagatagtgaggggactattcaatttgatggagaaggttatgcattggtcagccgtcccattcgctggtaccccaacatctccactgtcatgttcaagttcagaacattttcttcgagtgctcttctgatgtatcttgccacacgagacctgagagatttcatgagtgtggagctcactgatgggcacataaaagtcagttacgatctgggctcaggaatggcttccgttgtcagcaatcaaaaccataatgatgggaaatggaaatcattcactctgtcaagaattcaaaaacaagccaatatatcaattgtagatatagatactaatcaggaggagaatatagcaacttcgtcttctggaaacaactttggtcttgacttgaaagcagatgacaaaatatattttggtggcctgccaacgctgagaaacttgagtatgaaagcaaggccagaagtaaatctgaagaaatattccggctgcctcaaagatattgaaatttcaagaactccgtacaatatactcagtagtcccgattatgttggtgttaccaaaggatgttccctggagaatgtttacacagttagctttcctaagcctggttttgtggagctctcccctgtgccaattgatgtaggaacagaaatcaacctgtcattcagcaccaagaatgagtccggcatcattcttttgggaagtggagggacaccagcaccacctaggagaaaacgaaggcagactggacaggcctattatgcaatactcctcaacaggggccgtctggaagtgcatctctccacaggggcacgaacaatgaggaaaattgtgatcagaccagagccgaatctgtttcatgatggaagagaacattccgttcatgtagagcgaactagaggcatctttacagttcaagtggatgaaaacagaagatacatgcaaaacctgacagttgaacagcctatcgaagttaaaaagcttttcgttgggggtgctccacctgaatttcaaccttccccactcagaaatattcctccttttgaaggctgcatatggaatcttgttattaactctgtccccatggactttgcaaggcctgtgtccttcaaaaatgctgacattggtcgctgtgcccatcagaaactccgtgaagatgaagatggagcagctccagctgaaatagttatccagcctgagccagttcccaccccagcctttcctacgcccaccccagttctgacacatggtccttgtgctgcagaatcagaaccagctcttttgatagggagcaagcagttcgggctttcaagaaacagtcacattgcaattgcatttgatgacaccaaagttaaaaaccgtctcacaattgagttggaagtaagaaccgaagctgaatccggcttgcttttttacatggctcgcatcaatcatgctgattttgcaacagttcagctgagaaatggattgccctacttcagctatgacttggggagtggggacacccacaccatgatccccaccaaaatcaatgatggccagtggcacaagattaagataatgagaagtaagcaagaaggaattctttatgtagatggggcttccaacagaaccatcagtcccaaaaaagccgacatcctggatgtcgtgggaatgctgtatgttggtgggttacccatcaactacactacccgaagaattggtccagtgacctatagcattgatggctgcgtcaggaatctccacatggcagaggcccctgccgatctggaacaacccacctccagcttccatgttgggacatgttttgcaaatgctcagaggggaacatattttgacggaaccggttttgccaaagcagttggtggattcaaagtgggattggaccttcttgtagaatttgaattccgcacaactacaacgactggagttcttctggggatcagtagtcaaaaaatggatggaatgggtattgaaatgattgatgaaaagttgatgtttcatgtggacaatggtgcgggcagattcactgctgtctatgatgctggggttccagggcatttgtgtgatggacaatggcataaagtcactgccaacaagatcaaacaccgcattgagctcacagtcgatgggaaccaggtggaagcccaaagcccaaacccagcatctacatcagctgacacaaatgaccctgtgtttgttggaggcttcccagatgacctcaagcagtttggcctaacaaccagtattccgttccgaggttgcatcagatccctgaagctcaccaaaggcacaggcaagccactggaggttaattttgccaaggccctggaactgaggggcgttcaacctgtatcatgcccagccaactaataaaaataagtgtaaccccaggaagagtctgtcaaaacaagtatatcaagtaaaacaaacaaatatattttacctatatatgttaattaaactaatttgtgcatgtacatagaattctttctgtattcagatggtgctaattcagactccagactgaattttaattcaagttctttctcaagtctataaataatattaaactgattatttcattctaaataa

SEQ ID NO: 147400 - DNA, 9687 bp, Homo sapiens
  Payload ID: 9155
  Gene Symbol: LAMA2
  Gene Name: laminin, alpha 2
  ENST ID: ENST00000618192
  CDS Start-End: 106-9471
ttccccagcagctgctgctcgctcagctcacaagccaaggccaggggacagggcggcagcgactcctctggctcccgagaagtggatccggtcgcggccactacgatgccgggagccgccggggtcctcctccttctgctgctctccggaggcctcgggggcgtacaggcgcagcggccgcagcagcagcggcagtcacaggcacatcagcaaagaggtttattccctgctgtcctgaatcttgcttctaatgctcttatcacgaccaatgcaacatgtggagaaaaaggacctgaaatgtactgcaaattggtagaacatgtccctgggcagcctgtgaggaacccgcagtgtcgaatctgcaatcaaaacagcagcaatccaaaccagagacacccgattacaaatgctattgatggaaagaacacttggtggcagagtcccagtattaagaatggaatcgaataccattatgtgacaattaccctggatttacagcaggtgttccagatcgcgtatgtgattgtgaaggcagctaactccccccggcctggaaactggattttggaacgctctcttgatgatgttgaatacaagccctggcagtatcatgctgtgacagacacggagtgcctaacgctttacaatatttatccccgcactgggccaccgtcatatgccaaagatgatgaggtcatctgcacttcattttactccaagatacaccccttagaaaatggagagattcacatctctttaatcaatgggagaccaagtgccgatgatccttctccagaactgctagaatttacctccgctcgctatattcgcctgagatttcagaggatccgcacactgaatgctgacttgatgatgtttgctcacaaagacccaagagaaattgaccccattgtcaccagaagatattactactcggtcaaggatatttcagttggagggatgtgcatctgctatggtcatgccagggcttgtccacttgatccagcgacaaataaatctcgctgtgagtgtgagcataacacatgtggcgatagctgtgatcagtgctgtccaggattccatcagaaaccctggagagctggaacttttctaactaaaactgaatgtgaagcatgcaattgtcatggaaaagctgaagaatgctattatgatgaaaatgttgccagaagaaatctgagtttgaatatacgtggaaagtacattggagggggtgtctgcattaattgtacccaaaacactgctggtataaactgcgagacatgtactgatggcttcttcagacccaaaggggtatctccaaattatccaaggccatgccagccatgtcattgcgatccaattggttccttaaatgaagtctgtgtcaaggatgagaaacatgctcgacgaggtttggcacctggatcctgtcattgcaaaactggttttggaggtgtgagctgtgatcggtgtgccaggggctacactggctacccggactgcaaagcctgtaactgcagtgggttagggagcaaaaatgaggatccttgttttggcccctgtatctgcaaggaaaatgttgaaggaggagactgtagtcgttgcaaatccggcttcttcaatttgcaagaggataattggaaaggctgcgatgagtgtttctgttcaggggtttcaaacagatgtcagagttcctactggacctatggcaaaatacaagatatgagtggctggtatctgactgaccttcctggccgcattcgagtggctccccagcaggacgacttggactcacctcagcagatcagcatcagtaacgcggaggcccggcaagccctgccgcacagctactactggagcgcgccggctccctatctgggaaacaaactcccagcagtaggaggacagttgacatttaccatatcatatgaccttgaagaagaggaagaagatacagaacgtgttctccagcttatgattatcttagagggtaatgacttgagcatcagcacagcccaagatgaggtgtacctgcacccatctgaagaacatactaatgtattgttacttaaagaagaatcatttaccatacatggcacacattttccagtccgtagaaaggaatttatgacagtgcttgcgaatttgaagagagtcctcctacaaatcacatacagctttgggatggatgccatcttcaggttgagctctgttaaccttgaatccgctgtctcctatcctactgatggaagcattgcagcagctgtagaagtgtgtcagtgcccaccagggtatactggctcctcttgtgaatcttgttggcctaggcacaggcgagttaacggcactatttttggtggcatctgtgagccatgtcagtgctttggtcatgcggagtcctgtgatgacgtcactggagaatgcctgaactgtaaggatcacacaggtggcccatattgtgataaatgtcttcctggtttctatggcgagcctactaaaggaacctctgaagactgtcaaccctgtgcctgtccactcaatatcccatccaataactttagcccaacgtgccatttagaccggagtcttggattgatctgtgatggatgccctgtcgggtacacaggaccacgctgtgagaggtgtgcagaaggctattttggacaaccctctgtacctggaggatcatgtcagccatgccaatgcaatgacaaccttgacttctccatccctggcagctgtgacagcttgtctggctcctgtctgatatgtaaaccaggtacaacaggccggtactgtgagctctgtgctgatggatattttggagatgcagttgatgcgaagaactgtcagccctgtcgctgtaatgccggtggctctttctctgaggtttgccacagtcaaactggacagtgtgagtgcagagccaacgttcagggtcagagatgtgacaaatgcaaggctgggacctttggcctacaatcagcaaggggctgtgttccctgcaactgcaattcttttgggtctaagtcattcgactgtgaagagagtggacaatgttggtgccaacctggagtcacagggaagaaatgtgaccgctgtgcccacggctatttcaacttccaagaaggaggctgcacagcttgtgaatgttctcatctgggtaataattgtgacccaaagactgggcgatgcatttgccctcccaataccattggagagaaatgttctaaatgtgcacccaatacctggggccacagcattaccactggttgtaaggcttgtaactgcagcacagtgggatccttggatttccaatgcaatgtaaatacaggccaatgcaactgtcatccaaaattctctggtgcaaaatgtacagagtgcagtcgaggtcactggaactaccctcgctgcaatctctgtgactgcttcctccctgggacagatgccacaacctgtgattcagagactaaaaaatgctcctgtagtgatcaaactgggcagtgcacttgtaaggtgaatgtggaaggcatccactgtgacagatgccggcctggcaaattcggactcgatgccaagaatccacttggctgcagcagctgctattgcttcggcactactacccagtgctctgaagcaaaaggactgatccggacgtgggtgactctgaaggctgagcagaccattctacccctggtagatgaggctctgcagcacacgaccaccaagggcattgtttttcaacatccagagattgttgcccacatggacctgatgagagaagatctccatttggaacctttttattggaaacttccagaacaatttgaaggaaagaagttgatggcctatgggggcaaactcaagtatgcaatctatttcgaggctcgggaagaaacaggtttctctacatataatcctcaagtgatcattcgaggtgggacacctactcatgctagaattatcgtcaggcatatggctgctcctctgattggccaattgacaaggcatgaaattgaaatgacagagaaagaatggaaatattatggggatgatcctcgagtccatagaactgtgacccgagaagacttcttggatatactatatgatattcattacattcttatcaaagctacttatggaaatttcatgcgacaaagcaggatttctgaaatctcaatggaggtagctgaacaaggacgtggaacaacaatgactcctccagctgacttgattgaaaaatgtgattgtcccctgggctattctggcctgtcctgtgaggcatgcttgccgggattttatcgactgcgttctcaaccaggtggccgcacccctggaccaaccctgggcacctgtgttccatgtcaatgtaatggacacagcagcctgtgtgaccctgaaacatcgatatgccagaattgtcaacatcacactgctggtgacttctgtgaacgatgtgctcttggatactatggaattgtcaagggattgccaaatgactgtcagcaatgtgcctgccctctgatttcttccagtaacaatttcagcccctcttgtgtcgcagaaggacttgacgactaccgctgcacggcttgtccacggggatatgaaggccagtactgtgaaaggtgtgcccctggctatactggcagtccaggcaaccctggaggctcctgccaagaatgtgagtgtgatccctatggctcactgcctgtgccctgtgaccctgtcacaggattctgcacgtgccgacctggagccacgggaaggaagtgtgacggctgcaagcactggcatgcacgcgagggctgggagtgtgttttttgtggagatgagtgcactggccttcttctcggtgacttggctcgcctggagcagatggtcatgagcatcaacctcactggtccgctgcctgcgccatataaaatgctgtatggtcttgaaaatatgactcaggagctaaagcacttgctgtcacctcagcgggccccagagaggcttattcagctggcagagggcaatctgaatacactcgtgaccgaaatgaacgagctgctgaccagggctaccaaagtgacagcagatggcgagcagaccggacaggatgctgagaggaccaacacaagagcaaagtccctgggagaattcattaaggagcttgcccgggatgcagaagctgtaaatgaaaaagctataaaactaaatgaaactctaggaactcgagacgaggcctttgagagaaatttggaagggcttcagaaagagattgaccagatgattaaagaactgaggaggaaaaatctagagacacaaaaggaaattgctgaagatgagttggtagctgcagaagcccttctgaaaaaagtgaagaagctgtttggagagtcccggggggaaaatgaagaaatggagaaggatctccgggaaaaactggctgactacaaaaacaaagttgatgatgcttgggaccttttgagagaagccacagataaaatcagagaagctaatcgcctatttgcagtaaatcagaaaaacatgactgcattggagaaaaagaaggaggctgttgaaagcggcaaacgacaaattgagaacactttaaaagagggcaatgacatactcgatgaagccaaccgtcttgcagatgaaatcaactccatcatagactatgttgaagacatccaaactaaattgccacctatgtctgaggagcttaatgataaaatagatgacctctcccaagaaataaaggacaggaagcttgctgagaaggtgtcccaggctgagagccacgcagctcagttgaatgactcatctgctgtccttgatggaatccttgatgaggctaaaaacatctccttcaatgccactgcagccttcaaagcttacagcaatattaaggactatattgatgaagctgagaaagttgccaaagaagccaaagatcttgcacatgaagctacaaaactggcaacaggtcctcggggtttattaaaggaagatgccaaaggctgtcttcagaaaagcttcaggattcttaacgaagccaagaagttagcaaatgatgtaaaagaaaatgaagaccatctaaatggcttaaaaaccaggatagaaaatgctgatgctagaaatggggatctcttgagaactttgaatgacactttgggaaagttatcagctattccaaatgatacagctgctaaactgcaagctgttaaggacaaagccagacaagccaacgacacagctaaagatgtactggcacagattacagagctccaccagaacctcgatggcctgaagaagaattacaataaactagcagacagcgtcgccaaaacgaatgctgtggttaaagatccttccaagaacacagttgccgatgcagatgccactgtcaaaaatttagaacaggaagctgaccggctaatagataaactcaaacccatcaaggaacttgaggataacctaaagaaaaacatctctgagataaaggaattgataaaccaagctcggaaacaagccaattctatcaaagtatctgtgtcttcaggaggtgactgcattcgaacatacaaaccagaaatcaagaaaggaagttacaataatattgttgtcaacgtaaagacagctgttgctgataacctcctcttttatcttggaagtgccaaatttattgactttctggctatagaaatgcgtaaaggcaaagtcagcttcctctgggatgttggatctggagttggacgtgtagagtacccagatttgactattgatgactcatattggtaccgtatcgtagcatcaagaactgggagaaatggaactatttctgtgagagccctggatggacccaaagccagcattgtgcccagcacacaccattcgacgtctcctccagggtacacgattctagatgtggatgcaaatgcaatgctgtttgttggtggcctgactgggaaattaaagaaggctgatgctgtacgtgtgattacattcactggctgcatgggagaaacatactttgacaacaaacctataggtttgtggaatttccgagaaaaagaaggtgactgcaaaggatgcactgtcagtcctcaggtggaagatagtgaggggactattcaatttgatggagaaggttatgcattggtcagccgtcccattcgctggtaccccaacatctccactgtcatgttcaagttcagaacattttcttcgagtgctcttctgatgtatcttgccacacgagacctgagagatttcatgagtgtggagctcactgatgggcacataaaagtcagttacgatctgggctcaggaatggcttccgttgtcagcaatcaaaaccataatgatgggaaatggaaatcattcactctgtcaagaattcaaaaacaagccaatatatcaattgtagatatagatactaatcaggaggagaatatagcaacttcgtcttctggaaacaactttggtcttgacttgaaagcagatgacaaaatatattttggtggcctgccaacgctgagaaacttgagtatgaaagcaaggccagaagtaaatctgaagaaatattccggctgcctcaaagatattgaaatttcaagaactccgtacaatatactcagtagtcccgattatgttggtgttaccaaaggatgttccctggagaatgtttacacagttagctttcctaagcctggttttgtggagctctcccctgtgccaattgatgtaggaacagaaatcaacctgtcattcagcaccaagaatgagtccggcatcattcttttgggaagtggagggacaccagcaccacctaggagaaaacgaaggcagactggacaggcctattatgcaatactcctcaacaggggccgtctggaagtgcatctctccacaggggcacgaacaatgaggaaaattgtgatcagaccagagccgaatctgtttcatgatggaagagaacattccgttcatgtagagcgaactagaggcatctttacagttcaagtggatgaaaacagaagatacatgcaaaacctgacagttgaacagcctatcgaagttaaaaagcttttcgttgggggtgctccacctgaatttcaaccttccccactcagaaatattcctccttttgaaggctgcatatggaatcttgttattaactctgtccccatggactttgcaaggcctgtgtccttcaaaaatgctgacattggtcgctgtgcccatcagaaactccgtgaagatgaagatggagcagctccagctgaaatagttatccagcctgagccagttcccaccccagcctttcctacgcccaccccagttctgacacatggtccttgtgctgcagaatcagaaccagctcttttgatagggagcaagcagttcgggctttcaagaaacagtcacattgcaattgcatttgatgacaccaaagttaaaaaccgtctcacaattgagttggaagtaagaaccgaagctgaatccggcttgcttttttacatggctcgcatcaatcatgctgattttgcaacagttcagctgagaaatggattgccctacttcagctatgacttggggagtggggacacccacaccatgatccccaccaaaatcaatgatggccagtggcacaagattaagataatgagaagtaagcaagaaggaattctttatgtagatggggcttccaacagaaccatcagtcccaaaaaagccgacatcctggatgtcgtgggaatgctgtatgttggtgggttacccatcaactacactacccgaagaattggtccagtgacctatagcattgatggctgcgtcaggaatctccacatggcagaggcccctgccgatctggaacaacccacctccagcttccatgttgggacatgttttgcaaatgctcagaggggaacatattttgacggaaccggttttgccaaagcagttggtggattcaaagtgggattggaccttcttgtagaatttgaattccgcacaactacaacgactggagttcttctggggatcagtagtcaaaaaatggatggaatgggtattgaaatgattgatgaaaagttgatgtttcatgtggacaatggtgcgggcagattcactgctgtctatgatgctggggttccagggcatttgtgtgatggacaatggcataaagtcactgccaacaagatcaaacaccgcattgagctcacagtcgatgggaaccaggtggaagcccaaagcccaaacccagcatctacatcagctgacacaaatgaccctgtgtttgttggaggcttcccagatgacctcaagcagtttggcctaacaaccagtattccgttccgaggttgcatcagatccctgaagctcaccaaaggcacaggcaagccactggaggttaattttgccaaggccctggaactgaggggcgttcaacctgtatcatgcccagccaactaataaaaataagtgtaaccccaggaagagtctgtcaaaacaagtatatcaagtaaaacaaacaaatatattttacctatatatgttaattaaactaatttgtgcatgtacatagaattctttctgtattcagatggtgctaattcagactccagactgaattttaattcaagttctttctcaagtctataaataatattaaactgattatttcattct

SEQ ID NO: 147401 - DNA, 9678 bp, Homo sapiens
  Payload ID: 9155
  Gene Symbol: LAMA2
  Gene Name: laminin, alpha 2
  ENST ID: ENST00000617695
  CDS Start-End: 106-9462
ttccccagcagctgctgctcgctcagctcacaagccaaggccaggggacagggcggcagcgactcctctggctcccgagaagtggatccggtcgcggccactacgatgccgggagccgccggggtcctcctccttctgctgctctccggaggcctcgggggcgtacaggcgcagcggccgcagcagcagcggcagtcacaggcacatcagcaaagaggtttattccctgctgtcctgaatcttgcttctaatgctcttatcacgaccaatgcaacatgtggagaaaaaggacctgaaatgtactgcaaattggtagaacatgtccctgggcagcctgtgaggaacccgcagtgtcgaatctgcaatcaaaacagcagcaatccaaaccagagacacccgattacaaatgctattgatggaaagaacacttggtggcagagtcccagtattaagaatggaatcgaataccattatgtgacaattaccctggatttacagcaggtgttccagatcgcgtatgtgattgtgaaggcagctaactccccccggcctggaaactggattttggaacgctctcttgatgatgttgaatacaagccctggcagtatcatgctgtgacagacacggagtgcctaacgctttacaatatttatccccgcactgggccaccgtcatatgccaaagatgatgaggtcatctgcacttcattttactccaagatacaccccttagaaaatggagagattcacatctctttaatcaatgggagaccaagtgccgatgatccttctccagaactgctagaatttacctccgctcgctatattcgcctgagatttcagaggatccgcacactgaatgctgacttgatgatgtttgctcacaaagacccaagagaaattgaccccattgtcaccagaagatattactactcggtcaaggatatttcagttggagggatgtgcatctgctatggtcatgccagggcttgtccacttgatccagcgacaaataaatctcgctgtgagtgtgagcataacacatgtggcgatagctgtgatcagtgctgtccaggattccatcagaaaccctggagagctggaacttttctaactaaaactgaatgtgaagcatgcaattgtcatggaaaagctgaagaatgctattatgatgaaaatgttgccagaagaaatctgagtttgaatatacgtggaaagtacattggagggggtgtctgcattaattgtacccaaaacactgctggtataaactgcgagacatgtactgatggcttcttcagacccaaaggggtatctccaaattatccaaggccatgccagccatgtcattgcgatccaattggttccttaaatgaagtctgtgtcaaggatgagaaacatgctcgacgaggtttggcacctggatcctgtcattgcaaaactggttttggaggtgtgagctgtgatcggtgtgccaggggctacactggctacccggactgcaaagcctgtaactgcagtgggttagggagcaaaaatgaggatccttgttttggcccctgtatctgcaaggaaaatgttgaaggaggagactgtagtcgttgcaaatccggcttcttcaatttgcaagaggataattggaaaggctgcgatgagtgtttctgttcaggggtttcaaacagatgtcagagttcctactggacctatggcaaaatacaagatatgagtggctggtatctgactgaccttcctggccgcattcgagtggctccccagcaggacgacttggactcacctcagcagatcagcatcagtaacgcggaggcccggcaagccctgccgcacagctactactggagcgcgccggctccctatctgggaaacaaactcccagcagtaggaggacagttgacatttaccatatcatatgaccttgaagaagaggaagaagatacagaacgtgttctccagcttatgattatcttagagggtaatgacttgagcatcagcacagcccaagatgaggtgtacctgcacccatctgaagaacatactaatgtattgttacttaaagaagaatcatttaccatacatggcacacattttccagtccgtagaaaggaatttatgacagtgcttgcgaatttgaagagagtcctcctacaaatcacatacagctttgggatggatgccatcttcaggttgagctctgttaaccttgaatccgctgtctcctatcctactgatggaagcattgcagcagctgtagaagtgtgtcagtgcccaccagggtatactggctcctcttgtgaatcttgttggcctaggcacaggcgagttaacggcactatttttggtggcatctgtgagccatgtcagtgctttggtcatgcggagtcctgtgatgacgtcactggagaatgcctgaactgtaaggatcacacaggtggcccatattgtgataaatgtcttcctggtttctatggcgagcctactaaaggaacctctgaagactgtcaaccctgtgcctgtccactcaatatcccatccaataactttagcccaacgtgccatttagaccggagtcttggattgatctgtgatggatgccctgtcgggtacacaggaccacgctgtgagaggtgtgcagaaggctattttggacaaccctctgtacctggaggatcatgtcagccatgccaatgcaatgacaaccttgacttctccatccctggcagctgtgacagcttgtctggctcctgtctgatatgtaaaccaggtacaacaggccggtactgtgagctctgtgctgatggatattttggagatgcagttgatgcgaagaactgtcagccctgtcgctgtaatgccggtggctctttctctgaggtttgccacagtcaaactggacagtgtgagtgcagagccaacgttcagggtcagagatgtgacaaatgcaaggctgggacctttggcctacaatcagcaaggggctgtgttccctgcaactgcaattcttttgggtctaagtcattcgactgtgaagagagtggacaatgttggtgccaacctggagtcacagggaagaaatgtgaccgctgtgcccacggctatttcaacttccaagaaggaggctgcacagcttgtgaatgttctcatctgggtaataattgtgacccaaagactgggcgatgcatttgccctcccaataccattggagagaaatgttctaaatgtgcacccaatacctggggccacagcattaccactggttgtaaggcttgtaactgcagcacagtgggatccttggatttccaatgcaatgtaaatacaggccaatgcaactgtcatccaaaattctctggtgcaaaatgtacagagtgcagtcgaggtcactggaactaccctcgctgcaatctctgtgactgcttcctccctgggacagatgccacaacctgtgattcagagactaaaaaatgctcctgtagtgatcaaactgggcagtgcacttgtaaggtgaatgtggaaggcatccactgtgacagatgccggcctggcaaattcggactcgatgccaagaatccacttggctgcagcagctgctattgcttcggcactactacccagtgctctgaagcaaaaggactgatccggacgtgggtgactctgaaggctgagcagaccattctacccctggtagatgaggctctgcagcacacgaccaccaagggcattgtttttcaacatccagagattgttgcccacatggacctgatgagagaagatctccatttggaacctttttattggaaacttccagaacaatttgaaggaaagaagttgatggcctatgggggcaaactcaagtatgcaatctatttcgaggctcgggaagaaacaggtttctctacatataatcctcaagtgatcattcgaggtgggacacctactcatgctagaattatcgtcaggcatatggctgctcctctgattggccaattgacaaggcatgaaattgaaatgacagagaaagaatggaaatattatggggatgatcctcgagtccatagaactgtgacccgagaagacttcttggatatactatatgatattcattacattcttatcaaagctacttatggaaatttcatgcgacaaagcaggatttctgaaatctcaatggaggtagctgaacaaggacgtggaacaacaatgactcctccagctgacttgattgaaaaatgtgattgtcccctgggctattctggcctgtcctgtgaggcatgcttgccgggattttatcgactgcgttctcaaccaggtggccgcacccctggaccaaccctgggcacctgtgttccatgtcaatgtaatggacacagcagcctgtgtgaccctgaaacatcgatatgccagaattgtcaacatcacactgctggtgacttctgtgaacgatgtgctcttggatactatggaattgtcaagggattgccaaatgactgtcagcaatgtgcctgccctctgatttcttccagtaacaatttcagcccctcttgtgtcgcagaaggacttgacgactaccgctgcacggcttgtccacggggatatgaaggccagtactgtgaaaggtgtgcccctggctatactggcagtccaggcaaccctggaggctcctgccaagaatgtgagtgtgatccctatggctcactgcctgtgccctgtgaccctgtcacaggattctgcacgtgccgacctggagccacgggaaggaagtgtgacggctgcaagcactggcatgcacgcgagggctgggagtgtgttttttgtggagatgagtgcactggccttcttctcggtgacttggctcgcctggagcagatggtcatgagcatcaacctcactggtccgctgcctgcgccatataaaatgctgtatggtcttgaaaatatgactcaggagctaaagcacttgctgtcacctcagcgggccccagagaggcttattcagctggcagagggcaatctgaatacactcgtgaccgaaatgaacgagctgctgaccagggctaccaaagtgacagcagatggcgagcagaccggacaggatgctgagaggaccaacacaagagcaaagtccctgggagaattcattaaggagcttgcccgggatgcagaagctgtaaatgaaaaagctataaaactaaatgaaactctaggaactcgagacgaggcctttgagagaaatttggaagggcttcagaaagagattgaccagatgattaaagaactgaggaggaaaaatctagagacacaaaaggaaattgctgaagatgagttggtagctgcagaagcccttctgaaaaaagtgaagaagctgtttggagagtcccggggggaaaatgaagaaatggagaaggatctccgggaaaaactggctgactacaaaaacaaagttgatgatgcttgggaccttttgagagaagccacagataaaatcagagaagctaatcgcctatttgcagtaaatcagaaaaacatgactgcattggagaaaaagaaggaggctgttgaaagcggcaaacgacaaattgagaacactttaaaagagggcaatgacatactcgatgaagccaaccgtcttgcagatgaaatcaactccatcatagactatgttgaagacatccaaactaaattgccacctatgtctgaggagcttaatgataaaatagatgacctctcccaagaaataaaggacaggaagcttgctgagaaggtgtcccaggctgagagccacgcagctcagttgaatgactcatctgctgtccttgatggaatccttgatgaggctaaaaacatctccttcaatgccactgcagccttcaaagcttacagcaatattaaggactatattgatgaagctgagaaagttgccaaagaagccaaagatcttgcacatgaagctacaaaactggcaacaggtcctcggggtttattaaaggaagatgccaaaggctgtcttcagaaaagcttcaggattcttaacgaagccaagaagttagcaaatgatgtaaaagaaaatgaagaccatctaaatggcttaaaaaccaggatagaaaatgctgatgctagaaatggggatctcttgagaactttgaatgacactttgggaaagttatcagctattccaaatgatacagctgctaaactgcaagctgttaaggacaaagccagacaagccaacgacacagctaaagatgtactggcacagattacagagctccaccagaacctcgatggcctgaagaagaattacaataaactagcagacagcgtcgccaaaacgaatgctgtggttaaagatccttccaagaacaatgcagttgccgatgcagatgccactgtcaaaaatttagaacaggaagctgaccggctaatagataaactcaaacccatcaaggaacttgaggataacctaaagaaaaacatctctgagataaaggaattgataaaccaagctcggaaacaagccaattctatcaaagtatctgtgtcttcaggaggtgactgcattcgaacatacaaaccagaaatcaagaaaggaagttacaataatattgttgtcaacgtaaagacagctgttgctgataacctcctcttttatcttggaagtgccaaatttattgactttctggctatagaaatgcgtaaaggcaaagtcagcttcctctgggatgttggatctggagttggacgtgtagagtacccagatttgactattgatgactcatattggtaccgtatcgtagcatcaagaactgggagaaatggaactatttctgtgagagccctggatggacccaaagccagcattgtgcccagcacacaccattcgacgtctcctccagggtacacgattctagatgtggatgcaaatgcaatgctgtttgttggtggcctgactgggaaattaaagaaggctgatgctgtacgtgtgattacattcactggctgcatgggagaaacatactttgacaacaaacctataggtttgtggaatttccgagaaaaagaaggtgactgcaaaggatgcactgtcagtcctcaggtggaagatagtgaggggactattcaatttgatggagaaggttatgcattggtcagccgtcccattcgctggtaccccaacatctccactgtcatgttcaagttcagaacattttcttcgagtgctcttctgatgtatcttgccacacgagacctgagagatttcatgagtgtggagctcactgatgggcacataaaagtcagttacgatctgggctcaggaatggcttccgttgtcagcaatcaaaaccataatgatgggaaatggaaatcattcactctgtcaagaattcaaaaacaagccaatatatcaattgtagatatagatactaatcaggaggagaatatagcaacttcgtcttctggaaacaactttggtcttgacttgaaagcagatgacaaaatatattttggtggcctgccaacgctgagaaacttgaggccagaagtaaatctgaagaaatattccggctgcctcaaagatattgaaatttcaagaactccgtacaatatactcagtagtcccgattatgttggtgttaccaaaggatgttccctggagaatgtttacacagttagctttcctaagcctggttttgtggagctctcccctgtgccaattgatgtaggaacagaaatcaacctgtcattcagcaccaagaatgagtccggcatcattcttttgggaagtggagggacaccagcaccacctaggagaaaacgaaggcagactggacaggcctattatgcaatactcctcaacaggggccgtctggaagtgcatctctccacaggggcacgaacaatgaggaaaattgtgatcagaccagagccgaatctgtttcatgatggaagagaacattccgttcatgtagagcgaactagaggcatctttacagttcaagtggatgaaaacagaagatacatgcaaaacctgacagttgaacagcctatcgaagttaaaaagcttttcgttgggggtgctccacctgaatttcaaccttccccactcagaaatattcctccttttgaaggctgcatatggaatcttgttattaactctgtccccatggactttgcaaggcctgtgtccttcaaaaatgctgacattggtcgctgtgcccatcagaaactccgtgaagatgaagatggagcagctccagctgaaatagttatccagcctgagccagttcccaccccagcctttcctacgcccaccccagttctgacacatggtccttgtgctgcagaatcagaaccagctcttttgatagggagcaagcagttcgggctttcaagaaacagtcacattgcaattgcatttgatgacaccaaagttaaaaaccgtctcacaattgagttggaagtaagaaccgaagctgaatccggcttgcttttttacatggctcgcatcaatcatgctgattttgcaacagttcagctgagaaatggattgccctacttcagctatgacttggggagtggggacacccacaccatgatccccaccaaaatcaatgatggccagtggcacaagattaagataatgagaagtaagcaagaaggaattctttatgtagatggggcttccaacagaaccatcagtcccaaaaaagccgacatcctggatgtcgtgggaatgctgtatgttggtgggttacccatcaactacactacccgaagaattggtccagtgacctatagcattgatggctgcgtcaggaatctccacatggcagaggcccctgccgatctggaacaacccacctccagcttccatgttgggacatgttttgcaaatgctcagaggggaacatattttgacggaaccggttttgccaaagcagttggtggattcaaagtgggattggaccttcttgtagaatttgaattccgcacaactacaacgactggagttcttctggggatcagtagtcaaaaaatggatggaatgggtattgaaatgattgatgaaaagttgatgtttcatgtggacaatggtgcgggcagattcactgctgtctatgatgctggggttccagggcatttgtgtgatggacaatggcataaagtcactgccaacaagatcaaacaccgcattgagctcacagtcgatgggaaccaggtggaagcccaaagcccaaacccagcatctacatcagctgacacaaatgaccctgtgtttgttggaggcttcccagatgacctcaagcagtttggcctaacaaccagtattccgttccgaggttgcatcagatccctgaagctcaccaaaggcacaggcaagccactggaggttaattttgccaaggccctggaactgaggggcgttcaacctgtatcatgcccagccaactaataaaaataagtgtaaccccaggaagagtctgtcaaaacaagtatatcaagtaaaacaaacaaatatattttacctatatatgttaattaaactaatttgtgcatgtacatagaattctttctgtattcagatggtgctaattcagactccagactgaattttaattcaagttctttctcaagtctataaataatattaaactgattatttcattct

SEQ ID NO: 147402 - DNA, 5671 bp, Homo sapiens
  Payload ID: 9156
  Gene Symbol: LAMA3
  Gene Name: laminin, alpha 3
  ENST ID: ENST00000269217
  CDS Start-End: 206-5380
aattacagagcggtgcgcttacctgcgggactgttatgtgcgctctggcacaggctgactcatgtgtgaagtttaaaggtggggcccctgccgcagacagccttcctcacctgagtcaggcaggcccgggcactgagcaggaagggcaggtataagaggaagaggcagaggttcctgcgcagccagcggacgtccaggaaccgggatgcctccagcagtgaggcggtcagcctgcagcatgggatggctgtggatctttggggcagccctggggcagtgtctgggctacagttcacagcagcaaagggtgccatttcttcagcctcccggtcaaagtcaactgcaagcgagttatgtggagtttagacccagccagggttgtagccctggatactatcgggatcataaaggcttgtataccggacggtgtgttccctgcaattgcaacggacattcaaatcaatgccaggatggctcaggcatatgtgttaactgtcagcacaacaccgcgggagagcactgtgaacgctgccaggagggctactatggcaacgccgtccacggatcctgcagggcctgcccatgtcctcacactaacagctttgccactggctgtgtggtgaatgggggagacgtgcggtgctcctgcaaagctgggtacacaggaacacagtgtgaaaggtgtgcaccgggatatttcgggaatccccagaaattcggaggtagctgccaaccatgcagttgtaacagcaatggccagctgggcagctgtcatcccctgactggagactgcataaaccaagaacccaaagatagcagccctgcagaagaatgtgatgattgcgacagctgtgtgatgaccctcctgaacgacctggccaccatgggcgagcagctccgcctggtcaagtctcagctgcagggcctgagtgccagcgcagggcttctggagcagatgaggcacatggagacccaggccaaggacctgaggaatcagttgctcaactaccgttctgccatttcaaatcatggatcaaaaatagaaggcctggaaagagaactgactgatttgaatcaagaatttgagactttgcaagaaaaggctcaagtaaattccagaaaagcacaaacattaaacaacaatgttaatcgggcaacacaaagcgcaaaagaactggatgtgaagattaaaaatgtcatccggaatgtgcacattcttttaaagcagatctctgggacagatggagagggaaacaacgtgccttcaggtgacttttccagagagtgggctgaagcccagcgcatgatgagggaactgcggaacaggaactttggaaagcacctcagagaagcagaagctgataaaagggagtcgcagctcttgctgaaccggataaggacctggcagaaaacccaccagggggagaacaatgggcttgctaacagtatccgggattctttaaatgaatacgaagccaaactcagtgaccttcgtgctcggctgcaggaggcagctgcccaagccaagcaggcaaatggcttgaaccaagaaaacgagagagctttgggagccattcagagacaagtgaaagaaataaattccctgcagagtgatttcaccaagtatctaaccactgcagactcatctttgttgcaaaccaacattgcgctgcagctgatggagaaaagccagaaggaatatgaaaaattagctgccagtttaaatgaagcaagacaagaactaagtgacaaagtaagagaactttccagatctgctggcaaaacatcccttgtggaggaggcagaaaagcacgcgcggtccttacaagagctggcaaagcagctggaagagatcaagagaaacgccagcggggatgagctggtgcgctgtgctgtggatgccgccaccgcctacgagaacatcctcaatgccatcaaagcggccgaggacgcagccaacagggctgccagtgcatctgaatctgccctccagacagtgataaaggaagatctgccaagaaaagctaaaaccctgagttccaacagtgataaactgttaaatgaagccaagatgacacaaaagaagctaaagcaagaagtcagtccagctctcaacaacctacagcaaaccctgaatattgtgacagttcagaaagaagtgatagacaccaatctcacaactctccgagatggtcttcatgggatacagagaggtgatattgatgctatgatcagtagtgcaaagagcatggtcagaaaggccaacgacatcacagatgaggttctggatgggctcaaccccatccagacagatgtggaaagaattaaggacacctatgggaggacacagaacgaagacttcaaaaaggctctgactgatgcagataactcggtgaataagttaaccaacaaactacctgatctttggcgcaagattgaaagtatcaaccaacagctgttgcccttgggaaacatctctgacaacatggacagaatacgagaactaattcagcaggccagagatgctgccagtaaggttgctgtccccatgaggttcaatggtaaatctggagtcgaagtccgactgccaaatgacctggaagatttgaaaggatatacatctctgtccttgtttctccaaaggcccaactcaagagaaaatgggggtactgagaatatgtttgtgatgtaccttggaaataaagatgcctcccgggactacatcggcatggcagttgtggatggccagctcacctgtgtctacaacctgggggaccgtgaggctgaactccaagtggaccagatcttgaccaagagtgagactaaggaggcagttatggatcgggtgaaatttcagagaatttatcagtttgcaaggcttaattacaccaaaggagccacatccagtaaaccagaaacacccggagtctatgacatggatggtagaaatagcaatacactccttaatttggatcctgaaaatgttgtattttatgttggaggttacccacctgattttaaacttcccagtcgactaagtttccctccatacaaaggttgtattgaattagatgacctcaatgaaaatgttctgagcttgtacaacttcaaaaaaacattcaatctcaacacaactgaagtggagccttgtagaaggaggaaggaagagtcagacaaaaattattttgaaggtacgggctatgctcgagttccaactcaaccacatgctcccatcccaacctttggacagacaattcagaccaccgtggatagaggcttgctgttctttgcagaaaacggggatcgcttcatatctctaaatatagaagatggcaagctcatggtgagatacaaactgaattcagagctaccaaaagagagaggagttggagacgccataaacaacggcagagaccattcgattcagatcaaaattggaaaactccaaaagcgtatgtggataaatgtggacgttcaaaacactataattgatggtgaagtatttgatttcagcacatattatctgggaggaattccaattgcaatcagggaaagatttaacatttctacgcctgctttccgaggctgcatgaaaaatttgaagaaaaccagtggtgtcgttagattgaatgatactgtgggagtaaccaaaaagtgctcggaagactggaagcttgtgcgatctgcctcattctccagaggaggacaattgagtttcactgatttgggcttaccacctactgaccacctccaggcctcatttggatttcagacctttcaacccagtggcatattattagatcatcagacatggacaaggaacctgcaggtcactctggaagatggttacattgaattgagcaccagcgatagcggcggcccaatttttaaatctccacagacgtatatggatggtttactgcattatgtatctgtaataagcgacaactctggactacggcttctcatcgatgaccagcttctgagaaatagcaaaaggctaaaacacatttcaagttcccggcagtctctgcgtctgggcgggagcaattttgagggttgtattagcaatgtttttgtccagaggttatcactgagtcctgaagtcctagatttgaccagtaactctctcaagagagatgtgtccctgggaggctgcagtttaaacaaaccaccttttctaatgttgcttaaaggttctaccaggtttaacaagaccaagacttttcgtatcaaccagctgttgcaggacacaccagtggcctccccaaggagcgtgaaggtgtggcaagatgcttgctcaccacttcccaagacccaggccaatcatggagccctccagtttggggacattcccaccagccacttgctattcaagcttcctcaggagctgctgaaacccaggtcacagtttgctgtggacatgcagacaacatcctccagaggactggtgtttcacacgggcactaagaactcctttatggctctttatctttcaaaaggacgtctggtctttgcactggggacagatgggaaaaaattgaggatcaaaagcaaggagaaatgcaatgatgggaaatggcacacggtggtgtttggccatgatggggaaaaggggcgcttggttgtggatggactgagggcccgggagggaagtttgcctggaaactccaccatcagcatcagagcgccagtttacctgggatcacctccatcagggaaaccaaagagcctccccacaaacagctttgtgggatgcctgaagaactttcagctggattcaaaacccttgtataccccttcttcaagcttcggggtgtcttcctgcttgggtggtcctttggagaaaggcatttatttctctgaagaaggaggtcatgtcgtcttggctcactctgtattgttggggccagaatttaagcttgttttcagcatccgcccaagaagtctcactgggatcctaatacacatcggaagtcagcccgggaagcacttatgtgtttacctggaggcaggaaaggtcacggcctctatggacagtggggcaggtgggacctcaacgtcggtcacaccaaagcagtctctgtgtgatggacagtggcactcggtggcagtcaccataaaacaacacatcctgcacctggaactggacacagacagtagctacacagctggacagatccccttcccacctgccagcactcaagagccactacaccttggaggtgctccagccaatttgacgacactgaggatccctgtgtggaaatcattctttggctgtctgaggaatattcatgtcaatcacatccctgtccctgtcactgaagccttggaagtccaggggcctgtcagtctgaatggttgtcctgaccagtaacccaagcctatttcacagcaaggaaattcaccttcaaaagcactgattacccaatgcacctccctccccagctcgagatcattcttcactcaggacacaaaccagacaggtttaatagcgaatctaattttgaattctgaccatggatacccatcactttggcattcagtgctacatgtgtattttatataaaaatcccatttcttgaagataaaaaaattgttattcaaattgttatgcacagaatgtttttggtaatattaatttccactaaaaaattaaatgtctttt

SEQ ID NO: 147403 - DNA, 10661 bp, Homo sapiens
  Payload ID: 9156
  Gene Symbol: LAMA3
  Gene Name: laminin, alpha 3
  Uniprot ID: Q16787
  ENST ID: ENST00000313654
  CDS Start-End: 242-10243
gagcgctgtcagttcctgatccggctggtgcccgctccagccgcggcaggttccagagctgagaggccacccccacgccgcgggcttccagcgcgtggagcaaggggagcggccccggcgccgcccatatccccggctgcgctagtcctggcgctgcaggtccgggaggcgcaggcggagagcggcggtgcccccgagcccctctgcggacggctcaggcgggaggaccccgcgcggctggatggcggcggccgcgcggcctcggggtcgggcactggggccagtactgccgccgacgccgctgctcctgctggtactgcgggtgctgccagcctgcggggcgaccgctcgggatcccggggccgcggccgggctcagccttcacccgacttacttcaacctggccgaggcggcgaggatttgggccaccgccacctgcggggagaggggacccggcgaggggaggccccagcccgagctctactgcaagttggtcgggggccccaccgccccaggcagcggccacaccatccagggccagttctgtgactattgcaattctgaagaccccaggaaagcacatcctgtcaccaatgccatcgatggatctgaacgttggtggcaaagccctcccctgtcctcaggcacacagtacaacagagtcaacctcaccttggatctggggcagctcttccatgtggcctatattttaatcaaatttgcaaattctcctcgccctgatctttgggtcttggaaagatctgtagactttggaagcacctactcaccatggcaatattttgctcattctaaagtagactgtttaaaagaatttgggcgggaggcaaatatggctgtcacccgggatgatgatgtactttgtgttactgaatattcccgtattgtacctttggaaaatggtgaggttgtggtgtccttgataaacggtcgtccaggtgcaaaaaattttactttctctcacaccctgagggagtttaccaaggcaacaaacatccgcttgcgttttcttagaaccaatacgcttcttggacacctcatctccaaagcccagcgagatccaactgtcactcggcggtattattacagcataaaggacatcagcattggtgggcagtgtgtttgcaatggccatgctgaagtgtgcaatataaacaatcctgaaaaactgtttcggtgtgaatgccagcaccacacctgtggggagacgtgtgatcgctgctgcacagggtacaatcagaggcgctggcggcccgccgcttgggagcagagccacgagtgtgaagcatgcaactgccacggccatgccagcaactgttactatgatccagatgttgagcggcagcaggcaagcttgaatacccagggcatctatgctggtggaggggtctgcattaactgtcagcacaacacagctggagtaaactgtgaacagtgtgctaagggctattaccgcccttatggggttccagtggatgcccctgatggctgcatcccctgcagctgtgaccctgagcatgcggatggctgtgaacagggttcaggccgctgtcactgcaagccaaatttccacggagacaactgtgagaagtgtgcaattggatactacaatttcccattttgcttgagaattcccatttttcctgtttctacaccaagttcagaagatccagtagctggagatataaaagggtgtgactgtaatctggaaggtgttctccctgaaatatgtgatgcccacggacggtgcctgtgccgccctggggttgagggccctcgatgtgatacctgccgctctggtttctactcattccctatttgccaagcctgctggtgttcagcccttggatcctaccagatgccctgcagctcagtgactggacagtgtgaatgtcggccaggagttacaggacagcggtgtgacaggtgtctctcaggagcttatgatttcccccactgccaaggttccagcagtgcttgtgacccagctggtaccatcaactccaatttggggtattgccaatgcaagcttcatgttgaaggtcctacttgtagccgctgcaaactgttatattggaatctggacaaagaaaaccccagtggatgttcagaatgcaagtgccataaggcgggaacagtgagtggaactggagagtgtaggcagggagatggtgactgtcactgcaagtcccatgtgggtggcgattcctgcgacacctgtgaagatggatattttgctttggaaaagagcaattactttgggtgtcaagggtgtcagtgtgacattggtggggcattgtcctccatgtgcagtgggccctcgggagtgtgccagtgccgagagcatgtcgtgggaaaggtgtgccagcggcctgaaaacaactactatttcccagatttgcatcatatgaagtatgagattgaagacggcagcacacctaatgggagagaccttcgatttggatttgatccgctggcatttcctgagtttagctggagaggatatgcccaaatgacctcagtacagaatgatgtaagaataacattgaatgtagggaagtcaagtggctccttgtttcgtgttattctgagatacgttaaccctggaactgaagcagtatctggccatataactatttatccatcctggggtgctgctcaaagcaaagagatcatcttcctgccgagtaaggagccagcctttgtcactgtccctggaaatggttttgcagacccattttcaatcacaccaggaatatgggttgcttgtattaaggcagaaggagtccttctggattacctggtgctgctccccagggactactatgaagcctctgtactgcagctgccagtcacagaaccatgtgcctacgcaggacctccccaagaaaattgcttactctaccagcatttgccagtgaccagattcccctgtaccctggcttgtgaggccagacacttcctgcttgatggggagccaagacccgtggcagtgaggcagcccacacctgcacaccctgtcatggtggacctcagcgggagagaggtggaattgcatctgcggctgcgcatcccacaggttggccactacgtggttgtggtcgagtattccacggaggcagctcagctgtttgtggttgatgtgaatgtgaagagctccgggtctgttctggcaggccaggtgaacatttacagctgcaactacagtgttctctgccggagtgctgtgattgatcacatgagccgcatcgccatgtatgagctattggcagatgcagacattcagctcaagggacacatggcccgattccttctgcatcaagtttgtatcatacctattgaagaattctcagctgagtatgtgagaccacaagtccactgcattgccagttatgggcgatttgtcaatcaaagtgccacctgtgtctccttggcccatgaaactcctccaacagcattaattttggatgttctaagtggcaggcctttccctcacctgccccagcagtcgtcaccttctgttgatgttcttcctggggtcaccttgaaggcaccgcagaatcaagtgaccctgagaggacgtgtaccacacctgggccgatacgtctttgtcatccatttttaccaagcagcgcacccgacgtttcccgcgcaggtgtcggtggatggcgggtggccacgggcaggctccttccatgcctctttttgcccccatgtgcttggctgccgggatcaagtgattgccgaaggccagattgagtttgacatctcagagcctgaagtggccgcaactgtgaaggttccagaaggaaagtccttggttttggtccgtgttctagtggtgcctgcagaaaactatgactaccaaatacttcacaaaaaatccatggacaagtcactcgagtttatcaccaattgtggaaaaaacagcttttaccttgacccccagacagcctccagattctgtaagaattccgccaggtccctggtggccttttaccacaagggcgccctgccttgtgagtgccaccccactggggccaccggccctcactgcagccctgagggtgggcagtgcccatgccagcccaacgtcatcgggcggcagtgcacccgctgtgcaacaggccactacggattcccacgctgcaagccgtgcagctgtggtcggcgcctttgtgaagagatgacggggcagtgccgctgccctccccgcacggtcaggccccagtgtgaggtgtgtgagacacactcattcagcttccaccccatggccggctgcgaaggctgcaactgttccaggaggggcaccatcgaggctgccatgccggagtgtgaccgggacagcgggcagtgcagatgcaagcccagaatcacagggcggcagtgtgaccgatgtgcttccgggttttaccgctttcctgagtgtgttccctgcaattgcaacagagatgggactgagccaggagtgtgtgacccagggaccggggcttgcctctgcaaggaaaatgtagaaggcacagagtgtaatgtgtgtcgagaaggctcattccatttggacccagccaatctcaagggttgtaccagctgtttctgttttggagtaaataatcaatgtcacagctcacataagcgaaggactaagtttgtggatatgctgggctggcacctggagacagcagacagagtggacatccctgtctctttcaacccaggcagcaacagtatggtggcggatctccaggagctgcccgcaaccatccacagcgcgtcctgggtcgcacccacctcctacctgggggacaaggtttcttcatatggtggttacctcacttaccaagccaagtcctttggcttgcctggcgacatggttcttctggaaaagaagccggatgtacagctcactggtcagcacatgtccatcatctatgaggagacaaacaccccacggccagaccggctgcatcatggacgagtgcacgtggtcgagggaaacttcagacatgccagcagccgtgccccagtgtctagggaggagctgatgacagtgctgtctagactggcagatgtgcgcatccaaggcctctacttcacagagactcaaaggctcaccctgagcgaggtggggctagaggaagcctctgacacaggaagtgggcgcatagcacttgctgtggaaatctgtgcctgcccccctgcctacgctggtgactcttgtcagggttgtagccctggatactatcgggatcataaaggcttgtataccggacggtgtgttccctgcaattgcaacggacattcaaatcaatgccaggatggctcaggcatatgtgttaactgtcagcacaacaccgcgggagagcactgtgaacgctgccaggagggctactatggcaacgccgtccacggatcctgcagggcctgcccatgtcctcacactaacagctttgccactggctgtgtggtgaatgggggagacgtgcggtgctcctgcaaagctgggtacacaggaacacagtgtgaaaggtgtgcaccgggatatttcgggaatccccagaaattcggaggtagctgccaaccatgcagttgtaacagcaatggccagctgggcagctgtcatcccctgactggagactgcataaaccaagaacccaaagatagcagccctgcagaagaatgtgatgattgcgacagctgtgtgatgaccctcctgaacgacctggccaccatgggcgagcagctccgcctggtcaagtctcagctgcagggcctgagtgccagcgcagggcttctggagcagatgaggcacatggagacccaggccaaggacctgaggaatcagttgctcaactaccgttctgccatttcaaatcatggatcaaaaatagaaggcctggaaagagaactgactgatttgaatcaagaatttgagactttgcaagaaaaggctcaagtaaattccagaaaagcacaaacattaaacaacaatgttaatcgggcaacacaaagcgcaaaagaactggatgtgaagattaaaaatgtcatccggaatgtgcacattcttttaaagcagatctctgggacagatggagagggaaacaacgtgccttcaggtgacttttccagagagtgggctgaagcccagcgcatgatgagggaactgcggaacaggaactttggaaagcacctcagagaagcagaagctgataaaagggagtcgcagctcttgctgaaccggataaggacctggcagaaaacccaccagggggagaacaatgggcttgctaacagtatccgggattctttaaatgaatacgaagccaaactcagtgaccttcgtgctcggctgcaggaggcagctgcccaagccaagcaggcaaatggcttgaaccaagaaaacgagagagctttgggagccattcagagacaagtgaaagaaataaattccctgcagagtgatttcaccaagtatctaaccactgcagactcatctttgttgcaaaccaacattgcgctgcagctgatggagaaaagccagaaggaatatgaaaaattagctgccagtttaaatgaagcaagacaagaactaagtgacaaagtaagagaactttccagatctgctggcaaaacatcccttgtggaggaggcagaaaagcacgcgcggtccttacaagagctggcaaagcagctggaagagatcaagagaaacgccagcggggatgagctggtgcgctgtgctgtggatgccgccaccgcctacgagaacatcctcaatgccatcaaagcggccgaggacgcagccaacagggctgccagtgcatctgaatctgccctccagacagtgataaaggaagatctgccaagaaaagctaaaaccctgagttccaacagtgataaactgttaaatgaagccaagatgacacaaaagaagctaaagcaagaagtcagtccagctctcaacaacctacagcaaaccctgaatattgtgacagttcagaaagaagtgatagacaccaatctcacaactctccgagatggtcttcatgggatacagagaggtgatattgatgctatgatcagtagtgcaaagagcatggtcagaaaggccaacgacatcacagatgaggttctggatgggctcaaccccatccagacagatgtggaaagaattaaggacacctatgggaggacacagaacgaagacttcaaaaaggctctgactgatgcagataactcggtgaataagttaaccaacaaactacctgatctttggcgcaagattgaaagtatcaaccaacagctgttgcccttgggaaacatctctgacaacatggacagaatacgagaactaattcagcaggccagagatgctgccagtaaggttgctgtccccatgaggttcaatggtaaatctggagtcgaagtccgactgccaaatgacctggaagatttgaaaggatatacatctctgtccttgtttctccaaaggcccaactcaagagaaaatgggggtactgagaatatgtttgtgatgtaccttggaaataaagatgcctcccgggactacatcggcatggcagttgtggatggccagctcacctgtgtctacaacctgggggaccgtgaggctgaactccaagtggaccagatcttgaccaagagtgagactaaggaggcagttatggatcgggtgaaatttcagagaatttatcagtttgcaaggcttaattacaccaaaggagccacatccagtaaaccagaaacacccggagtctatgacatggatggtagaaatagcaatacactccttaatttggatcctgaaaatgttgtattttatgttggaggttacccacctgattttaaacttcccagtcgactaagtttccctccatacaaaggttgtattgaattagatgacctcaatgaaaatgttctgagcttgtacaacttcaaaaaaacattcaatctcaacacaactgaagtggagccttgtagaaggaggaaggaagagtcagacaaaaattattttgaaggtacgggctatgctcgagttccaactcaaccacatgctcccatcccaacctttggacagacaattcagaccaccgtggatagaggcttgctgttctttgcagaaaacggggatcgcttcatatctctaaatatagaagatggcaagctcatggtgagatacaaactgaattcagagctaccaaaagagagaggagttggagacgccataaacaacggcagagaccattcgattcagatcaaaattggaaaactccaaaagcgtatgtggataaatgtggacgttcaaaacactataattgatggtgaagtatttgatttcagcacatattatctgggaggaattccaattgcaatcagggaaagatttaacatttctacgcctgctttccgaggctgcatgaaaaatttgaagaaaaccagtggtgtcgttagattgaatgatactgtgggagtaaccaaaaagtgctcggaagactggaagcttgtgcgatctgcctcattctccagaggaggacaattgagtttcactgatttgggcttaccacctactgaccacctccaggcctcatttggatttcagacctttcaacccagtggcatattattagatcatcagacatggacaaggaacctgcaggtcactctggaagatggttacattgaattgagcaccagcgatagcggcggcccaatttttaaatctccacagacgtatatggatggtttactgcattatgtatctgtaataagcgacaactctggactacggcttctcatcgatgaccagcttctgagaaatagcaaaaggctaaaacacatttcaagttcccggcagtctctgcgtctgggcgggagcaattttgagggttgtattagcaatgtttttgtccagaggttatcactgagtcctgaagtcctagatttgaccagtaactctctcaagagagatgtgtccctgggaggctgcagtttaaacaaaccaccttttctaatgttgcttaaaggttctaccaggtttaacaagaccaagacttttcgtatcaaccagctgttgcaggacacaccagtggcctccccaaggagcgtgaaggtgtggcaagatgcttgctcaccacttcccaagacccaggccaatcatggagccctccagtttggggacattcccaccagccacttgctattcaagcttcctcaggagctgctgaaacccaggtcacagtttgctgtggacatgcagacaacatcctccagaggactggtgtttcacacgggcactaagaactcctttatggctctttatctttcaaaaggacgtctggtctttgcactggggacagatgggaaaaaattgaggatcaaaagcaaggagaaatgcaatgatgggaaatggcacacggtggtgtttggccatgatggggaaaaggggcgcttggttgtggatggactgagggcccgggagggaagtttgcctggaaactccaccatcagcatcagagcgccagtttacctgggatcacctccatcagggaaaccaaagagcctccccacaaacagctttgtgggatgcctgaagaactttcagctggattcaaaacccttgtataccccttcttcaagcttcggggtgtcttcctgcttgggtggtcctttggagaaaggcatttatttctctgaagaaggaggtcatgtcgtcttggctcactctgtattgttggggccagaatttaagcttgttttcagcatccgcccaagaagtctcactgggatcctaatacacatcggaagtcagcccgggaagcacttatgtgtttacctggaggcaggaaaggtcacggcctctatggacagtggggcaggtgggacctcaacgtcggtcacaccaaagcagtctctgtgtgatggacagtggcactcggtggcagtcaccataaaacaacacatcctgcacctggaactggacacagacagtagctacacagctggacagatccccttcccacctgccagcactcaagagccactacaccttggaggtgctccagccaatttgacgacactgaggatccctgtgtggaaatcattctttggctgtctgaggaatattcatgtcaatcacatccctgtccctgtcactgaagccttggaagtccaggggcctgtcagtctgaatggttgtcctgaccagtaacccaagcctatttcacagcaaggaaattcaccttcaaaagcactgattacccaatgcacctccctccccagctcgagatcattcttcactcaggacacaaaccagacaggtttaatagcgaatctaattttgaattctgaccatggatacccatcactttggcattcagtgctacatgtgtattttatataaaaatcccatttcttgaagataaaaaaattgttattcaaattgttatgcacagaatgtttttggtaatattaatttccactaaaaaattaaatgtcttttaagaaacattcttttccacttgttaaaaaaattaaatatattttaaagcactttaagaatatgaaactttcatatatgttaaaggattataatttatggaattaaaaaatgcagtgtagtccttaaa

SEQ ID NO: 147404 - DNA, 9834 bp, Homo sapiens
  Payload ID: 9156
  Gene Symbol: LAMA3
  Gene Name: laminin, alpha 3
  ENST ID: ENST00000399516
  CDS Start-End: 1-9834
atggcggcggccgcgcggcctcggggtcgggcactggggccagtactgccgccgacgccgctgctcctgctggtactgcgggtgctgccagcctgcggggcgaccgctcgggatcccggggccgcggccgggctcagccttcacccgacttacttcaacctggccgaggcggcgaggatttgggccaccgccacctgcggggagaggggacccggcgaggggaggccccagcccgagctctactgcaagttggtcgggggccccaccgccccaggcagcggccacaccatccagggccagttctgtgactattgcaattctgaagaccccaggaaagcacatcctgtcaccaatgccatcgatggatctgaacgttggtggcaaagccctcccctgtcctcaggcacacagtacaacagagtcaacctcaccttggatctggggcagctcttccatgtggcctatattttaatcaaatttgcaaattctcctcgccctgatctttgggtcttggaaagatctgtagactttggaagcacctactcaccatggcaatattttgctcattctaaagtagactgtttaaaagaatttgggcgggaggcaaatatggctgtcacccgggatgatgatgtactttgtgttactgaatattcccgtattgtacctttggaaaatggtgaggttgtggtgtccttgataaacggtcgtccaggtgcaaaaaattttactttctctcacaccctgagggagtttaccaaggcaacaaacatccgcttgcgttttcttagaaccaatacgcttcttggacacctcatctccaaagcccagcgagatccaactgtcactcggcggtattattacagcataaaggacatcagcattggtgggcagtgtgtttgcaatggccatgctgaagtgtgcaatataaacaatcctgaaaaactgtttcggtgtgaatgccagcaccacacctgtggggagacgtgtgatcgctgctgcacagggtacaatcagaggcgctggcggcccgccgcttgggagcagagccacgagtgtgaagcatgcaactgccacggccatgccagcaactgttactatgatccagatgttgagcggcagcaggcaagcttgaatacccagggcatctatgctggtggaggggtctgcattaactgtcagcacaacacagctggagtaaactgtgaacagtgtgctaagggctattaccgcccttatggggttccagtggatgcccctgatggctgcatcccctgcagctgtgaccctgagcatgcggatggctgtgaacagggttcaggccgctgtcactgcaagccaaatttccacggagacaactgtgagaagtgtgcaattggatactacaatttcccattttgcttgagaattcccatttttcctgtttctacaccaagttcagaagatccagtagctggagatataaaagggtgtgactgtaatctggaaggtgttctccctgaaatatgtgatgcccacggacggtgcctgtgccgccctggggttgagggccctcgatgtgatacctgccgctctggtttctactcattccctatttgccaagcctgctggtgttcagcccttggatcctaccagatgccctgcagctcagtgactggacagtgtgaatgtcggccaggagttacaggacagcggtgtgacaggtgtctctcaggagcttatgatttcccccactgccaaggttccagcagtgcttgtgacccagctggtaccatcaactccaatttggggtattgccaatgcaagcttcatgttgaaggtcctacttgtagccgctgcaaactgttatattggaatctggacaaagaaaaccccagtggatgttcagaatgcaagtgccataaggcgggaacagtgagtggaactggagagtgtaggcagggagatggtgactgtcactgcaagtcccatgtgggtggcgattcctgcgacacctgtgaagatggatattttgctttggaaaagagcaattactttgggtgtcaagggtgtcagtgtgacattggtggggcattgtcctccatgtgcagtgggccctcgggagtgtgccagtgccgagagcatgtcgtgggaaaggtgtgccagcggcctgaaaacaactactatttcccagatttgcatcatatgaagtatgagattgaagacggcagcacacctaatgggagagaccttcgatttggatttgatccgctggcatttcctgagtttagctggagaggatatgcccaaatgacctcagtacagaatgatgtaagaataacattgaatgtagggaagtcaagtggctccttgtttcgtgttattctgagatacgttaaccctggaactgaagcagtatctggccatataactatttatccatcctggggtgctgctcaaagcaaagagatcatcttcctgccgagtaaggagccagcctttgtcactgtccctggaaatggttttgcagacccattttcaatcacaccaggaatatgggttgcttgtattaaggcagaaggagtccttctggattacctggtgctgctccccagggactactatgaagcctctgtactgcagctgccagtcacagaaccatgtgcctacgcaggacctccccaagaaaattgcttactctaccagcatttgccagtgaccagattcccctgtaccctggcttgtgaggccagacacttcctgcttgatggggagccaagacccgtggcagtgaggcagcccacacctgcacaccctgtcatggtggacctcagcgggagagaggtggaattgcatctgcggctgcgcatcccacaggttggccactacgtggttgtggtcgagtattccacggaggcagctcagctgtttgtggttgatgtgaatgtgaagagctccgggtctgttctggcaggccaggtgaacatttacagctgcaactacagtgttctctgccggagtgctgtgattgatcacatgagccgcatcgccatgtatgagctattggcagatgcagacattcagctcaagggacacatggcccgattccttctgcatcaagtttgtatcatacctattgaagaattctcagctgagtatgtgagaccacaagtccactgcattgccagttatgggcgatttgtcaatcaaagtgccacctgtgtctccttggcccatgaaactcctccaacagcattaattttggatgttctaagtggcaggcctttccctcacctgccccagcagtcgtcaccttctgttgatgttcttcctggggtcaccttgaaggcaccgcagaatcaagtgaccctgagaggacgtgtaccacacctgggccgatacgtctttgtcatccatttttaccaagcagcgcacccgacgtttcccgcgcaggtgtcggtggatggcgggtggccacgggcaggctccttccatgcctctttttgcccccatgtgcttggctgccgggatcaagtgattgccgaaggccagattgagtttgacatctcagagcctgaagtggccgcaactgtgaaggttccagaaggaaagtccttggttttggtccgtgttctagtggtgcctgcagaaaactatgactaccaaatacttcacaaaaaatccatggacaagtcactcgagtttatcaccaattgtggaaaaaacagcttttaccttgacccccagacagcctccagattctgtaagaattccgccaggtccctggtggccttttaccacaagggcgccctgccttgtgagtgccaccccactggggccaccggccctcactgcagccctgagggtgggcagtgcccatgccagcccaacgtcatcgggcggcagtgcacccgctgtgcaacaggccactacggattcccacgctgcaagccgtgcagctgtggtcggcgcctttgtgaagagatgacggggcagtgccgctgccctccccgcacggtcaggccccagtgtgaggtgtgtgagacacactcattcagcttccaccccatggccggctgcgaaggctgcaactgttccaggaggggcaccatcgaggctgccatgccggagtgtgaccgggacagcgggcagtgcagatgcaagcccagaatcacagggcggcagtgtgaccgatgtgcttccgggttttaccgctttcctgagtgtgttccctgcaattgcaacagagatgggactgagccaggagtgtgtgacccagggaccggggcttgcctctgcaaggaaaatgtagaaggcacagagtgtaatgtgtgtcgagaaggctcattccatttggacccagccaatctcaagggttgtaccagctgtttctgttttggagtaaataatcaatgtcacagctcacataagcgaaggactaagtttgtggatatgctgggctggcacctggagacagcagacagagtggacatccctgtctctttcaacccaggcagcaacagtatggtggcggatctccaggagctgcccgcaaccatccacagcgcgtcctgggtcgcacccacctcctacctgggggacaaggtttcttcatatggtggttacctcacttaccaagccaagtcctttggcttgcctggcgacatggttcttctggaaaagaagccggatgtacagctcactggtcagcacatgtccatcatctatgaggagacaaacaccccacggccagaccggctgcatcatggacgagtgcacgtggtcgagggaaacttcagacatgccagcagccgtgccccagtgtctagggaggagctgatgacagtgctgtctagactggcagatgtgcgcatccaaggcctctacttcacagagactcaaaggctcaccctgagcgaggtggggctagaggaagcctctgacacaggaagtgggcgcatagcacttgctgtggaaatctgtgcctgcccccctgcctacgctggtgactcttgtcagggttgtagccctggatactatcgggatcataaaggcttgtataccggacggtgtgttccctgcaattgcaacggacattcaaatcaatgccaggatggctcaggcatatgtgttaactgtcagcacaacaccgcgggagagcactgtgaacgctgccaggagggctactatggcaacgccgtccacggatcctgcagggcctgcccatgtcctcacactaacagctttgccactggctgtgtggtgaatgggggagacgtgcggtgctcctgcaaagctgggtacacaggaacacagtgtgaaaggtgtgcaccgggatatttcgggaatccccagaaattcggaggtagctgccaaccatgcagttgtaacagcaatggccagctgggcagctgtcatcccctgactggagactgcataaaccaagaacccaaagatagcagccctgcagaagaatgtgatgattgcgacagctgtgtgatgaccctcctgaacgacctggccaccatgggcgagcagctccgcctggtcaagtctcagctgcagggcctgagtgccagcgcagggcttctggagcagatgaggcacatggagacccaggccaaggacctgaggaatcagttgctcaactaccgttctgccatttcaaatcatggatcaaaaatagaaggcctggaaagagaactgactgatttgaatcaagaatttgagactttgcaagaaaaggctcaagtaaattccagaaaagcacaaacattaaacaacaatgttaatcgggcaacacaaagcgcaaaagaactggatgtgaagattaaaaatgtcatccggaatgtgcacatgctgaaccggataaggacctggcagaaaacccaccagggggagaacaatgggcttgctaacagtatccgggattctttaaatgaatacgaagccaaactcagtgaccttcgtgctcggctgcaggaggcagctgcccaagccaagcaggcaaatggcttgaaccaagaaaacgagagagctttgggagccattcagagacaagtgaaagaaataaattccctgcagagtgatttcaccaagtatctaaccactgcagactcatctttgttgcaaaccaacattgcgctgcagctgatggagaaaagccagaaggaatatgaaaaattagctgccagtttaaatgaagcaagacaagaactaagtgacaaagtaagagaactttccagatctgctggcaaaacatcccttgtggaggaggcagaaaagcacgcgcggtccttacaagagctggcaaagcagctggaagagatcaagagaaacgccagcggggatgagctggtgcgctgtgctgtggatgccgccaccgcctacgagaacatcctcaatgccatcaaagcggccgaggacgcagccaacagggctgccagtgcatctgaatctgccctccagacagtgataaaggaagatctgccaagaaaagctaaaaccctgagttccaacagtgataaactgttaaatgaagccaagatgacacaaaagaagctaaagcaagaagtcagtccagctctcaacaacctacagcaaaccctgaatattgtgacagttcagaaagaagtgatagacaccaatctcacaactctccgagatggtcttcatgggatacagagaggtgatattgatgctatgatcagtagtgcaaagagcatggtcagaaaggccaacgacatcacagatgaggttctggatgggctcaaccccatccagacagatgtggaaagaattaaggacacctatgggaggacacagaacgaagacttcaaaaaggctctgactgatgcagataactcggtgaataagttaaccaacaaactacctgatctttggcgcaagattgaaagtatcaaccaacagctgttgcccttgggaaacatctctgacaacatggacagaatacgagaactaattcagcaggccagagatgctgccagtaaggttgctgtccccatgaggttcaatggtaaatctggagtcgaagtccgactgccaaatgacctggaagatttgaaaggatatacatctctgtccttgtttctccaaaggcccaactcaagagaaaatgggggtactgagaatatgtttgtgatgtaccttggaaataaagatgcctcccgggactacatcggcatggcagttgtggatggccagctcacctgtgtctacaacctgggggaccgtgaggctgaactccaagtggaccagatcttgaccaagagtgagactaaggaggcagttatggatcgggtgaaatttcagagaatttatcagtttgcaaggcttaattacaccaaaggagccacatccagtaaaccagaaacacccggagtctatgacatggatggtagaaatagcaatacactccttaatttggatcctgaaaatgttgtattttatgttggaggttacccacctgattttaaacttcccagtcgactaagtttccctccatacaaaggttgtattgaattagatgacctcaatgaaaatgttctgagcttgtacaacttcaaaaaaacattcaatctcaacacaactgaagtggagccttgtagaaggaggaaggaagagtcagacaaaaattattttgaaggtacgggctatgctcgagttccaactcaaccacatgctcccatcccaacctttggacagacaattcagaccaccgtggatagaggcttgctgttctttgcagaaaacggggatcgcttcatatctctaaatatagaagatggcaagctcatggtgagatacaaactgaattcagagctaccaaaagagagaggagttggagacgccataaacaacggcagagaccattcgattcagatcaaaattggaaaactccaaaagcgtatgtggataaatgtggacgttcaaaacactataattgatggtgaagtatttgatttcagcacatattatctgggaggaattccaattgcaatcagggaaagatttaacatttctacgcctgctttccgaggctgcatgaaaaatttgaagaaaaccagtggtgtcgttagattgaatgatactgtgggagtaaccaaaaagtgctcggaagactggaagcttgtgcgatctgcctcattctccagaggaggacaattgagtttcactgatttgggcttaccacctactgaccacctccaggcctcatttggatttcagacctttcaacccagtggcatattattagatcatcagacatggacaaggaacctgcaggtcactctggaagatggttacattgaattgagcaccagcgatagcggcggcccaatttttaaatctccacagacgtatatggatggtttactgcattatgtatctgtaataagcgacaactctggactacggcttctcatcgatgaccagcttctgagaaatagcaaaaggctaaaacacatttcaagttcccggcagtctctgcgtctgggcgggagcaattttgagggttgtattagcaatgtttttgtccagaggttatcactgagtcctgaagtcctagatttgaccagtaactctctcaagagagatgtgtccctgggaggctgcagtttaaacaaaccaccttttctaatgttgcttaaaggttctaccaggtttaacaagaccaagacttttcgtatcaaccagctgttgcaggacacaccagtggcctccccaaggagcgtgaaggtgtggcaagatgcttgctcaccacttcccaagacccaggccaatcatggagccctccagtttggggacattcccaccagccacttgctattcaagcttcctcaggagctgctgaaacccaggtcacagtttgctgtggacatgcagacaacatcctccagaggactggtgtttcacacgggcactaagaactcctttatggctctttatctttcaaaaggacgtctggtctttgcactggggacagatgggaaaaaattgaggatcaaaagcaaggagaaatgcaatgatgggaaatggcacacggtggtgtttggccatgatggggaaaaggggcgcttggttgtggatggactgagggcccgggagggaagtttgcctggaaactccaccatcagcatcagagcgccagtttacctgggatcacctccatcagggaaaccaaagagcctccccacaaacagctttgtgggatgcctgaagaactttcagctggattcaaaacccttgtataccccttcttcaagcttcggggtgtcttcctgcttgggtggtcctttggagaaaggcatttatttctctgaagaaggaggtcatgtcgtcttggctcactctgtattgttggggccagaatttaagcttgttttcagcatccgcccaagaagtctcactgggatcctaatacacatcggaagtcagcccgggaagcacttatgtgtttacctggaggcaggaaaggtcacggcctctatggacagtggggcaggtgggacctcaacgtcggtcacaccaaagcagtctctgtgtgatggacagtggcactcggtggcagtcaccataaaacaacacatcctgcacctggaactggacacagacagtagctacacagctggacagatccccttcccacctgccagcactcaagagccactacaccttggaggtgctccagccaatttgacgacactgaggatccctgtgtggaaatcattctttggctgtctgaggaatattcatgtcaatcacatccctgtccctgtcactgaagccttggaagtccaggggcctgtcagtctgaatggttgtcctgaccagtaa

SEQ ID NO: 147405 - DNA, 3494 bp, Homo sapiens
  Payload ID: 9156
  Gene Symbol: LAMA3
  Gene Name: laminin, alpha 3
  ENST ID: ENST00000586751
  CDS Start-End: 1-3442
ctttgccactggctgtgtggtgaatgggggagacgtgcggtgctcctgcaaagctgggtacacaggaacacagtgtgaaaggtgtgcaccgggatatttcgggaatccccagaaattcggaggtagctgccaaccatgcagttgtaacagcaatggccagctgggcagctgtcatcccctgactggagactgcataaaccaagaacccaaagatagcagccctgcagaagaatgtgatgattgcgacagctgtgtgatgaccctcctgaacgacctggccaccatgggcgagcagctccgcctggtcaagtctcagctgcagggcctgagtgccagcgcagggcttctggagcagatgaggcacatggagacccaggccaaggacctgaggaatcagttgctcaactaccgttctgccatttcaaatcatggatcaaaaatagaaggcctggaaagagaactgactgatttgaatcaagaatttgagactttgcaagaaaaggctcaagtaaattccagaaaagcacaaacattaaacaacaatgttaatcgggcaacacaaagcgcaaaagaactggatgtgaagattaaaaatgtcatccggaatgtgcacattcttttaaagcagatctctgggacagatggagagggaaacaacgtgccttcaggtgacttttccagagagtgggctgaagcccagcgcatgatgagggaactgcggaacaggaactttggaaagcacctcagagaagcagaagctgataaaagggagtcgcagctcttgctgaaccggataaggacctggcagaaaacccaccagggggagaacaatgggcttgctaacagtatccgggattctttaaatgaatacgaagccaaactcagtgaccttcgtgctcggctgcaggaggcagctgcccaagccaagcaggcaaatggcttgaaccaagaaaacgagagagctttgggagccattcagagacaagtgaaagaaataaattccctgcagagtgatttcaccaagtatctaaccactgcagactcatctttgttgcaaaccaacattgcgctgcagctgatggagaaaagccagaaggaatatgaaaaattagctgccagtttaaatgaagcaagacaagaactaagtgacaaagtaagagaactttccagatctgctggcaaaacatcccttgtggaggaggcagaaaagcacgcgcggtccttacaagagctggcaaagcagctggaagagatcaagagaaacgccagcggggatgagctggtgcgctgtgctgtggatgccgccaccgcctacgagaacatcctcaatgccatcaaagcggccgaggacgcagccaacagggctgccagtgcatctgaatctgccctccagacagtgataaaggaagatctgccaagaaaagctaaaaccctgagttccaacagtgataaactgttaaatgaagccaagatgacacaaaagaagctaaagcaagaagtcagtccagctctcaacaacctacagcaaaccctgaatattgtgacagttcagaaagaagtgatagacaccaatctcacaactctccgagatggtcttcatgggatacagagaggtgatattgatgctatgatcagtagtgcaaagagcatggtcagaaaggccaacgacatcacagatgaggttctggatgggctcaaccccatccagacagatgtggaaagaattaaggacacctatgggaggacacagaacgaagacttcaaaaaggctctgactgatgcagataactcggtgaataagttaaccaacaaactacctgatctttggcgcaagattgaaagtatcaaccaacagctgttgcccttgggaaacatctctgacaacatggacagaatacgagaactaattcagcaggccagagatgctgccagtaaggttgctgtccccatgaggttcaatggtaaatctggagtcgaagtccgactgccaaatgacctggaagatttgaaaggatatacatctctgtccttgtttctccaaaggcccaactcaagagaaaatgggggtactgagaatatgtttgtgatgtaccttggaaataaagatgcctcccgggactacatcggcatggcagttgtggatggccagctcacctgtgtctacaacctgggggaccgtgaggctgaactccaagtggaccagatcttgaccaagagtgagactaaggaggcagttatggatcgggtgaaatttcagagaatttatcagtttgcaaggcttaattacaccaaaggagccacatccagtaaaccagaaacacccggagtctatgacatggatggtagaaatagcaatacactccttaatttggatcctgaaaatgttgtattttatgttggaggttacccacctgattttaaacttcccagtcgactaagtttccctccatacaaaggttgtattgaattagatgacctcaatgaaaatgttctgagcttgtacaacttcaaaaaaacattcaatctcaacacaactgaagtggagccttgtagaaggaggaaggaagagtcagacaaaaattattttgaaggtacgggctatgctcgagttccaactcaaccacatgctcccatcccaacctttggacagacaattcagaccaccgtggatagaggcttgctgttctttgcagaaaacggggatcgcttcatatctctaaatatagaagatggcaagctcatggtgagatacaaactgaattcagagctaccaaaagagagaggagttggagacgccataaacaacggcagagaccattcgattcagatcaaaattggaaaactccaaaagcgtatgtggataaatgtggacgttcaaaacactataattgatggtgaagtatttgatttcagcacatattatctgggaggaattccaattgcaatcagggaaagatttaacatttctacgcctgctttccgaggctgcatgaaaaatttgaagaaaaccagtggtgtcgttagattgaatgatactgtgggagtaaccaaaaagtgctcggaagactggaagcttgtgcgatctgcctcattctccagaggaggacaattgagtttcactgatttgggcttaccacctactgaccacctccaggcctcatttggatttcagacctttcaacccagtggcatattattagatcatcagacatggacaaggaacctgcaggtcactctggaagatggttacattgaattgagcaccagcgatagcggcggcccaatttttaaatctccacagacgtatatggatggtttactgcattatgtatctgtaataagcgacaactctgggctgaggcaagagggttgcttgaggccaagagttcgagaccagtcttggaaacacagtgaaaccatgtctctacgaaaactaaaataaaataaaatgtaaataaataaaattttaaaaataaatcagttggatggataaa

SEQ ID NO: 147406 - DNA, 5007 bp, Homo sapiens
  Payload ID: 9156
  Gene Symbol: LAMA3
  Gene Name: laminin, alpha 3
  ENST ID: ENST00000587184
  CDS Start-End: 1-5007
atgcctccagcagtgaggcggtcagcctgcagcatgggatggctgtggatctttggggcagccctggggcagtgtctgggctacagttcacagcagcaaagggtgccatttcttcagcctcccggtcaaagtcaactgcaagcgagttatgtggagtttagacccagccagggttgtagccctggatactatcgggatcataaaggcttgtataccggacggtgtgttccctgcaattgcaacggacattcaaatcaatgccaggatggctcaggcatatgtgttaactgtcagcacaacaccgcgggagagcactgtgaacgctgccaggagggctactatggcaacgccgtccacggatcctgcagggcctgcccatgtcctcacactaacagctttgccactggctgtgtggtgaatgggggagacgtgcggtgctcctgcaaagctgggtacacaggaacacagtgtgaaaggtgtgcaccgggatatttcgggaatccccagaaattcggaggtagctgccaaccatgcagttgtaacagcaatggccagctgggcagctgtcatcccctgactggagactgcataaaccaagaacccaaagatagcagccctgcagaagaatgtgatgattgcgacagctgtgtgatgaccctcctgaacgacctggccaccatgggcgagcagctccgcctggtcaagtctcagctgcagggcctgagtgccagcgcagggcttctggagcagatgaggcacatggagacccaggccaaggacctgaggaatcagttgctcaactaccgttctgccatttcaaatcatggatcaaaaatagaaggcctggaaagagaactgactgatttgaatcaagaatttgagactttgcaagaaaaggctcaagtaaattccagaaaagcacaaacattaaacaacaatgttaatcgggcaacacaaagcgcaaaagaactggatgtgaagattaaaaatgtcatccggaatgtgcacatgctgaaccggataaggacctggcagaaaacccaccagggggagaacaatgggcttgctaacagtatccgggattctttaaatgaatacgaagccaaactcagtgaccttcgtgctcggctgcaggaggcagctgcccaagccaagcaggcaaatggcttgaaccaagaaaacgagagagctttgggagccattcagagacaagtgaaagaaataaattccctgcagagtgatttcaccaagtatctaaccactgcagactcatctttgttgcaaaccaacattgcgctgcagctgatggagaaaagccagaaggaatatgaaaaattagctgccagtttaaatgaagcaagacaagaactaagtgacaaagtaagagaactttccagatctgctggcaaaacatcccttgtggaggaggcagaaaagcacgcgcggtccttacaagagctggcaaagcagctggaagagatcaagagaaacgccagcggggatgagctggtgcgctgtgctgtggatgccgccaccgcctacgagaacatcctcaatgccatcaaagcggccgaggacgcagccaacagggctgccagtgcatctgaatctgccctccagacagtgataaaggaagatctgccaagaaaagctaaaaccctgagttccaacagtgataaactgttaaatgaagccaagatgacacaaaagaagctaaagcaagaagtcagtccagctctcaacaacctacagcaaaccctgaatattgtgacagttcagaaagaagtgatagacaccaatctcacaactctccgagatggtcttcatgggatacagagaggtgatattgatgctatgatcagtagtgcaaagagcatggtcagaaaggccaacgacatcacagatgaggttctggatgggctcaaccccatccagacagatgtggaaagaattaaggacacctatgggaggacacagaacgaagacttcaaaaaggctctgactgatgcagataactcggtgaataagttaaccaacaaactacctgatctttggcgcaagattgaaagtatcaaccaacagctgttgcccttgggaaacatctctgacaacatggacagaatacgagaactaattcagcaggccagagatgctgccagtaaggttgctgtccccatgaggttcaatggtaaatctggagtcgaagtccgactgccaaatgacctggaagatttgaaaggatatacatctctgtccttgtttctccaaaggcccaactcaagagaaaatgggggtactgagaatatgtttgtgatgtaccttggaaataaagatgcctcccgggactacatcggcatggcagttgtggatggccagctcacctgtgtctacaacctgggggaccgtgaggctgaactccaagtggaccagatcttgaccaagagtgagactaaggaggcagttatggatcgggtgaaatttcagagaatttatcagtttgcaaggcttaattacaccaaaggagccacatccagtaaaccagaaacacccggagtctatgacatggatggtagaaatagcaatacactccttaatttggatcctgaaaatgttgtattttatgttggaggttacccacctgattttaaacttcccagtcgactaagtttccctccatacaaaggttgtattgaattagatgacctcaatgaaaatgttctgagcttgtacaacttcaaaaaaacattcaatctcaacacaactgaagtggagccttgtagaaggaggaaggaagagtcagacaaaaattattttgaaggtacgggctatgctcgagttccaactcaaccacatgctcccatcccaacctttggacagacaattcagaccaccgtggatagaggcttgctgttctttgcagaaaacggggatcgcttcatatctctaaatatagaagatggcaagctcatggtgagatacaaactgaattcagagctaccaaaagagagaggagttggagacgccataaacaacggcagagaccattcgattcagatcaaaattggaaaactccaaaagcgtatgtggataaatgtggacgttcaaaacactataattgatggtgaagtatttgatttcagcacatattatctgggaggaattccaattgcaatcagggaaagatttaacatttctacgcctgctttccgaggctgcatgaaaaatttgaagaaaaccagtggtgtcgttagattgaatgatactgtgggagtaaccaaaaagtgctcggaagactggaagcttgtgcgatctgcctcattctccagaggaggacaattgagtttcactgatttgggcttaccacctactgaccacctccaggcctcatttggatttcagacctttcaacccagtggcatattattagatcatcagacatggacaaggaacctgcaggtcactctggaagatggttacattgaattgagcaccagcgatagcggcggcccaatttttaaatctccacagacgtatatggatggtttactgcattatgtatctgtaataagcgacaactctggactacggcttctcatcgatgaccagcttctgagaaatagcaaaaggctaaaacacatttcaagttcccggcagtctctgcgtctgggcgggagcaattttgagggttgtattagcaatgtttttgtccagaggttatcactgagtcctgaagtcctagatttgaccagtaactctctcaagagagatgtgtccctgggaggctgcagtttaaacaaaccaccttttctaatgttgcttaaaggttctaccaggtttaacaagaccaagacttttcgtatcaaccagctgttgcaggacacaccagtggcctccccaaggagcgtgaaggtgtggcaagatgcttgctcaccacttcccaagacccaggccaatcatggagccctccagtttggggacattcccaccagccacttgctattcaagcttcctcaggagctgctgaaacccaggtcacagtttgctgtggacatgcagacaacatcctccagaggactggtgtttcacacgggcactaagaactcctttatggctctttatctttcaaaaggacgtctggtctttgcactggggacagatgggaaaaaattgaggatcaaaagcaaggagaaatgcaatgatgggaaatggcacacggtggtgtttggccatgatggggaaaaggggcgcttggttgtggatggactgagggcccgggagggaagtttgcctggaaactccaccatcagcatcagagcgccagtttacctgggatcacctccatcagggaaaccaaagagcctccccacaaacagctttgtgggatgcctgaagaactttcagctggattcaaaacccttgtataccccttcttcaagcttcggggtgtcttcctgcttgggtggtcctttggagaaaggcatttatttctctgaagaaggaggtcatgtcgtcttggctcactctgtattgttggggccagaatttaagcttgttttcagcatccgcccaagaagtctcactgggatcctaatacacatcggaagtcagcccgggaagcacttatgtgtttacctggaggcaggaaaggtcacggcctctatggacagtggggcaggtgggacctcaacgtcggtcacaccaaagcagtctctgtgtgatggacagtggcactcggtggcagtcaccataaaacaacacatcctgcacctggaactggacacagacagtagctacacagctggacagatccccttcccacctgccagcactcaagagccactacaccttggaggtgctccagccaatttgacgacactgaggatccctgtgtggaaatcattctttggctgtctgaggaatattcatgtcaatcacatccctgtccctgtcactgaagccttggaagtccaggggcctgtcagtctgaatggttgtcctgaccagtaa

SEQ ID NO: 147407 - DNA, 462 bp, Homo sapiens
  Payload ID: 9156
  Gene Symbol: LAMA3
  Gene Name: laminin, alpha 3
  ENST ID: ENST00000590104
  CDS Start-End: 1-112
tggatggactgagggcccgggagggaagtttgcctggaaactccaccatcagcatcagagcgccagtttacctgggatcacctccatcagggaaaccaaaggtgcaggttgagacgcaggccctgaaagggtgaagatagagcttctctgccacttcctaaacctgaatctattggcttctcctccagggaatgcaaaaacgtaggttttaggttatagacagagattttttggttaacataatgtgtttcaaattacagtaatttgtgccattttcaccatctttgccataaggtaaaacattggcttaactgttttctctccatcaaactatttattttaaatgtgcttctatgggatctttttatctctcccataaatggaaacccaatattctttaccataaataatagataaccctgagaaataaacatttgaaaaccaaacactgttaatatcaaa

SEQ ID NO: 147408 - DNA, 771 bp, Homo sapiens
  Payload ID: 9156
  Gene Symbol: LAMA3
  Gene Name: laminin, alpha 3
  ENST ID: ENST00000588164
  CDS Start-End: 1-285
cttgtgcgatctgcctcattctccagaggaggacaattgagtttcactgatttgggcttaccacctactgaccacctccaggcctcatttggatttcagacctttcaacccagtggcatattattagatcatcagacatggacaaggaacctgcaggtcactctggaagatggttacattgaattgagcaccagcgatagcggcggcccaatttttaaatctccacagacgtatatggatggtttactgcattatgtatctgtaataagcgacaactctgggtgagtggaataatacttctgtcagagctgtgagtgagttttactctctttcgtttaatggaattttctggtgtctttttgcaaaatatttgtccttgataccaaaaatacttcactaataagtcttgtccttcttcctttttccatatcaatttcttcataaaaaaataaactgccacacatggtggctcatgtctgtaatcccaacaactaagaaggctgaggcaagagggttgcttgaggccaagagttcgagaccagtcttggaaacacagtgaaaccatgtctctacgaaaactaaaataaaataaaatgtaaataaataaaattttaaaaataaatcagttggatggataaattgtggtgtattcaaatggaatgctatatagcaatgagaaagaaggatctagaactatatgtaatgacatgaatgaccctcacaaacataatgtggaaaacattgagtcacacataaaagttcatctcatat

SEQ ID NO: 147409 - DNA, 590 bp, Homo sapiens
  Payload ID: 9156
  Gene Symbol: LAMA3
  Gene Name: laminin, alpha 3
  ENST ID: ENST00000592519
  CDS Start-End: 1-178
ggcaggccaggtgaacatttacagctgcaactacaggtgcgatgcaatgaactcactgctctcacctcaaaggctgtgtcaagtacctgggtgcatagcacaaggaaaaagactcattctcagtaatgttagggggtgcacacctacctttgcaacacaccttcagaactggggataattaatgtttgatgattgtcaagtggaaaaaaaaattaacaaaggacttcaaaatttgccctgatgaagttcttctcttccaagagcactaactgacaagggcttattaaaaatggttttgtttgcataatatttcaagatgtgtgcaaatgttcagagcatgctgtaattaaagaatcagcacaaggggtgtttccacatgaaattaattgtatactaaatgggactggaagtcagagttccttgaaacagcagatggagcactgcagtaaacccatccagttcttggccatggccttgaacattgtattactactactttcatgttgctttttgtcaaacccaagatgacctgaagcaatggacatcttccctgttgtgaaaatgaaaacaaataaacaaataaacaaaaa

SEQ ID NO: 147410 - DNA, 554 bp, Homo sapiens
  Payload ID: 9156
  Gene Symbol: LAMA3
  Gene Name: laminin, alpha 3
  ENST ID: ENST00000588004
  CDS Start-End: 1-403
tttctctgaagaaggaggtcatgtcgtcttggctcactctgtattgttggggccagaatttaagcttgttttcagcatccgcccaagaagtctcactgggatcctaatacacatcggaagtcagcccgggaagcacttatgtgtttacctggaggcaggaaaggtcacggcctctatggacagtggggcaggtgggacctcaacgtcggtcacaccaaagcagtctctgtgtgatggacagtggcactcggtggcagccaatttgacgacactgaggatccctgtgtggaaatcattctttggctgtctgaggaatattcatgtcaatcacatccctgtccctgtcactgaagccttggaagtccaggggcctgtcagtctgaatggttgtcctgaccagtaacccaagcctatttcacagcaaggaaattcaccttcaaaagcactgattacccaatgcacctccctccccagctcgagatcattcttcactcaggacacaaaccagacaggtttaatagcgaatctaattttgaattctgaccatggatacc

SEQ ID NO: 147411 - DNA, 1815 bp, Homo sapiens
  Payload ID: 9156
  Gene Symbol: LAMA3
  Gene Name: laminin, alpha 3
  ENST ID: ENST00000585600
  CDS Start-End: 87-1815
gcaggtccgggaggcgcaggcggagagcggcggtgcccccgagcccctctgcggacggctcaggcgggaggaccccgcgcggctggatggcggcggccgcgcggcctcggggtcgggcactggggccagtactgccgccgacgccgctgctcctgctggtactgcgggtgctgccagcctgcggggcgaccgctcgggatcccggggccgcggccgggctcagccttcacccgacttacttcaacctggccgaggcggcgaggatttgggccaccgccacctgcggggagaggggacccggcgaggggaggccccagcccgagctctactgcaagttggtcgggggccccaccgccccaggcagcggccacaccatccagggccagttctgtgactattgcaattctgaagaccccaggaaagcacatcctgtcaccaatgccatcgatggatctgaacgttggtggcaaagccctcccctgtcctcaggcacacagtacaacagagtcaacctcaccttggatctggggcagctcttccatgtggcctatattttaatcaaatttgcaaattctcctcgccctgatctttgggtcttggaaagatctgtagactttggaagcacctactcaccatggcaatattttgctcattctaaagtagactgtttaaaagaatttgggcgggaggcaaatatggctgtcacccgggatgatgatgtactttgtgttactgaatattcccgtattgtacctttggaaaatggtgaggttgtggtgtccttgataaacggtcgtccaggtgcaaaaaattttactttctctcacaccctgagggagtttaccaaggcaacaaacatccgcttgcgttttcttagaaccaatacgcttcttggacacctcatctccaaagcccagcgagatccaactgtcactcggcggtattattacagcataaaggacatcagcattggtgggcagtgtgtttgcaatggccatgctgaagtgtgcaatataaacaatcctgaaaaactgtttcggtgtgaatgccagcaccacacctgtggggagacgtgtgatcgctgctgcacagggtacaatcagaggcgctggcggcccgccgcttgggagcagagccacgagtgtgaagcatgcaactgccacggccatgccagcaactgttactatgatccagatgttgagcggcagcaggcaagcttgaatacccagggcatctatgctggtggaggggtctgcattaactgtcagcacaacacagctggagtaaactgtgaacagtgtgctaagggctattaccgcccttatggggttccagtggatgcccctgatggctgcatcccctgcagctgtgaccctgagcatgcggatggctgtgaacagggttcaggccgctgtcactgcaagccaaatttccacggagacaactgtgagaagtgtgcaattggatactacaatttcccattttgcttgagaattcccatttttcctgtttctacaccaagttcagaagatccagtagctggagatataaaagggtgtgactgtaatctggaaggtgttctccctgaaatatgtgatgcccacggacggtgcctgtgccgccctggggttgagggccctcgatgtgatacctgccgctctggtttctactcattccctatttgccaaggacccagtgaaaaggtggccatctacaagccagaaagcaggccctcagcagaaactgaaccagccagcacctggatcttggacttcccagcctccagaactggagaaataaatttctattgtttaa

SEQ ID NO: 147412 - DNA, 6547 bp, Homo sapiens
  Payload ID: 9157
  Gene Symbol: LAMA4
  Gene Name: laminin, alpha 4
  ENST ID: ENST00000230538
  CDS Start-End: 399-5870
gaatattcttctggagcccttggaggggctccaaactgagaggggagggaagaccgcagggaaaggcggacctcagtgtctgaaaagccagcttagagtgggagggcctgggagtagaaggtaaaaagggagtggtgagaatgaatgtgagaaggaagccaggacagcgcagtccccagtcccgaacggccagggagaggaggtggcctagcgctggcggggctcaccccaatccgtctgccttttgatgccgtactctgctggttgcgcagccacctcgggatactgcacacggagaggagggaaaataagcgaggcaccgccgcaccacgcgggagacctacggagacccacagcgcccgagccctggaagagcactactggatgtcagcggagaaatggctttgagctcagcctggcgctcggttctgcctctgtggctcctctggagcgctgcctgctcccgcgccgcgtccggggacgacaacgcttttccttttgacattgaagggagctcagcggttggcaggcaagacccgcctgagacgagcgaaccccgcgtggctctgggacgcctgccgcctgcggccgagaaatgcaatgctggattctttcacaccctgtcgggagaatgtgtgccctgcgactgtaatggcaattccaacgagtgtttggacggctcaggatactgtgtgcactgccagcggaacacaacaggagagcactgtgaaaagtgtctggatggttatatcggagattccatcaggggagcaccccaattctgccagccgtgcccctgtcccctgccccacttggccaattttgcagaatcctgctataggaaaaatggagctgttcggtgcatttgtaacgaaaattatgctggacctaactgtgaaagatgtgctcccggttactatggaaaccccttactcattggaagcacctgtaagaaatgtgactgcagtggaaattcagatcccaacctgatctttgaagattgtgatgaagtcactggccagtgtaggaattgcttacgcaacaccaccggattcaagtgtgaacgttgcgctcctggctactatggggacgccaggatagccaagaactgtgcagtgtgcaactgcgggggaggcccatgtgacagtgtaaccggagaatgcttggaagaaggttttgaaccccctacaggcatggactgcccaaccataagctgtgataagtgcgtctgggacctgactgatgacctgcggttagcagcgctctccatcgaggaaggcaaatccggggtgctgagcgtatcctctggggccgccgctcataggcacgtgaatgaaatcaacgccaccatctacctcctcaaaacaaaattgtcagaaagagaaaaccaatacgccctaagaaagatacaaatcaacaatgctgagaacacgatgaaaagccttctgtctgacgtagaggaattagttgaaaaggaaaatcaagcctccagaaaaggacaacttgttcagaaggaaagcatggacaccattaaccacgcaagtcagctggtagagcaagcccatgatatgagggataaaatccaagagatcaacaacaagatgctctattatggggaagagcatgaacttagccccaaggaaatctctgagaagctggtgttggcccagaagatgcttgaagagattagaagccgtcaaccatttttcacccaacgggagctcgtggatgaggaggcagatgaggcttacgaactactgagccaggctgagagctggcagcggctgcacaatgagacccgcactctgtttcctgtcgtcctggagcagctggatgactacaatgctaagttgtcagatctccaggaagcacttgaccaggcccttaactatgtcagggatgccgaagacatgaacagggccacagcagccaggcagcgggaccatgagaaacaacaggaaagagtgagggaacaaatggaagtggtgaacatgtctctgagcacatctgcggactctctgacaacacctcgtctaactctttcagaacttgatgatataataaagaatgcgtcagggatttatgcagaaatagatggagccaaaagtgaactacaagtaaaactatctaacctaagtaacctcagccatgatttagtccaagaagctattgaccatgcacaggaccttcaacaagaagctaatgaattgagcaggaagttgcacagttcagatatgaacgggctggtacagaaggctttggatgcatcaaatgtctatgaaaatattgttaattatgttagtgaagccaatgaaacagcagaatttgctttgaacaccactgaccgaatttatgatgcggtgagtgggattgatactcaaatcatttaccataaagatgaaagtgagaacctcctcaatcaagccagagaactgcaagcaaaggcagagtctagcagtgatgaagcagtggctgacactagcaggcgtgtgggtggagccctagcaaggaaaagtgcccttaaaaccagactcagtgatgccgttaagcaactacaagcagcagagagaggggatgcccagcagcgcctggggcagtctagactgatcaccgaggaagccaacaggacgacgatggaggtgcagcaggccactgcccccatggccaacaatctaaccaactggtcacagaatcttcaacattttgactcttctgcttacaacactgcagtgaactctgctagggatgcagtaagaaatctgaccgaggttgtccctcagctcctggatcagcttcgtacggttgagcagaagcgacctgcaagcaacgtttctgccagcatccagaggatccgagagctcattgctcagaccagaagtgttgccagcaagatccaagtctccatgatgtttgatggccagtcagctgtggaagtgcactcgagaaccagtatggatgacttaaaggccttcacgtctctgagcctgtacatgaaaccccctgtgaagcggccggaactgaccgagactgcagatcagtttatcctgtacctcggaagcaaaaacgccaaaaaagagtatatgggtcttgcaatcaaaaatgataatctggtatacgtctataatttgggaactaaagatgtggagattcccctggactccaagcccgtcagttcctggcctgcttacttcagcattgtcaagattgaaagggtgggaaaacatggaaaggtgtttttaacagtcccgagtctaagtagcacagcagaggaaaagttcattaaaaagggggaattttcgggagatgactctctgctggacctggaccctgaggacacagtgttttatgttggtggagtgccttccaacttcaagctccctaccagcttaaacctgcctggctttgttggctgcctggaactggccactttgaataatgatgtgatcagcttgtacaactttaagcacatctataatatggacccctccacatcagtgccatgtgcccgagataagctggccttcactcagagtcgggctgccagttacttcttcgatggctccggttatgccgtggtgagagacatcacaaggagagggaaatttggtcaggtgactcgctttgacatagaagttcgaacaccagctgacaacggccttattctcctgatggtcaatggaagtatgtttttcagactggaaatgcgcaatggttacctacatgtgttctatgattttggattcagcggtggccctgtgcatcttgaagatacgttaaagaaagctcaaattaatgatgcaaaataccatgagatctcaatcatttaccacaatgataagaaaatgatcttggtagttgacagaaggcatgtcaagagcatggataatgaaaagatgaaaataccttttacagatatatacattggaggagctcctccagaaatcttacaatccagggccctcagagcacaccttcccctagatatcaacttcagaggatgcatgaagggcttccagttccaaaagaaggacttcaatttactggagcagacagaaaccctgggagttggttatggatgcccagaagactcacttatatctcgcagagcatatttcaatggacagagcttcattgcttcaattcagaaaatatctttctttgatggctttgaaggaggttttaatttccgaacattacaaccaaatgggttactattctattatgcttcagggtcagacgtgttctccatctcactggataatggtactgtcatcatggatgtaaagggaatcaaagttcagtcagtagataagcagtacaatgatgggctgtcccacttcgtcattagctctgtctcacccacaagatatgaactgatagtagataaaagcagagttgggagtaagaatcctaccaaagggaaaatagaacagacacaagcaagtgaaaagaagttttacttcggtggctcaccaatcagtgctcagtatgctaatttcactggctgcataagtaatgcctactttaccagggtggatagagatgtggaggttgaagatttccaacggtatactgaaaaggtccacacttctctttatgagtgtcccattgagtcttcaccattgtttctcctccataaaaaaggaaaaaatttatccaagcctaaagcaagtcagaataaaaagggagggaaaagtaaagatgcaccttcatgggatcctgttgctctgaaactcccagagcggaatactccaagaaactctcattgccacctttccaacagccctagagcaatagagcacgcctatcaatatggaggaacagccaacagccgccaagagtttgaacacttaaaaggagattttggtgccaaatctcagttttccattcgtctgagaactcgttcctcccatggcatgatcttctatgtctcagatcaagaagagaatgacttcatgactctatttttggcccatggccgcttggtttacatgtttaatgttggtcacaaaaaactgaagattagaagccaggagaaatacaatgatggcctgtggcatgatgtgatatttattcgagaaaggagcagtggccgactggtaattgatggtctccgagtcctagaagaaagtcttcctcctactgaagctacctggaaaatcaagggtcccatttatttgggaggtgtggctcctggaaaggctgtgaaaaatgttcagattaactccatctacagttttagtggctgtctcagcaatctccagctcaatggggcctccatcacctctgcttctcagacattcagtgtgaccccttgctttgaaggccccatggaaacaggaacttacttttcaacagaaggaggatacgtggttctagatgaatctttcaatattggattgaagtttgaaattgcatttgaagtccgtcccagaagcagttccggaaccctggtccacggccacagtgtcaatggggagtacctaaatgttcacatgaaaaatggacaggtcatagtgaaagtcaataatggcatcagagatttttccacctcagttacacccaagcagagtctctgtgatggcagatggcacagaattacagttattagagattctaatgtggttcagttggatgtggactctgaagtgaaccatgtggttggacccctgaatccaaaaccaattgatcacagggagcctgtgtttgttggaggtgttccagaatctctactgacaccacgcttggcccccagcaaacccttcacaggctgcatacgccactttgtgattgatggacacccagtgagcttcagtaaagcagccctggtcagcggcgccgtaagcatcaactcctgtccagcagcctgacatgacagagcacagctgcccaaatacaaagttctttagagcactgaaagaaacacaaagccagccaggaggaacagtaactcttccttcgggtggaagctttcatcgagttgaacaggacttaaacgaatcatcagggaccggatatttcttatttctcatttggattcttaaccttgaatccaaagtgtctgcaatggacaacaattgaaggagtggcaaacttacttgtattgagagcacacgcaattcctactggtgaaattactgtttctgtttctaataaaatagaagggattccaaataaacacttgcacacatttttgaagtgcggctagattctcagattcacctttcttccagggaagataactttcaatctatataaaaatctctgtcctaaaactacctttctttattttgaagagacttactaacttacatataatctaaattagatgatagatttgtttttagcccttttgtttggtctatcagtataagaagaatattttaggtttatagctgaagttatcaaggtttaataaagtaaatttctaacagaatactagaaaaatgcagtataatttaattttttctaaataagaaacacaggaaatcaactactttttccccttccttatctccttaaaagaaaaataaaattgtacatgaga

SEQ ID NO: 147413 - DNA, 541 bp, Homo sapiens
  Payload ID: 9157
  Gene Symbol: LAMA4
  Gene Name: laminin, alpha 4
  ENST ID: ENST00000243219
  CDS Start-End: 279-541
agtcccgaacggccagggagaggaggtggcctagcgctggcggggctcaccccaatccgtctgccttttgatgccgtactgtaagctccgtccatctgtaggttcttgagccagaacctctgcgggaaggagaaaaactgctggttgcgcagccacctcgggatactgcacacggagaggagggaaaataagcgaggcaccgccgcaccacgcgggagacctacggagacccacagcgcccgagccctggaagagcactactggatgtcagcggagaaatggctttgagctcagcctggcgctcggttctgcctctgtggctcctctggagcgctgcctgctcccgcgccgcgtccggggacgacaacgcttttccttttgacattgaagggagctcagcggttggcaggcaagacccgcctgagacgagcgaaccccgcgtggctctgggacgcctgccgcctgcggccgagaaatgcaatgctggattctttcacaccctgtcgggagaatgtgtgccctgcgactgtaatggcaattc

SEQ ID NO: 147414 - DNA, 1061 bp, Homo sapiens
  Payload ID: 9157
  Gene Symbol: LAMA4
  Gene Name: laminin, alpha 4
  Uniprot ID: Q16363
  ENST ID: ENST00000368638
  CDS Start-End: 272-634
gggagtggtgagaatgaatgtgagaaggaagccaggacagcgcagtccccagtcccgaacggccagggagaggaggtggcctagcgctggcggggctcaccccaatccgtctgccttttgatgccgtactctgctggttgcgcagccacctcgggatactgcacacggagaggagggaaaataagcgaggcaccgccgcaccacgcgggagacctacggagacccacagcgcccgagccctggaagagcactactggatgtcagcggagaaatggctttgagctcagcctggcgctcggttctgcctctgtggctcctctggagcgctgcctgctcccgcgccgcgtccggggacgacaacgcttttccttttgacattgaagggagctcagcggttggcaggcaagacccgcctgagacgagcgaaccccgcgtggctctgggacgcctgccgcctgcggccgaggtacagtgtccctgccattgccaccctgctggggcacctgcgcccccgcgggctgtgccacactcgtccttctctctctctccgcctctttcctctccccagtgccttgagagtttcacctgggctaggtcagttcggaaacttgaaataaagagttttcctttgtaagttgcatttggatgttgagagttgaaagttgaggcttcggaatgtgtctgctcaaaggggtgagagtgcatgtgttggtgctctgagttcatccgctagactctcaccggggactgcagcagcacatcggtgacttctgccacttgcgtgtcccagtagtcattttgtcaagccacggcacttaacgtgtgtgccctgtcactggcttcctgctcctctgtgctgttaggacagtgggaacactactgcaggatctttttgtctcatattagacaagaagtcttctgcagcagggaaggtgagggggtgagtgagagtggctggtcatgaaaggagctgttagacaactgctgagagggtatcttaagtagaaacgagccattgtattccagaaacaagatgtttccattaaaatcaagcctcagga

SEQ ID NO: 147415 - DNA, 672 bp, Homo sapiens
  Payload ID: 9157
  Gene Symbol: LAMA4
  Gene Name: laminin, alpha 4
  ENST ID: ENST00000368640
  CDS Start-End: 1-536
tgatctttgaagattgtgatgaagtcactggccagtgtaggaattgcttacgcaacaccaccggattcaagtgtgaacgttgcgctcctggctactatggggacgccaggatagccaagaactgtgcagtgtgcaactgcgggggaggcccatgtgacagtgtaaccggagaatgcttggaagaaggttttgaaccccctacaggcatggactgcccaaccataagctgtgataagtgcgtctgggacctgactgatgacctgcggttagcagcgctctccatcgaggaaggcaaatccggggtgctgagcgtatcctctggggccgccgctcataggcacgtgaatgaaatcaacgccaccatctacctcctcaaaacaaaattgtcagaaagagaaaaccaatacgccctaagaaagatacaaatcaacaatgctgagaacacgatgaaaagccttctgtctgacgtagaggaattagttgaaaagcactggaacaagccaagaagaagactggaattgcaggaaggagtataatgactcagaagacagtgtccattcagagagcccacagtttatgaagggactgatgaccacattgccgctgcacagtgggctctgtgactacaggagccttgctctgtagggaggggattacccttctccaataaaa

SEQ ID NO: 147416 - DNA, 6297 bp, Homo sapiens
  Payload ID: 9157
  Gene Symbol: LAMA4
  Gene Name: laminin, alpha 4
  ENST ID: ENST00000389463
  CDS Start-End: 284-5734
agaaggtaaaaagggagtggtgagaatgaatgtgagaaggaagccaggacagcgcagtccccagtcccgaacggccagggagaggaggtggcctagcgctggcggggctcaccccaatccgtctgccttttgatgccgtactctgctggttgcgcagccacctcgggatactgcacacggagaggagggaaaataagcgaggcaccgccgcaccacgcgggagacctacggagacccacagcgcccgagccctggaagagcactactggatgtcagcggagaaatggctttgagctcagcctggcgctcggttctgcctctgtggctcctctggagcgctgcctgctcccgcgccgcgtccggggacgacaacgcttttccttttgacattgaagggagctcagcggttggcaggcaagacccgcctgagacgagcgaaccccgcgtggctctgggacgcctgccgcctgcggccgagaaatgcaatgctggattctttcacaccctgtcgggagaatgtgtgccctgcgactgtaatggcaattccaacgagtgtttggacggctcaggatactgtgtgcactgccagcggaacacaacaggagagcactgtgaaaagtgtctggatggttatatcggagattccatcaggggagcaccccaattctgccagccgtgcccctgtcccctgccccacttggccaattttgcagaatcctgctataggaaaaatggagctgttcggtgcatttgtaacgaaaattatgctggacctaactgtgaaagatgtgctcccggttactatggaaaccccttactcattggaagcacctgtaagaaatgtgactgcagtggaaattcagatcccaacctgatctttgaagattgtgatgaagtcactggccagtgtaggaattgcttacgcaacaccaccggattcaagtgtgaacgttgcgctcctggctactatggggacgccaggatagccaagaactgtgcagtgtgcaactgcgggggaggcccatgtgacagtgtaaccggagaatgcttggaagaaggttttgaaccccctacaggctgtgataagtgcgtctgggacctgactgatgacctgcggttagcagcgctctccatcgaggaaggcaaatccggggtgctgagcgtatcctctggggccgccgctcataggcacgtgaatgaaatcaacgccaccatctacctcctcaaaacaaaattgtcagaaagagaaaaccaatacgccctaagaaagatacaaatcaacaatgctgagaacacgatgaaaagccttctgtctgacgtagaggaattagttgaaaaggaaaatcaagcctccagaaaaggacaacttgttcagaaggaaagcatggacaccattaaccacgcaagtcagctggtagagcaagcccatgatatgagggataaaatccaagagatcaacaacaagatgctctattatggggaagagcatgaacttagccccaaggaaatctctgagaagctggtgttggcccagaagatgcttgaagagattagaagccgtcaaccatttttcacccaacgggagctcgtggatgaggaggcagatgaggcttacgaactactgagccaggctgagagctggcagcggctgcacaatgagacccgcactctgtttcctgtcgtcctggagcagctggatgactacaatgctaagttgtcagatctccaggaagcacttgaccaggcccttaactatgtcagggatgccgaagacatgaacagggccacagcagccaggcagcgggaccatgagaaacaacaggaaagagtgagggaacaaatggaagtggtgaacatgtctctgagcacatctgcggactctctgacaacacctcgtctaactctttcagaacttgatgatataataaagaatgcgtcagggatttatgcagaaatagatggagccaaaagtgaactacaagtaaaactatctaacctaagtaacctcagccatgatttagtccaagaagctattgaccatgcacaggaccttcaacaagaagctaatgaattgagcaggaagttgcacagttcagatatgaacgggctggtacagaaggctttggatgcatcaaatgtctatgaaaatattgttaattatgttagtgaagccaatgaaacagcagaatttgctttgaacaccactgaccgaatttatgatgcggtgagtgggattgatactcaaatcatttaccataaagatgaaagtgagaacctcctcaatcaagccagagaactgcaagcaaaggcagagtctagcagtgatgaagcagtggctgacactagcaggcgtgtgggtggagccctagcaaggaaaagtgcccttaaaaccagactcagtgatgccgttaagcaactacaagcagcagagagaggggatgcccagcagcgcctggggcagtctagactgatcaccgaggaagccaacaggacgacgatggaggtgcagcaggccactgcccccatggccaacaatctaaccaactggtcacagaatcttcaacattttgactcttctgcttacaacactgcagtgaactctgctagggatgcagtaagaaatctgaccgaggttgtccctcagctcctggatcagcttcgtacggttgagcagaagcgacctgcaagcaacgtttctgccagcatccagaggatccgagagctcattgctcagaccagaagtgttgccagcaagatccaagtctccatgatgtttgatggccagtcagctgtggaagtgcactcgagaaccagtatggatgacttaaaggccttcacgtctctgagcctgtacatgaaaccccctgtgaagcggccggaactgaccgagactgcagatcagtttatcctgtacctcggaagcaaaaacgccaaaaaagagtatatgggtcttgcaatcaaaaatgataatctggtatacgtctataatttgggaactaaagatgtggagattcccctggactccaagcccgtcagttcctggcctgcttacttcagcattgtcaagattgaaagggtgggaaaacatggaaaggtgtttttaacagtcccgagtctaagtagcacagcagaggaaaagttcattaaaaagggggaattttcgggagatgactctctgctggacctggaccctgaggacacagtgttttatgttggtggagtgccttccaacttcaagctccctaccagcttaaacctgcctggctttgttggctgcctggaactggccactttgaataatgatgtgatcagcttgtacaactttaagcacatctataatatggacccctccacatcagtgccatgtgcccgagataagctggccttcactcagagtcgggctgccagttacttcttcgatggctccggttatgccgtggtgagagacatcacaaggagagggaaatttggtcaggtgactcgctttgacatagaagttcgaacaccagctgacaacggccttattctcctgatggtcaatggaagtatgtttttcagactggaaatgcgcaatggttacctacatgtgttctatgattttggattcagcggtggccctgtgcatcttgaagatacgttaaagaaagctcaaattaatgatgcaaaataccatgagatctcaatcatttaccacaatgataagaaaatgatcttggtagttgacagaaggcatgtcaagagcatggataatgaaaagatgaaaataccttttacagatatatacattggaggagctcctccagaaatcttacaatccagggccctcagagcacaccttcccctagatatcaacttcagaggatgcatgaagggcttccagttccaaaagaaggacttcaatttactggagcagacagaaaccctgggagttggttatggatgcccagaagactcacttatatctcgcagagcatatttcaatggacagagcttcattgcttcaattcagaaaatatctttctttgatggctttgaaggaggttttaatttccgaacattacaaccaaatgggttactattctattatgcttcagggtcagacgtgttctccatctcactggataatggtactgtcatcatggatgtaaagggaatcaaagttcagtcagtagataagcagtacaatgatgggctgtcccacttcgtcattagctctgtctcacccacaagatatgaactgatagtagataaaagcagagttgggagtaagaatcctaccaaagggaaaatagaacagacacaagcaagtgaaaagaagttttacttcggtggctcaccaatcagtgctcagtatgctaatttcactggctgcataagtaatgcctactttaccagggtggatagagatgtggaggttgaagatttccaacggtatactgaaaaggtccacacttctctttatgagtgtcccattgagtcttcaccattgtttctcctccataaaaaaggaaaaaatttatccaagcctaaagcaagtcagaataaaaagggagggaaaagtaaagatgcaccttcatgggatcctgttgctctgaaactcccagagcggaatactccaagaaactctcattgccacctttccaacagccctagagcaatagagcacgcctatcaatatggaggaacagccaacagccgccaagagtttgaacacttaaaaggagattttggtgccaaatctcagttttccattcgtctgagaactcgttcctcccatggcatgatcttctatgtctcagatcaagaagagaatgacttcatgactctatttttggcccatggccgcttggtttacatgtttaatgttggtcacaaaaaactgaagattagaagccaggagaaatacaatgatggcctgtggcatgatgtgatatttattcgagaaaggagcagtggccgactggtaattgatggtctccgagtcctagaagaaagtcttcctcctactgaagctacctggaaaatcaagggtcccatttatttgggaggtgtggctcctggaaaggctgtgaaaaatgttcagattaactccatctacagttttagtggctgtctcagcaatctccagctcaatggggcctccatcacctctgcttctcagacattcagtgtgaccccttgctttgaaggccccatggaaacaggaacttacttttcaacagaaggaggatacgtggttctagatgaatctttcaatattggattgaagtttgaaattgcatttgaagtccgtcccagaagcagttccggaaccctggtccacggccacagtgtcaatggggagtacctaaatgttcacatgaaaaatggacaggtcatagtgaaagtcaataatggcatcagagatttttccacctcagttacacccaagcagagtctctgtgatggcagatggcacagaattacagttattagagattctaatgtggttcagttggatgtggactctgaagtgaaccatgtggttggacccctgaatccaaaaccaattgatcacagggagcctgtgtttgttggaggtgttccagaatctctactgacaccacgcttggcccccagcaaacccttcacaggctgcatacgccactttgtgattgatggacacccagtgagcttcagtaaagcagccctggtcagcggcgccgtaagcatcaactcctgtccagcagcctgacatgacagagcacagctgcccaaatacaaagttctttagagcactgaaagaaacacaaagccagccaggaggaacagtaactcttccttcgggtggaagctttcatcgagttgaacaggacttaaacgaatcatcagggaccggatatttcttatttctcatttggattcttaaccttgaatccaaagtgtctgcaatggacaacaattgaaggagtggcaaacttacttgtattgagagcacacgcaattcctactggtgaaattactgtttctgtttctaataaaatagaagggattccaaataaacacttgcacacatttttgaagtgcggctagattctcagattcacctttcttccagggaagataactttcaatctatataaaaatctctgtcctaaaactacctttctttattttgaagagacttactaacttacatataatctaaattagatgatagatttgtttttagcccttttgtttggtctatcagtataagaagaatattttaggtttatagctgaagttatcaaggtttaataaagtaaatttctaaca

SEQ ID NO: 147417 - DNA, 645 bp, Homo sapiens
  Payload ID: 9157
  Gene Symbol: LAMA4
  Gene Name: laminin, alpha 4
  Uniprot ID: Q16363
  ENST ID: ENST00000453937
  CDS Start-End: 279-641
agaatgaatgtgagaaggaagccaggacagcgcagtccccagtcccgaacggccagggagaggaggtggcctagcgctggcggggctcaccccaatccgtctgccttttgatgccgtactgtaagctccgtccatctctgctggttgcgcagccacctcgggatactgcacacggagaggagggaaaataagcgaggcaccgccgcaccacgcgggagacctacggagacccacagcgcccgagccctggaagagcactactggatgtcagcggagaaatggctttgagctcagcctggcgctcggttctgcctctgtggctcctctggagcgctgcctgctcccgcgccgcgtccggggacgacaacgcttttccttttgacattgaagggagctcagcggttggcaggcaagacccgcctgagacgagcgaaccccgcgtggctctgggacgcctgccgcctgcggccgaggtacagtgtccctgccattgccaccctgctggggcacctgcgcccccgcgggctgtgccacactcgtccttctctctctctccgcctctttcctctccccagtgccttgagagtttcacctgggctaggtcagttcggaaacttgaaataaagagttttcctttgtaagttg

SEQ ID NO: 147418 - DNA, 554 bp, Homo sapiens
  Payload ID: 9157
  Gene Symbol: LAMA4
  Gene Name: laminin, alpha 4
  Uniprot ID: Q16363
  ENST ID: ENST00000455073
  CDS Start-End: 194-554
gacctcagtgtctgaaaagccagcttagagtgggagggcctgggagtagaagctgctggttgcgcagccacctcgggatactgcacacggagaggagggaaaataagcgaggcaccgccgcaccacgcgggagacctacggagacccacagcgcccgagccctggaagagcactactggatgtcagcggagaaatggctttgagctcagcctggcgctcggttctgcctctgtggctcctctggagcgctgcctgctcccgcgccgcgtccggggacgacaacgcttttccttttgacattgaagggagctcagcggttggcaggcaagacccgcctgagacgagcgaaccccgcgtggctctgggacgcctgccgcctgcggccgaggtacagtgtccctgccattgccaccctgctggggcacctgcgcccccgcgggctgtgccacactcgtccttctctctctctccgcctctttcctctccccagtgccttgagagtttcacctgggctaggtcagttcggaaacttgaaataaagagttttcctttgt

SEQ ID NO: 147419 - DNA, 1080 bp, Homo sapiens
  Payload ID: 9157
  Gene Symbol: LAMA4
  Gene Name: laminin, alpha 4
  ENST ID: ENST00000431543
  CDS Start-End: 256-645
aatgtgagaaggaagccaggacagcgcagtccccagtcccgaacggccagggagaggaggtggcctagcgctggcggggctcaccccaatccgtctgccttttgatgccgtactctgctggttgcgcagccacctcgggatactgcacacggagaggagggaaaataagcgaggcaccgccgcaccacgcgggagacctacggagacccacagcgcccgagccctggaagagcactactggatgtcagcggagaaatggctttgagctcagcctggcgctcggttctgcctctgtggctcctctggagcgctgcctgctcccgcgccgcgtccggggacgacaacgcttttccttttgacattgaagggagctcagcggttggcaggcaagacccgcctgagacgagcgaaccccgcgtggctctgggacgcctgccgcctgcggccgagaaatgcaatgctggattctttcacaccctgtcgggagaatgtgtgccctgcgactgtaatggcaattccaacgagtgtttggacggctcaggatactgtgtgactactgacggagaagacccaggtttttcagcttctgccctatcgttcattctcagctctcagggagccagagaagccagggctccaacatgaacacttcttgtagctcactgtcatgaccagtgtttcagtcagttcttgcaggttgcctgacttacctcatttctctcatttcctgtaagcaaccaaaaataaaaggctttcttttatttcattttgtcttattttgcttttatcttgaaggcatataagacctctgtatctgccttgttcaccttcaactgcttctaattcttcctcaattccagtgtccaatgtcaatttgaaattaaaatttacagactgattttaactaagctgttggtaaagctgacctaagccattcagccacaaaatatagagtatacaaaattatgctaccattttacacatatcaagcaagcaaagagatttttttttactggtggaacactaatctttcaaatatagaatagtggctaaatgaaaataaaacagcttagaaatcta

SEQ ID NO: 147420 - DNA, 5983 bp, Homo sapiens
  Payload ID: 9157
  Gene Symbol: LAMA4
  Gene Name: laminin, alpha 4
  ENST ID: ENST00000424408
  CDS Start-End: 389-5839
agtcccgaacggccagggagaggaggtggcctagcgctggcggggctcaccccaatccgtctgccttttgatgccgtactgtaagctccgtccatctgtaggttcttgagccagaacctctgcgggaaggagaaaaagtgaaagagggagagggagagggagagagagggggagaaggggagagagagagagggagagagaggctggaactctcccttactctcgcactttccctttatttcctaagctgctggttgcgcagccacctcgggatactgcacacggagaggagggaaaataagcgaggcaccgccgcaccacgcgggagacctacggagacccacagcgcccgagccctggaagagcactactggatgtcagcggagaaatggctttgagctcagcctggcgctcggttctgcctctgtggctcctctggagcgctgcctgctcccgcgccgcgtccggggacgacaacgcttttccttttgacattgaagggagctcagcggttggcaggcaagacccgcctgagacgagcgaaccccgcgtggctctgggacgcctgccgcctgcggccgagaaatgcaatgctggattctttcacaccctgtcgggagaatgtgtgccctgcgactgtaatggcaattccaacgagtgtttggacggctcaggatactgtgtgcactgccagcggaacacaacaggagagcactgtgaaaagtgtctggatggttatatcggagattccatcaggggagcaccccaattctgccagccgtgcccctgtcccctgccccacttggccaattttgcagaatcctgctataggaaaaatggagctgttcggtgcatttgtaacgaaaattatgctggacctaactgtgaaagatgtgctcccggttactatggaaaccccttactcattggaagcacctgtaagaaatgtgactgcagtggaaattcagatcccaacctgatctttgaagattgtgatgaagtcactggccagtgtaggaattgcttacgcaacaccaccggattcaagtgtgaacgttgcgctcctggctactatggggacgccaggatagccaagaactgtgcagtgtgcaactgcgggggaggcccatgtgacagtgtaaccggagaatgcttggaagaaggttttgaaccccctacaggctgtgataagtgcgtctgggacctgactgatgacctgcggttagcagcgctctccatcgaggaaggcaaatccggggtgctgagcgtatcctctggggccgccgctcataggcacgtgaatgaaatcaacgccaccatctacctcctcaaaacaaaattgtcagaaagagaaaaccaatacgccctaagaaagatacaaatcaacaatgctgagaacacgatgaaaagccttctgtctgacgtagaggaattagttgaaaaggaaaatcaagcctccagaaaaggacaacttgttcagaaggaaagcatggacaccattaaccacgcaagtcagctggtagagcaagcccatgatatgagggataaaatccaagagatcaacaacaagatgctctattatggggaagagcatgaacttagccccaaggaaatctctgagaagctggtgttggcccagaagatgcttgaagagattagaagccgtcaaccatttttcacccaacgggagctcgtggatgaggaggcagatgaggcttacgaactactgagccaggctgagagctggcagcggctgcacaatgagacccgcactctgtttcctgtcgtcctggagcagctggatgactacaatgctaagttgtcagatctccaggaagcacttgaccaggcccttaactatgtcagggatgccgaagacatgaacagggccacagcagccaggcagcgggaccatgagaaacaacaggaaagagtgagggaacaaatggaagtggtgaacatgtctctgagcacatctgcggactctctgacaacacctcgtctaactctttcagaacttgatgatataataaagaatgcgtcagggatttatgcagaaatagatggagccaaaagtgaactacaagtaaaactatctaacctaagtaacctcagccatgatttagtccaagaagctattgaccatgcacaggaccttcaacaagaagctaatgaattgagcaggaagttgcacagttcagatatgaacgggctggtacagaaggctttggatgcatcaaatgtctatgaaaatattgttaattatgttagtgaagccaatgaaacagcagaatttgctttgaacaccactgaccgaatttatgatgcggtgagtgggattgatactcaaatcatttaccataaagatgaaagtgagaacctcctcaatcaagccagagaactgcaagcaaaggcagagtctagcagtgatgaagcagtggctgacactagcaggcgtgtgggtggagccctagcaaggaaaagtgcccttaaaaccagactcagtgatgccgttaagcaactacaagcagcagagagaggggatgcccagcagcgcctggggcagtctagactgatcaccgaggaagccaacaggacgacgatggaggtgcagcaggccactgcccccatggccaacaatctaaccaactggtcacagaatcttcaacattttgactcttctgcttacaacactgcagtgaactctgctagggatgcagtaagaaatctgaccgaggttgtccctcagctcctggatcagcttcgtacggttgagcagaagcgacctgcaagcaacgtttctgccagcatccagaggatccgagagctcattgctcagaccagaagtgttgccagcaagatccaagtctccatgatgtttgatggccagtcagctgtggaagtgcactcgagaaccagtatggatgacttaaaggccttcacgtctctgagcctgtacatgaaaccccctgtgaagcggccggaactgaccgagactgcagatcagtttatcctgtacctcggaagcaaaaacgccaaaaaagagtatatgggtcttgcaatcaaaaatgataatctggtatacgtctataatttgggaactaaagatgtggagattcccctggactccaagcccgtcagttcctggcctgcttacttcagcattgtcaagattgaaagggtgggaaaacatggaaaggtgtttttaacagtcccgagtctaagtagcacagcagaggaaaagttcattaaaaagggggaattttcgggagatgactctctgctggacctggaccctgaggacacagtgttttatgttggtggagtgccttccaacttcaagctccctaccagcttaaacctgcctggctttgttggctgcctggaactggccactttgaataatgatgtgatcagcttgtacaactttaagcacatctataatatggacccctccacatcagtgccatgtgcccgagataagctggccttcactcagagtcgggctgccagttacttcttcgatggctccggttatgccgtggtgagagacatcacaaggagagggaaatttggtcaggtgactcgctttgacatagaagttcgaacaccagctgacaacggccttattctcctgatggtcaatggaagtatgtttttcagactggaaatgcgcaatggttacctacatgtgttctatgattttggattcagcggtggccctgtgcatcttgaagatacgttaaagaaagctcaaattaatgatgcaaaataccatgagatctcaatcatttaccacaatgataagaaaatgatcttggtagttgacagaaggcatgtcaagagcatggataatgaaaagatgaaaataccttttacagatatatacattggaggagctcctccagaaatcttacaatccagggccctcagagcacaccttcccctagatatcaacttcagaggatgcatgaagggcttccagttccaaaagaaggacttcaatttactggagcagacagaaaccctgggagttggttatggatgcccagaagactcacttatatctcgcagagcatatttcaatggacagagcttcattgcttcaattcagaaaatatctttctttgatggctttgaaggaggttttaatttccgaacattacaaccaaatgggttactattctattatgcttcagggtcagacgtgttctccatctcactggataatggtactgtcatcatggatgtaaagggaatcaaagttcagtcagtagataagcagtacaatgatgggctgtcccacttcgtcattagctctgtctcacccacaagatatgaactgatagtagataaaagcagagttgggagtaagaatcctaccaaagggaaaatagaacagacacaagcaagtgaaaagaagttttacttcggtggctcaccaatcagtgctcagtatgctaatttcactggctgcataagtaatgcctactttaccagggtggatagagatgtggaggttgaagatttccaacggtatactgaaaaggtccacacttctctttatgagtgtcccattgagtcttcaccattgtttctcctccataaaaaaggaaaaaatttatccaagcctaaagcaagtcagaataaaaagggagggaaaagtaaagatgcaccttcatgggatcctgttgctctgaaactcccagagcggaatactccaagaaactctcattgccacctttccaacagccctagagcaatagagcacgcctatcaatatggaggaacagccaacagccgccaagagtttgaacacttaaaaggagattttggtgccaaatctcagttttccattcgtctgagaactcgttcctcccatggcatgatcttctatgtctcagatcaagaagagaatgacttcatgactctatttttggcccatggccgcttggtttacatgtttaatgttggtcacaaaaaactgaagattagaagccaggagaaatacaatgatggcctgtggcatgatgtgatatttattcgagaaaggagcagtggccgactggtaattgatggtctccgagtcctagaagaaagtcttcctcctactgaagctacctggaaaatcaagggtcccatttatttgggaggtgtggctcctggaaaggctgtgaaaaatgttcagattaactccatctacagttttagtggctgtctcagcaatctccagctcaatggggcctccatcacctctgcttctcagacattcagtgtgaccccttgctttgaaggccccatggaaacaggaacttacttttcaacagaaggaggatacgtggttctagatgaatctttcaatattggattgaagtttgaaattgcatttgaagtccgtcccagaagcagttccggaaccctggtccacggccacagtgtcaatggggagtacctaaatgttcacatgaaaaatggacaggtcatagtgaaagtcaataatggcatcagagatttttccacctcagttacacccaagcagagtctctgtgatggcagatggcacagaattacagttattagagattctaatgtggttcagttggatgtggactctgaagtgaaccatgtggttggacccctgaatccaaaaccaattgatcacagggagcctgtgtttgttggaggtgttccagaatctctactgacaccacgcttggcccccagcaaacccttcacaggctgcatacgccactttgtgattgatggacacccagtgagcttcagtaaagcagccctggtcagcggcgccgtaagcatcaactcctgtccagcagcctgacatgacagagcacagctgcccaaatacaaagttctttagagcactgaaagaaacacaaagccagccaggaggaacagtaactcttccttcgggtggaagctttcatcgagttgaacaggacttaaacgaatcatcagggaccgg

SEQ ID NO: 147421 - DNA, 1054 bp, Homo sapiens
  Payload ID: 9157
  Gene Symbol: LAMA4
  Gene Name: laminin, alpha 4
  ENST ID: ENST00000523765
  CDS Start-End: 1-566
taaagaatgcgtcagggatttatgcagaaatagatggagccaaaagtgaactacaagtaaaactatctaacctaagtaacctcagccatgatttagtccaagaagctattgaccatgcacaggaccttcaacaagaagctaatgaattgagcaggaagttgcacagttcagatatgaacgggctggtacagaaggctttggatgcatcaaatgtctatgaaaatattgttaattatgttagtgaagccaatgaaacagcagaatttgctttgaacaccactgaccgaatttatgatgcggtgagtgggattgatactcaaatcatttaccataaagatgaaagtgagaacctcctcaatcaagccagagaactgcaagcaaaggcagagtctagcagtgatgaagcagtggctgacactagcaggcgtgtgggtggagccctagcaaggaaaagtgcccttaaaaccagactcagtgatgccgttaagcaactacaagcagcagagagaggtaagcatcagagagaattgaagtctcatctgttgattcactggagtgtaaggtaaaccttcaaggaaggattaggggatgcccagcagcgcctggggcagtctagactgatcaccgaggaagccaacaggacgacgatggaggtgcagcaggccactgcccccatggccaacaatctaaccaactggtcacagaatcttcaacattttgactcttctgcttacaacactgcagtgaactctgctagggatgcagtaagaaatctgaccgaggttgtccctcagctcctggatcagcttcgtacggttgagcagaagcgacctgcaagcaacgtttctgccagcatccagaggatccgagagctcattgctcagaccagaagtgttgccagcaagatccaagtctccatgatgtttgatggccagtcagctgtggaagtgcactcgagaaccagtatggatgacttaaaggccttcacgtctctgagcctgtacatgaaaccccctgtgaagcggccggaactgaccgagactgcagatcagtt

SEQ ID NO: 147422 - DNA, 729 bp, Homo sapiens
  Payload ID: 9157
  Gene Symbol: LAMA4
  Gene Name: laminin, alpha 4
  ENST ID: ENST00000521732
  CDS Start-End: 1-562
aagcacctgtaagaaatgtgactgcagtggaaattcagatcccaacctgatctttgaagattgtgatgaagtcactggccagtgtaggaattgcttacgcaacaccaccggattcaagtgtgaacgttgcgctcctggctactatggggacgccaggatagccaagaactgtgcagtgtgcaactgcgggggaggcccatgtgacagtgtaaccggagaatgcttggaagaaggttttgaaccccctacaggctgtgataagtgcgtctgggacctgactgatgacctgcggttagcagcgctctccatcgaggaaggcaaatccggggtgctgagcgtatcctctggggccgccgctcataggcacgtgaatgaaatcaacgccaccatctacctcctcaaaacaaaattgtcagaaagagaaaaccaatacgccctaagaaagatacaaatcaacaatgctgagaacacgatgaaaagccttctgtctgacgtagaggaattagttgaaaagcactggaacaagccaagaagaagactggaattgcaggaaggagtataatgactcagaagacagtgtccattcagagagcccacagtttatgaagggactgatgaccacattgccgctgcacagtgggctctgtgactacaggagccttgctctgtagggaggggattacccttctccaataaaaagcctctgggcatgtgtttgttataatacca

SEQ ID NO: 147423 - DNA, 588 bp, Homo sapiens
  Payload ID: 9157
  Gene Symbol: LAMA4
  Gene Name: laminin, alpha 4
  ENST ID: ENST00000519932
  CDS Start-End: 269-588
aaaagctgaatattcttctggagcccttggaggggctccaaactgagaggggagggaagaccgcagggaaaggcggacctcagtgtctgaaaagccagcttagagtgggagggcctgggagtagaagctgctggttgcgcagccacctcgggatactgcacacggagaggagggaaaataagcgaggcaccgccgcaccacgcgggagacctacggagacccacagcgcccgagccctggaagagcactactggatgtcagcggagaaatggctttgagctcagcctggcgctcggttctgcctctgtggctcctctggagcgctgcctgctcccgcgccgcgtccggggacgacaacgcttttccttttgacattgaagggagctcagcggttggcaggcaagacccgcctgagacgagcgaaccccgcgtggctctgggacgcctgccgcctgcggccgagaaatgcaatgctggattctttcacaccctgtcgggagaatgtgtgccctgcgactgtaatggcaattccaacgagtgtttggacggctcaggatactgtgtgcactgccagcggaacacaacagg

SEQ ID NO: 147424 - DNA, 6438 bp, Homo sapiens
  Payload ID: 9157
  Gene Symbol: LAMA4
  Gene Name: laminin, alpha 4
  ENST ID: ENST00000522006
  CDS Start-End: 411-5861
ttcttctggagcccttggaggggctccaaactgagaggggagggaagaccgcagggaaaggcggacctcagtgtctgaaaagccagcttagagtgggagggcctgggagtagaaggtaaaaagggagtggtgagaatgaatgtgagaaggaagccaggacagcgcagtccccagtcccgaacggccagggagaggaggtggcctagcgctggcggggctcaccccaatccgtctgccttttgatgccgtactgtaagctccgtccatctctgctggttgcgcagccacctcgggatactgcacacggagaggagggaaaataagcgaggcaccgccgcaccacgcgggagacctacggagacccacagcgcccgagccctggaagagcactactggatgtcagcggagaaatggctttgagctcagcctggcgctcggttctgcctctgtggctcctctggagcgctgcctgctcccgcgccgcgtccggggacgacaacgcttttccttttgacattgaagggagctcagcggttggcaggcaagacccgcctgagacgagcgaaccccgcgtggctctgggacgcctgccgcctgcggccgagaaatgcaatgctggattctttcacaccctgtcgggagaatgtgtgccctgcgactgtaatggcaattccaacgagtgtttggacggctcaggatactgtgtgcactgccagcggaacacaacaggagagcactgtgaaaagtgtctggatggttatatcggagattccatcaggggagcaccccaattctgccagccgtgcccctgtcccctgccccacttggccaattttgcagaatcctgctataggaaaaatggagctgttcggtgcatttgtaacgaaaattatgctggacctaactgtgaaagatgtgctcccggttactatggaaaccccttactcattggaagcacctgtaagaaatgtgactgcagtggaaattcagatcccaacctgatctttgaagattgtgatgaagtcactggccagtgtaggaattgcttacgcaacaccaccggattcaagtgtgaacgttgcgctcctggctactatggggacgccaggatagccaagaactgtgcagtgtgcaactgcgggggaggcccatgtgacagtgtaaccggagaatgcttggaagaaggttttgaaccccctacaggctgtgataagtgcgtctgggacctgactgatgacctgcggttagcagcgctctccatcgaggaaggcaaatccggggtgctgagcgtatcctctggggccgccgctcataggcacgtgaatgaaatcaacgccaccatctacctcctcaaaacaaaattgtcagaaagagaaaaccaatacgccctaagaaagatacaaatcaacaatgctgagaacacgatgaaaagccttctgtctgacgtagaggaattagttgaaaaggaaaatcaagcctccagaaaaggacaacttgttcagaaggaaagcatggacaccattaaccacgcaagtcagctggtagagcaagcccatgatatgagggataaaatccaagagatcaacaacaagatgctctattatggggaagagcatgaacttagccccaaggaaatctctgagaagctggtgttggcccagaagatgcttgaagagattagaagccgtcaaccatttttcacccaacgggagctcgtggatgaggaggcagatgaggcttacgaactactgagccaggctgagagctggcagcggctgcacaatgagacccgcactctgtttcctgtcgtcctggagcagctggatgactacaatgctaagttgtcagatctccaggaagcacttgaccaggcccttaactatgtcagggatgccgaagacatgaacagggccacagcagccaggcagcgggaccatgagaaacaacaggaaagagtgagggaacaaatggaagtggtgaacatgtctctgagcacatctgcggactctctgacaacacctcgtctaactctttcagaacttgatgatataataaagaatgcgtcagggatttatgcagaaatagatggagccaaaagtgaactacaagtaaaactatctaacctaagtaacctcagccatgatttagtccaagaagctattgaccatgcacaggaccttcaacaagaagctaatgaattgagcaggaagttgcacagttcagatatgaacgggctggtacagaaggctttggatgcatcaaatgtctatgaaaatattgttaattatgttagtgaagccaatgaaacagcagaatttgctttgaacaccactgaccgaatttatgatgcggtgagtgggattgatactcaaatcatttaccataaagatgaaagtgagaacctcctcaatcaagccagagaactgcaagcaaaggcagagtctagcagtgatgaagcagtggctgacactagcaggcgtgtgggtggagccctagcaaggaaaagtgcccttaaaaccagactcagtgatgccgttaagcaactacaagcagcagagagaggggatgcccagcagcgcctggggcagtctagactgatcaccgaggaagccaacaggacgacgatggaggtgcagcaggccactgcccccatggccaacaatctaaccaactggtcacagaatcttcaacattttgactcttctgcttacaacactgcagtgaactctgctagggatgcagtaagaaatctgaccgaggttgtccctcagctcctggatcagcttcgtacggttgagcagaagcgacctgcaagcaacgtttctgccagcatccagaggatccgagagctcattgctcagaccagaagtgttgccagcaagatccaagtctccatgatgtttgatggccagtcagctgtggaagtgcactcgagaaccagtatggatgacttaaaggccttcacgtctctgagcctgtacatgaaaccccctgtgaagcggccggaactgaccgagactgcagatcagtttatcctgtacctcggaagcaaaaacgccaaaaaagagtatatgggtcttgcaatcaaaaatgataatctggtatacgtctataatttgggaactaaagatgtggagattcccctggactccaagcccgtcagttcctggcctgcttacttcagcattgtcaagattgaaagggtgggaaaacatggaaaggtgtttttaacagtcccgagtctaagtagcacagcagaggaaaagttcattaaaaagggggaattttcgggagatgactctctgctggacctggaccctgaggacacagtgttttatgttggtggagtgccttccaacttcaagctccctaccagcttaaacctgcctggctttgttggctgcctggaactggccactttgaataatgatgtgatcagcttgtacaactttaagcacatctataatatggacccctccacatcagtgccatgtgcccgagataagctggccttcactcagagtcgggctgccagttacttcttcgatggctccggttatgccgtggtgagagacatcacaaggagagggaaatttggtcaggtgactcgctttgacatagaagttcgaacaccagctgacaacggccttattctcctgatggtcaatggaagtatgtttttcagactggaaatgcgcaatggttacctacatgtgttctatgattttggattcagcggtggccctgtgcatcttgaagatacgttaaagaaagctcaaattaatgatgcaaaataccatgagatctcaatcatttaccacaatgataagaaaatgatcttggtagttgacagaaggcatgtcaagagcatggataatgaaaagatgaaaataccttttacagatatatacattggaggagctcctccagaaatcttacaatccagggccctcagagcacaccttcccctagatatcaacttcagaggatgcatgaagggcttccagttccaaaagaaggacttcaatttactggagcagacagaaaccctgggagttggttatggatgcccagaagactcacttatatctcgcagagcatatttcaatggacagagcttcattgcttcaattcagaaaatatctttctttgatggctttgaaggaggttttaatttccgaacattacaaccaaatgggttactattctattatgcttcagggtcagacgtgttctccatctcactggataatggtactgtcatcatggatgtaaagggaatcaaagttcagtcagtagataagcagtacaatgatgggctgtcccacttcgtcattagctctgtctcacccacaagatatgaactgatagtagataaaagcagagttgggagtaagaatcctaccaaagggaaaatagaacagacacaagcaagtgaaaagaagttttacttcggtggctcaccaatcagtgctcagtatgctaatttcactggctgcataagtaatgcctactttaccagggtggatagagatgtggaggttgaagatttccaacggtatactgaaaaggtccacacttctctttatgagtgtcccattgagtcttcaccattgtttctcctccataaaaaaggaaaaaatttatccaagcctaaagcaagtcagaataaaaagggagggaaaagtaaagatgcaccttcatgggatcctgttgctctgaaactcccagagcggaatactccaagaaactctcattgccacctttccaacagccctagagcaatagagcacgcctatcaatatggaggaacagccaacagccgccaagagtttgaacacttaaaaggagattttggtgccaaatctcagttttccattcgtctgagaactcgttcctcccatggcatgatcttctatgtctcagatcaagaagagaatgacttcatgactctatttttggcccatggccgcttggtttacatgtttaatgttggtcacaaaaaactgaagattagaagccaggagaaatacaatgatggcctgtggcatgatgtgatatttattcgagaaaggagcagtggccgactggtaattgatggtctccgagtcctagaagaaagtcttcctcctactgaagctacctggaaaatcaagggtcccatttatttgggaggtgtggctcctggaaaggctgtgaaaaatgttcagattaactccatctacagttttagtggctgtctcagcaatctccagctcaatggggcctccatcacctctgcttctcagacattcagtgtgaccccttgctttgaaggccccatggaaacaggaacttacttttcaacagaaggaggatacgtggttctagatgaatctttcaatattggattgaagtttgaaattgcatttgaagtccgtcccagaagcagttccggaaccctggtccacggccacagtgtcaatggggagtacctaaatgttcacatgaaaaatggacaggtcatagtgaaagtcaataatggcatcagagatttttccacctcagttacacccaagcagagtctctgtgatggcagatggcacagaattacagttattagagattctaatgtggttcagttggatgtggactctgaagtgaaccatgtggttggacccctgaatccaaaaccaattgatcacagggagcctgtgtttgttggaggtgttccagaatctctactgacaccacgcttggcccccagcaaacccttcacaggctgcatacgccactttgtgattgatggacacccagtgagcttcagtaaagcagccctggtcagcggcgccgtaagcatcaactcctgtccagcagcctgacatgacagagcacagctgcccaaatacaaagttctttagagcactgaaagaaacacaaagccagccaggaggaacagtaactcttccttcgggtggaagctttcatcgagttgaacaggacttaaacgaatcatcagggaccggatatttcttatttctcatttggattcttaaccttgaatccaaagtgtctgcaatggacaacaattgaaggagtggcaaacttacttgtattgagagcacacgcaattcctactggtgaaattactgtttctgtttctaataaaatagaagggattccaaataaacacttgcacacatttttgaagtgcggctagattctcagattcacctttcttccagggaagataactttcaatctatataaaaatctctgtcctaaaactacctttctttattttgaagagacttactaacttacatataatctaaattagatgatagatttgtttttagcccttttgtttggtctatcagtataagaagaatattttaggtttatagctgaagttatcaaggtttaataaagtaaatttctaacagaatactagaaaaa

SEQ ID NO: 147425 - DNA, 1330 bp, Homo sapiens
  Payload ID: 9157
  Gene Symbol: LAMA4
  Gene Name: laminin, alpha 4
  ENST ID: ENST00000521398
  CDS Start-End: 336-1330
aatccgtctgccttttgatgccgtactgtaagctccgtccatctgtaggttcttgagccagaacctctgcgggaaggagaaaaagtgaaagagggagagggagagggagagagagggggagaaggggagagagagagagggagagagaggctggaactctcccttactctcgcactttccctttatttcctaagctgctggttgcgcagccacctcgggatactgcacacggagaggagggaaaataagcgaggcaccgccgcaccacgcgggagacctacggagacccacagcgcccgagccctggaagagcactactggatgtcagcggagaaatggctttgagctcagcctggcgctcggttctgcctctgtggctcctctggagcgctgcctgctcccgcgccgcgtccggggacgacaacgcttttccttttgacattgaagggagctcagcggttggcaggcaagacccgcctgagacgagcgaaccccgcgtggctctgggacgcctgccgcctgcggccgagaaatgcaatgctggattctttcacaccctgtcgggagaatgtgtgccctgcgactgtaatggcaattccaacgagtgtttggacggctcaggatactgtgtgcactgccagcggaacacaacaggagagcactgtgaaaagtgtctggatggttatatcggagattccatcaggggagcaccccaattctgccagccgtgcccctgtcccctgccccacttggccaattttgcagaatcctgctataggaaaaatggagctgttcggtgcatttgtaacgaaaattatgctggacctaactgtgaaagatgtgctcccggttactatggaaaccccttactcattggaagcacctgtaagaaatgtgactgcagtggaaattcagatcccaacctgatctttgaagattgtgatgaagtcactggccagtgtaggaattgcttacgcaacaccaccggattcaagtgtgaacgttgcgctcctggctactatggggacgccaggatagccaagaactgtgcagtgtgcaactgcgggggaggcccatgtgacagtgtaaccggagaatgcttggaagaaggttttgaaccccctacaggcatggactgcccaaccataagctgtgataagtgcgtctgggacctgactgatgacctgcggttagcagcgctctccatcgaggaaggcaaatccggggtgctgagcgtatcctctggggccgccgctcataggcacgtgaatgaaatcaacgccaccatctacctcctcaaaacaaaattgtcagaaagagaaaaccaata

SEQ ID NO: 147426 - DNA, 539 bp, Homo sapiens
  Payload ID: 9157
  Gene Symbol: LAMA4
  Gene Name: laminin, alpha 4
  ENST ID: ENST00000521690
  CDS Start-End: 296-539
gtctatcccccagaaaaaacccgagaaaccttgctcaagaaagtgggcaccctgaccctctgccttcagagatcatctacctttggttcctgccctggaatcccttttccacccactttcctgcaaactagcgggggccacataaaatatctatctgctggttgcgcagccacctcgggatactgcacacggagaggagggaaaataagcgaggcaccgccgcaccacgcgggagacctacggagacccacagcgcccgagccctggaagagcactactggatgtcagcggagaaatggctttgagctcagcctggcgctcggttctgcctctgtggctcctctggagcgctgcctgctcccgcgccgcgtccggggacgacaacgcttttccttttgacattgaagggagctcagcggttggcaggcaagacccgcctgagacgagcgaaccccgcgtggctctgggacgcctgccgcctgcggccgagaaatgcaatgctggattctttcacaccctgtcgggagaatgtgtgccct

SEQ ID NO: 147427 - DNA, 11426 bp, Homo sapiens
  Payload ID: 9158
  Gene Symbol: LAMA5
  Gene Name: laminin, alpha 5
  Uniprot ID: O15230
  ENST ID: ENST00000252999
  CDS Start-End: 68-11155
agacccgccgggctcccgccgcgcgcgctgtccctggagctcggggacgcggcccggagccgggaagatggcgaagcggctctgcgcggggagcgcactgtgtgttcgcggcccccggggccccgcgccgctgctgctggtcgggctggcgctgctgggcgcggcgcgggcgcgggaggaggcgggcggcggcttcagcctgcacccgccctacttcaacctggccgagggcgcccgcatcgccgcctccgcgacctgcggagaggaggccccggcgcgcggctccccgcgccccaccgaggacctttactgcaagctggtagggggccccgtggccggcggcgaccccaaccagaccatccggggccagtactgtgacatctgcacggctgccaacagcaacaaggcacaccccgcgagcaatgccatcgatggcacggagcgctggtggcagagtccaccgctgtcccgcggcctggagtacaacgaggtcaacgtcaccctggacctgggccaggtcttccacgtggcctacgtcctcatcaagtttgccaactcaccccggccggacctctgggtgctggagcggtccatggacttcggccgcacctaccagccctggcagttctttgcctcctccaagagggactgtctggagcggttcgggccacagacgctggagcgcatcacacgggacgacgcggccatctgcaccaccgagtactcacgcatcgtgcccctggagaacggagagatcgtggtgtccctggtgaacggacgtccgggcgccatgaatttctcctactcgccgctgctacgtgagttcaccaaggccaccaacgtccgcctgcgcttcctgcgtaccaacacgctgctgggccatctcatggggaaggcgctgcgggaccccacggtcacccgccggtattattacagcatcaaggatatcagcatcggaggccgctgtgtctgccacggccacgcggatgcctgcgatgccaaagaccccacggacccgttcaggctgcagtgcacctgccagcacaacacctgcgggggcacctgcgaccgctgctgccccggcttcaatcagcagccgtggaagcctgcgactgccaacagtgccaacgagtgccagtcctgtaactgctacggccatgccaccgactgttactacgaccctgaggtggaccggcgccgcgccagccagagcctggatggcacctatcagggtgggggtgtctgtatcgactgccagcaccacaccaccggcgtcaactgtgagcgctgcctgcccggcttctaccgctctcccaaccaccctctcgactcgccccacgtctgccgccgctgcaactgcgagtccgacttcacggatggcacctgcgaggacctgacgggtcgatgctactgccggcccaacttctctggggagcggtgtgacgtgtgtgccgagggcttcacgggcttcccaagctgctacccgacgccctcgtcctccaatgacaccagggagcaggtgctgccagccggccagattgtgaattgtgactgcagcgcggcagggacccagggcaacgcctgccggaaggacccaagggtgggacgctgtctgtgcaaacccaacttccaaggcacccattgtgagctctgcgcgccagggttctacggccccggctgccagccctgccagtgttccagccctggagtggccgatgaccgctgtgaccctgacacaggccagtgcaggtgccgagtgggcttcgagggggccacatgtgatcgctgtgcccccggctactttcacttccctctctgccagttgtgtggctgcagccctgcaggaaccttgcccgagggctgcgatgaggccggccgctgcctatgccagcctgagtttgctggacctcattgtgaccggtgccgccctggctaccatggtttccccaactgccaagcatgcacctgcgaccctcggggagccctggaccagctctgtggggcgggaggtttgtgccgctgccgccccggctacacaggcactgcctgccaggaatgcagccccggctttcacggcttccccagctgtgtcccctgccactgctctgctgaaggctccctgcacgcagcctgtgacccccggagtgggcagtgcagctgccggccccgtgtgacggggctgcggtgtgacacatgtgtgcccggtgcctacaacttcccctactgcgaagctggctcttgccaccctgccggtctggccccagtggatcctgcccttcctgaggcacaggttccctgtatgtgccgggctcacgtggaggggccgagctgtgaccgctgcaaacctgggttctggggactgagccccagcaaccccgagggctgtacccgctgcagctgcgacctcaggggcacactgggtggagttgctgagtgccagccgggcaccggccagtgcttctgcaagccccacgtgtgcggccaggcctgcgcgtcctgcaaggatggcttctttggactggatcaggctgactattttggctgccgcagctgccggtgtgacattggcggtgcactgggccagagctgtgaaccgaggacgggcgtctgccggtgccgccccaacacccagggccccacctgcagcgagcctgcgagggaccactacctcccggacctgcaccacctgcgcctggagctggaggaggctgccacacctgagggtcacgccgtgcgctttggcttcaaccccctcgagttcgagaacttcagctggaggggctacgcgcagatggcacctgtccagcccaggatcgtggccaggctgaacctgacctcccctgaccttttctggctcgtcttccgatacgtcaaccggggggccatgagtgtgagcgggcgggtctctgtgcgagaggagggcaggtcggccacctgcgccaactgcacagcacagagtcagcccgtggccttcccacccagcacggagcctgccttcatcaccgtgccccagaggggcttcggagagccctttgtgctgaaccctggcacctgggccctgcgtgtggaggccgaaggggtgctcctggactacgtggttctgctgcctagcgcatactacgaggcggcgctcctgcagctgcgggtgactgaggcctgcacataccgtccctctgcccagcagtctggcgacaactgcctcctctacacacacctccccctggatggcttcccctcggccgccgggctggaggccctgtgtcgccaggacaacagcctgccccggccctgccccacggagcagctcagcccgtcgcacccgccactgatcacctgcacgggcagtgatgtggacgtccagcttcaagtggcagtgccacagccaggccgctatgccctagtggtggagtacgccaatgaggatgcccgccaggaggtgggcgtggccgtgcacaccccacagcgggccccccagcaggggctgctctccctgcacccctgcctgtacagcaccctgtgccggggcactgcccgggatacccaggaccacctggctgtcttccacctggactcggaggccagcgtgaggctcacagccgaacaggcacgcttcttcctgcacggggtcactctggtgcccattgaggagttcagcccggagttcgtggagccccgggtcagctgcatcagcagccacggcgcctttggccccaacagtgccgcctgtctgccctcgcgcttcccaaagccgccccagcccatcatcctcagggactgccaggtgatcccgctgccgcccggcctcccgctgacccacgcgcaggatctcactccagccatgtccccagctggaccccgacctcggccccccaccgctgtggaccctgatgcagagcccaccctgctgcgtgagccccaggccaccgtggtcttcaccacccatgtgcccacgctgggccgctatgccttcctgctgcacggctaccagccagcccaccccaccttccccgtggaagtcctcatcaacgccggccgcgtgtggcagggccacgccaacgccagcttctgtccacatggctacggctgccgcaccctggtggtgtgtgagggccaggccctgctggacgtgacccacagcgagctcactgtgaccgtgcgtgtgcccaagggccggtggctctggctggattatgtactcgtggtccctgagaacgtctacagctttggctacctccgggaggagcccctggataaatcctatgacttcatcagccactgcgcagcccagggctaccacatcagccccagcagctcatccctgttctgccgaaacgctgctgcttccctctccctcttctataacaacggagcccgtccatgtggctgccacgaagtaggtgctacaggccccacgtgtgagcccttcgggggccagtgtccctgccatgcccatgtcattggccgtgactgctcccgctgtgccaccggatactggggcttccccaactgcaggccctgtgactgcggtgcccgcctctgtgacgagctcacgggccagtgcatctgcccgccacgcaccatcccgcccgactgcctgctgtgccagccccagacctttggctgccaccccctggtcggctgtgaggagtgtaactgctcagggcccggcatccaggagctcacagaccctacctgtgacacagacagcggccagtgcaagtgcagacccaacgtgactgggcgccgctgtgatacctgctctccgggcttccatggctacccccgctgccgcccctgtgactgtcacgaggcgggcactgcgcctggcgtgtgtgaccccctcacagggcagtgctactgtaaggagaacgtgcagggccccaaatgtgaccagtgcagccttgggaccttctcactggatgctgccaaccccaaaggttgcacccgctgcttctgctttggggccacggagcgctgccggagctcgtcctacacccgccaggagttcgtggatatggagggatgggtgctgctgagcactgaccggcaggtggtgccccacgagcggcagccagggacggagatgctccgtgcagacctgcggcacgtgcctgaggctgtgcccgaggctttccccgagctgtactggcaggccccaccctcctacctgggggaccgggtgtcatcctacggtgggaccctccgttatgaactgcactcagagacccagcggggagatgtctttgtccccatggagagcaggccggatgtggtgctgcagggcaaccagatgagcatcacattcctggagccggcataccccacgcctggccacgttcaccgtgggcagctgcagctggtggaggggaacttccggcatacggagacgcgcaacactgtgtcccgcgaggagctcatgatggtgctggccagcctggagcagctgcagatccgtgccctcttctcacagatctcctcggctgtcttcctgcgcagggtggcactggaggtggccagcccagcaggccagggggccctggccagcaatgtggagctgtgcctgtgccccgccagctaccggggggactcatgccaggaatgtgcccccggcttctatcgggacgtcaaaggtctcttcctgggccgatgtgtcccttgtcagtgccatggacactcagaccgctgcctccctggctctggcgtctgtgtggactgccagcacaacaccgaaggggcccactgtgagcgctgccaggctggcttcgtgagcagcagggacgaccccagcgccccctgtgtcagctgcccctgccccctctcagtgccttccaacaacttcgccgagggctgtgtcctgcgaggcggccgcacccagtgcctctgcaaacctggttatgcaggtgcctcctgcgagcggtgtgcgcccggattctttgggaacccactggtgctgggcagctcctgccagccatgcgactgcagcggcaacggtgaccccaacttgctcttcagcgactgcgaccccctgacgggcgcctgccgtggctgcctgcgccacaccactgggccccgctgcgagatctgtgcccccggcttctacggcaacgccctgctgcccggcaactgcacccggtgcgactgtaccccatgtgggacagaggcctgcgacccccacagcgggcactgcctgtgcaaggcgggcgtgactgggcggcgctgtgaccgctgccaggagggacattttggtttcgatggctgcgggggctgccgcccgtgtgcttgtggaccggccgccgagggctccgagtgccacccccagagcggacagtgccactgccgaccagggaccatgggaccccagtgccgcgagtgtgcccctggctactgggggctccctgagcagggctgcaggcgctgccagtgccctgggggccgctgtgaccctcacacgggccgctgcaactgccccccggggctcagcggggagcgctgcgacacctgcagccagcagcatcaggtgcctgttccaggcgggcctgtgggccacagcatccactgtgaagtgtgtgaccactgtgtggtcctgctcctggatgacctggaacgggccggcgccctcctccccgccattcacgagcaactgcgtggcatcaatgccagctccatggcctgggcccgtctgcacaggctgaacgcctccatcgctgacctgcagagccagctccggagccccctgggcccccgccatgagacggcacagcagctggaggtgctggagcagcagagcacaagcctcgggcaggacgcacggcggctaggcggccaggccgtggggacccgagaccaggcgagccaattgctggccggcaccgaggccacactgggccatgcgaagacgctgttggcggccatccgggctgtggaccgcaccctgagcgagctcatgtcccagacgggccacctggggctggccaatgcctcggctccatcaggtgagcagctgctccggacactggccgaggtggagcggctgctctgggagatgcgggcccgggacctgggggccccgcaggcagcagctgaggctgagttggctgcagcacagagattgctggcccgggtgcaggagcagctgagcagcctctgggaggagaaccaggcactggccacacaaacccgcgaccggctggcccagcacgaggccggcctcatggacctgcgagaggctttgaaccgggcagtggacgccacacgggaggcccaggagctcaacagccgcaaccaggagcgcctggaggaagccctgcaaaggaagcaggagctgtcccgggacaatgccaccctgcaggccactctgcatgcggctagggacaccctggccagcgtcttcagattgctgcacagcctggaccaggctaaggaggagctggagcgcctcgccgccagcctggatggggctcggaccccactgctgcagaggatgcagaccttctccccggcgggcagcaagctgcgtctagtggaggccgccgaggcccacgcacagcagctgggccagctggcactcaatctgtccagcatcatcctggacgtcaaccaggaccgcctcacccagagggccatcgaggcctccaacgcctacagccgcatcctgcaggccgtgcaggctgccgaggatgctgctggccaggccctgcagcaggcggaccacacgtgggcgacggtggtgcggcagggcctggtggaccgagcccagcagctcctggccaacagcactgcactagaagaggccatgctccaggaacagcagaggctgggccttgtgtgggctgccctccagggtgccaggacccagctccgagatgtccgggccaagaaggaccagctggaggcgcacatccaggcggcgcaggccatgcttgccatggacacagacgagacaagcaagaagatcgcacatgccaaggctgtggctgctgaagcccaggacaccgccacccgtgtgcagtcccagctgcaggccatgcaggagaatgtggagcggtggcagggccagtacgagggcctgcggggccaggacctgggccaggcagtgcttgacgcaggccactcagtgtccaccctggagaagacgctgccccagctgctggccaagctgagcatcctggagaaccgtggggtgcacaacgccagcctggccctgtccgccagcattggccgcgtgcgagagctcattgcccaggcccggggggctgccagtaaggtcaaggtgcccatgaagttcaacgggcgctcaggggtgcagctgcgcaccccacgggatcttgccgaccttgctgcctacactgccctcaagttctacctgcagggcccagagcctgagcctgggcagggtaccgaggatcgctttgtgatgtacatgggcagccgccaggccactggggactacatgggtgtgtctctgcgtgacaagaaggtgcactgggtgtatcagctgggtgaggcgggccctgcagtcctaagcatcgatgaggacattggggagcagttcgcagctgtcagcctggacaggactctccagtttggccacatgtccgtcacagtggagagacagatgatccaggaaaccaagggtgacacggtggcccctggggcagaggggctgctcaacctgcggccagacgacttcgtcttctacgtcggggggtaccccagtaccttcacgccccctcccctgcttcgcttccccggctaccggggctgcatcgagatggacacgctgaatgaggaggtggtcagcctctacaacttcgagaggaccttccagctggacacggctgtggacaggccttgtgcccgctccaagtcgaccggggacccgtggctcacggacggctcctacctggacggcaccggcttcgcccgcatcagcttcgacagtcagatcagcaccaccaagcgcttcgagcaggagctgcggctcgtgtcctacagcggggtgctcttcttcctgaagcagcagagccagttcctgtgcttggccgtgcaagaaggcagcctcgtgctgttgtatgactttggggctggcctgaaaaaggccgtcccactgcagcccccaccgcccctgacctcggccagcaaggcgatccaggtgttcctgctggggggcagccgcaagcgtgtgctggtgcgtgtggagcgggccacggtgtacagcgtggagcaggacaatgatctggagctggccgacgcctactacctggggggcgtgccgcccgaccagctgcccccgagcctgcgacggctcttccccaccggaggctcagtccgtggctgcgtcaaaggcatcaaggccctgggcaagtatgtggacctcaagcggctgaacacgacaggcgtgagcgccggctgcaccgccgacctgctggtggggcgcgccatgactttccatggccacggcttccttcgcctggcgctctcgaacgtggcaccgctcactggcaacgtctactccggcttcggcttccacagcgcccaggacagtgccctgctctactaccgggcgtccccggatgggctatgccaggtgtccctgcagcagggccgtgtgagcctacagctcctgaggactgaagtgaaaactcaagcgggcttcgccgatggtgccccccattacgtcgccttctacagcaatgccacgggagtctggctgtatgtcgatgaccagctccagcagatgaagccccaccggggaccaccccccgagctccagccgcagcctgaggggcccccgaggctcctcctgggaggcctgcctgagtctggcaccatttacaacttcagtggctgcatcagcaacgtcttcgtgcagcggctcctgggcccacagcgcgtatttgatctgcagcagaacctgggcagcgtcaatgtgagcacgggctgtgcacccgccctgcaagcccagaccccgggcctggggcctagaggactgcaggccaccgcccggaaggcctcccgccgcagccgtcagcccgcccggcatcctgcctgcatgctgcccccacacctcaggaccacccgagactcctaccagtttgggggttccctgtccagtcacctggagtttgtgggcatcctggcccgacataggaactggcccagtctctccatgcacgtcctcccgcgaagctcccgaggcctcctcctcttcactgcccgtctgaggcccggcagcccctccctggcgctcttcctgagcaatggccacttcgttgcacagatggaaggcctcgggactcggctccgcgcccagagccgccagcgctcccggcctggccgctggcacaaggtctccgtgcgctgggagaagaaccggatcctgctggtgacggacggggcccgggcctggagccaggaggggccgcaccggcagcaccagggggcagagcacccccagccccacaccctctttgtgggcggcctcccggccagcagccacagctccaaacttccggtgaccgtcgggttcagcggctgtgtgaagagactgaggctgcacgggaggcccctgggggcccccacacggatggcaggggtcacaccctgcatcttgggccccctggaggcgggcctgttcttcccaggcagcgggggagttatcactttagacctcccaggagctacactgcctgatgtgggcctggaactggaggtgcggcccctggcagtcaccggactgatcttccacttgggccaggcccggacgcccccctacttgcagttgcaggtgaccgagaagcaagtcctgctgcgggcggatgacggagcaggggagttctccacgtcagtgacccgcccctcagtgctgtgtgatggccagtggcaccggctagcggtgatgaaaagcgggaatgtgctccggctggaggtggacgcgcagagcaaccacaccgtgggccccttgctggcggctgcagctggtgccccagcccctctgtacctcgggggcctgcctgagcccatggccgtgcagccctggccccccgcctactgcggctgcatgaggaggctggcggtgaaccggtcccccgtcgccatgactcgctctgtggaggtccacggggcagtgggggccagtggctgcccagccgcctaggacacagccaaccccggcccctggtcaggcccctgcagctgcctcacaccgccccttgtgctcgcctcataggtgtctatttggactctaagctctacgggtgacagatcttgtttctgaagatggtttaagttatagcttcttaaacgaaagaataaaatactgcaaaatgtttttatatttggcccttccacccatttttaattgtgagagatttgtcaccaatcatcactggttcctccttaaaaattaaaaagtaacttctgtgtaa

SEQ ID NO: 147428 - DNA, 579 bp, Homo sapiens
  Payload ID: 9158
  Gene Symbol: LAMA5
  Gene Name: laminin, alpha 5
  ENST ID: ENST00000474128
  CDS Start-End: 1-117
tgtgtgcccggtgcctacaacttcccctactgcgaaggtgctgtgtggtgggatggcacgtccgttgctgcggagggagcagggaggtgcgtgttttcaggccgtccatgtggatgagagctggctcttgccaccctgccggtctggccccagtggatcctgcccttcctgaggcacaggttccctgtatgtgccgggctcacgtggaggggccgagctgtgaccgctgcaaacctgggttctggggactgagccccagcaaccccgagggctgtacccgctgcagctgcgacctcaggggcacactgggtggagttgctgagtgccagccgggcaccggccagtgcttctgcaagccccacgtgtgcggccaggcctgcgcgtcctgcaaggatggcttctttggactggatcaggctgactattttggctgccgcagctgccggtgtgacattggcggtgcactgggccagagctgtgaaccgaggacgggcgtctgccggtgccgccccaacacccagggccccacctgcagcgagcctgcgagggaccactacctcccggacctgcaccacctgc

SEQ ID NO: 147429 - DNA, 723 bp, Homo sapiens
  Payload ID: 9158
  Gene Symbol: LAMA5
  Gene Name: laminin, alpha 5
  ENST ID: ENST00000497053
  CDS Start-End: 1-723
cgcctgcgcttcctgcgtaccaacacgctgctgggccatctcatggggaaggcgctgcgggaccccacggtcacccgccggtattattacagcatcaaggatatcagcatcggaggccgctgtgtctgccacggccacgcggatgcctgcgatgccaaagaccccacggacccgttcagctcccccaacctttcaggacacaacagacaacttccctgctgccccagccctgaccttcactccagtcaagcagggaccaaggcccaggacggggatggcagggtgggggcagccaacaccccacatctgctgtgccctgtgtgcctgctttcgggggcagccgagggcactgcagagcatccacctcccgggagcccctcacaggatgggcagcagccctggtgctggcaccggcacattcctgggcctcacccagagtcctcagtaaggctgcagtgcacctgccagcacaacacctgcgggggcacctgcgaccgctgctgccccggcttcaatcagcagccgtggaagcctgcgactgccaacagtgccaacgagtgccagtcctgtaactgctacggccatgccaccgactgttactacgaccctgaggtggaccggcgccgcgccagccagagcctggatggcacctatcagggtgggggtgtctgtatcgactgccagcaccacaccaccggcgtcaactgtgagcgctgcctgccc

SEQ ID NO: 147430 - DNA, 5725 bp, Homo sapiens
  Payload ID: 9159
  Gene Symbol: LAMB1
  Gene Name: laminin, beta 1
  Uniprot ID: P07942
  ENST ID: ENST00000222399
  CDS Start-End: 232-5592
ttgcggccgcccgccccttcagccccggctctccgtatgcgcatgagcagaggcgcctccctctgttcctcccaaggctaaactttctaattcccttctttgggctcgggggctcccggagcagggcgagagctcgcgtcgccggaaaggaagacgggaagaaagggcaggcggctcggcgggcgtcttctccactcctctgccgcgtccccgtggctgcagggagccggcatggggcttctccagttgctagctttcagtttcttagccctgtgcagagcccgagtgcgcgctcaggaacccgagttcagctacggctgcgcagaaggcagctgctatcccgccacgggcgaccttctcatcggccgagcacagaagctttcggtgacctcgacgtgcgggctgcacaagcccgaaccctactgtatcgtcagccacttgcaggaggacaaaaaatgcttcatatgcaattcccaagatccttatcatgagaccctgaatcctgacagccatctcattgaaaatgtggtcactacatttgctccaaaccgccttaagatttggtggcaatctgaaaatggtgtggaaaatgtaactatccaactggatttggaagcagaattccattttactcatctcataatgactttcaagacattccgtccagctgctatgctgatagaacgatcgtccgactttgggaaaacctggggtgtgtatagatacttcgcctatgactgtgaggcctcgtttccaggcatttcaactggccccatgaaaaaagtcgatgacataatttgtgattctcgatattctgacattgaaccctcaactgaaggagaggtgatatttcgtgctttagatcctgctttcaaaatagaagatccttatagcccaaggatacagaatttattaaaaattaccaacttgagaatcaagtttgtgaaactgcatactttgggagataaccttctggattccaggatggaaatcagagaaaagtattattatgcagtttatgatatggtggttcgaggaaattgcttctgctatggtcatgccagcgaatgtgcccctgtggatggattcaatgaagaagtggaaggaatggttcacggacactgcatgtgcaggcataacaccaagggcttaaactgtgaactctgcatggatttctaccatgatttaccttggagacctgctgaaggccgaaacagcaacgcctgtaaaaaatgtaactgcaatgaacattccatctcttgtcactttgacatggctgtttacctggccacggggaacgtcagcggaggcgtgtgtgatgactgtcagcacaacaccatggggcgcaactgtgagcagtgcaagccgttttactaccagcacccagagagggacatccgagatcctaatttctgtgaacgatgtacgtgtgacccagctggctctcaaaatgagggaatttgtgacagctatactgatttttctactggtctcattgctggccagtgtcggtgtaaattaaatgtggaaggagaacattgtgatgtttgcaaagaaggcttctatgatttaagcagtgaagatccatttggttgtaaatcttgtgcttgcaatcctctgggaacaattcctggagggaatccttgtgattccgagacaggtcactgctactgcaagcgtctggtgacaggacagcattgtgaccagtgcctgccagagcactggggcttaagcaatgatttggatggatgtcgaccatgtgactgtgaccttgggggagccttaaacaacagttgctttgcggagtcaggccagtgctcatgccggcctcacatgattggacgtcagtgcaacgaagtggaacctggttactactttgccaccctggatcactacctctatgaagcggaggaagccaacttggggcctggggttagcatagtggagcggcaatatatccaggaccggattccctcctggactggagccggcttcgtccgagtgcctgaaggggcttatttggagtttttcattgacaacataccatattccatggagtacgacatcctaattcgctacgagccacagctacccgaccactgggaaaaagctgtcatcacagtgcagcgacctggaaggattccaaccagcagccgatgtggtaataccatccccgatgatgacaaccaggtggtgtcattatcaccaggctcaagatatgtcgtccttcctcggccggtgtgctttgagaagggaacaaactacacggtgaggttggagctgcctcagtacacctcctctgatagcgacgtggagagcccctacacgctgatcgattctcttgttctcatgccatactgtaaatcactggacatcttcaccgtgggaggttcaggagatggggtggtcaccaacagtgcctgggaaacctttcagagataccgatgtctagagaacagcagaagcgttgtgaaaacaccgatgacagatgtttgcagaaacatcatctttagcatttctgccctgttacaccagacaggcctggcttgtgaatgcgaccctcagggttcgttaagttccgtgtgtgatcccaacggaggccagtgccagtgccggcccaacgtggttggaagaacctgcaacagatgtgcacctggaacttttggctttggccccagtggatgcaaaccttgtgagtgccatctgcaaggatctgtcaatgccttctgcaatcccgtcactggccagtgccactgtttccagggagtgtatgctcggcagtgtgatcggtgcttacctgggcactggggctttccaagttgccagccctgccagtgcaatggccacgccgatgactgcgacccagtgactggggagtgcttgaactgccaggactacaccatgggtcataactgtgaaaggtgcttggctggttactatggcgaccccatcattgggtcaggagatcactgccgcccttgcccttgcccagatggtcccgacagtggacgccagtttgccaggagctgctaccaagatcctgttactttacagcttgcctgtgtttgtgatcctggatacattggttccagatgtgacgactgtgcctcaggatactttggcaatccatcagaagttggggggtcgtgtcagccttgccagtgtcacaacaacattgacacgacagacccagaagcctgtgacaaggagactgggaggtgtctcaagtgcctgtaccacacggaaggggaacactgtcagttctgccggtttggatactatggtgatgccctccagcaggactgtcgaaagtgtgtctgtaattacctgggcaccgtgcaagagcactgtaacggctctgactgccagtgcgacaaagccactggtcagtgcttgtgtcttcctaatgtgatcgggcagaactgtgaccgctgtgcgcccaatacctggcagctggccagtggcactggctgtgacccatgcaactgcaatgctgctcattccttcgggccatcttgcaatgagttcacggggcagtgccagtgcatgcctgggtttggaggccgcacctgcagcgagtgccaggaactcttctggggagaccccgacgtggagtgccgagcctgtgactgtgaccccaggggcattgagacgccacagtgtgaccagtccacgggccagtgtgtctgcgttgagggtgttgagggtccacgctgtgacaagtgcacgcgagggtactcgggggtcttccctgactgcacaccctgccaccagtgctttgctctctgggatgtgatcattgccgagctgaccaacaggacacacagattcctggagaaagccaaggccttgaagatcagtggtgtgatcgggccttaccgtgagactgtggactcggtggagaggaaagtcagcgagataaaagacatcctggcgcagagccccgcagcagagccactgaaaaacattgggaatctctttgaggaagcagagaaactgattaaagatgttacagaaatgatggctcaagtagaagtgaaattatctgacacaacttcccaaagcaacagcacagccaaagaactggattctctacagacagaagccgaaagcctagacaacactgtgaaagaacttgctgaacaactggaatttatcaaaaactcagatattcggggtgccttggatagcattaccaagtatttccagatgtctcttgaggcagaggagagggtgaatgcctccaccacagaacccaacagcactgtggagcagtcagccctcatgagagacagagtagaagacgtgatgatggagcgagaatcccagttcaaggaaaaacaagaggagcaggctcgcctccttgatgaactggcaggcaagctacaaagcctagacctttcagccgctgccgaaatgacctgtggaacacccccaggggcctcctgttccgagactgaatgtggcgggccaaactgcagaactgacgaaggagagaggaagtgtggggggcctggctgtggtggtctggttactgttgcacacaacgcctggcagaaagccatggacttggaccaagatgtcctgagtgccctggctgaagtggaacagctctccaagatggtctctgaagcaaaactgagggcagatgaggcaaaacaaagtgctgaagacattctgttgaagacaaatgctaccaaagaaaaaatggacaagagcaatgaggagctgagaaatctaatcaagcaaatcagaaactttttgacccaggatagtgctgatttggacagcattgaagcagttgctaatgaagtattgaaaatggagatgcctagcaccccacagcagttacagaacttgacagaagatatacgtgaacgagttgaaagcctttctcaagtagaggttattcttcagcatagtgctgctgacattgccagagctgagatgttgttagaagaagctaaaagagcaagcaaaagtgcaacagatgttaaagtcactgcagatatggtaaaggaagctctggaagaagcagaaaaggcccaggtcgcagcagagaaggcaattaaacaagcagatgaagacattcaaggaacccagaacctgttaacttcgattgagtctgaaacagcagcttctgaggaaaccttgttcaacgcgtcccagcgcatcagcgagttagagaggaatgtggaagaacttaagcggaaagctgcccaaaactccggggaggcagaatatattgaaaaagtagtatatactgtgaagcaaagtgcagaagatgttaagaagactttagatggtgaacttgatgaaaagtataaaaaagtagaaaatttaattgccaaaaaaactgaagagtcagctgatgccagaaggaaagccgaaatgctacaaaatgaagcaaaaactcttttagctcaagcaaatagcaagctgcaactgctcaaagatttagaaagaaaatatgaagacaatcaaagatacttagaagataaagctcaagaattagcaagactggaaggagaagtccgttcactcctaaaggatataagccagaaagttgctgtgtatagcacatgcttgtaacagaggagaataaaaaatggctgaggtgaacaaggtaaaacaactacattttaaaaactgacttaatgctcttcaaaataaaacatcacctatttaatgtttttaatcacattttgtatggagttaaataaag

SEQ ID NO: 147431 - DNA, 550 bp, Homo sapiens
  Payload ID: 9159
  Gene Symbol: LAMB1
  Gene Name: laminin, beta 1
  ENST ID: ENST00000393559
  CDS Start-End: 276-550
ttctttgggctcgggggctcccggagcagggcgagagctcgcgtcgccgggtgaggagaacaaagtggctgcacgattttccccactttccagcccaccccccgcttccgtgggagcgacaggaaatggaagggcgcctcttctctctttgaacatttgccttttttcccctcctttccacctctccagaaaggaagacgggaagaaagggcaggcggctcggcgggcgtcttctccactcctctgccgcgtccccgtggctgcagggagccggcatggggcttctccagttgctagctttcagtttcttagccctgtgcagagcccgagtgcgcgctcaggaacccgagttcagctacggctgcgcagaaggcagctgctatcccgccacgggcgaccttctcatcggccgagcacagaagctttcggtgacctcgacgtgcgggctgcacaagcccgaaccctactgtatcgtcagccacttgcaggaggacaaaaaatgcttcatatgcaattcccaagatccttatcatgagaccctgaatcctga

SEQ ID NO: 147432 - DNA, 2806 bp, Homo sapiens
  Payload ID: 9159
  Gene Symbol: LAMB1
  Gene Name: laminin, beta 1
  ENST ID: ENST00000393560
  CDS Start-End: 164-2716
ctcccaaggctaaactttctaattcccttctttgggctcgggggctcccggagcagggcgagagctcgcgtcgccggaaaggaagacgggaagaaagggcaggcggctcggcgggcgtcttctccactcctctgccgcgtccccgtggctgcagggagccggcatggggcttctccagttgctagctttcagtttcttagccctgtgcagagcccgagtgcgcgctcaggaacccgagttcagctacggctgcgcagaaggcagctgctatcccgccacgggcgaccttctcatcggccgagcacagaagctttcggtgacctcgacgtgcgggctgcacaagcccgaaccctactgtatcgtcagccacttgcaggaggacaaaaaatgcttcatatgcaattcccaagatccttatcatgagaccctgaatcctgacagccatctcattgaaaatgtggtcactacatttgctccaaaccgccttaagatttggtggcaatctgaaaatggtgtggaaaatgtaactatccaactggatttggaagcagaattccattttactcatctcataatgactttcaagacattccgtccagctgctatgctgatagaacgatcgtccgactttgggaaaacctggggtgtgtatagatacttcgcctatgactgtgaggcctcgtttccaggcatttcaactggccccatgaaaaaagtcgatgacataatttgtgattctcgatattctgacattgaaccctcaactgaaggagaggtgatatttcgtgctttagatcctgctttcaaaatagaagatccttatagcccaaggatacagaatttattaaaaattaccaacttgagaatcaagtttgtgaaactgcatactttgggagataaccttctggattccaggatggaaatcagagaaaagtattattatgcagtttatgatatggtggttcgaggaaattgcttctgctatggtcatgccagcgaatgtgcccctgtggatggattcaatgaagaagtggaaggaatggttcacggacactgcatgtgcaggcataacaccaagggcttaaactgtgaactctgcatggatttctaccatgatttaccttggagacctgctgaaggccgaaacagcaacgcctgtaaaaaatgtaactgcaatgaacattccatctcttgtcactttgacatggctgtttacctggccacggggaacgtcagcggaggcgtgtgtgatgactgtcagcacaacaccatggggcgcaactgtgagcagtgcaagccgttttactaccagcacccagagagggacatccgagatcctaatttctgtgaacgatgtacgtgtgacccagctggctctcaaaatgagggaatttgtgacagctatactgatttttctactggtctcattgctggccagtgtcggtgtaaattaaatgtggaaggagaacattgtgatgtttgcaaagaaggcttctatgatttaagcagtgaagatccatttggttgtaaatcttgtgcttgcaatcctctgggaacaattcctggagggaatccttgtgattccgagacaggtcactgctactgcaagcgtctggtgacaggacagcattgtgaccagtgcctgccagagcactggggcttaagcaatgatttggatggatgtcgaccatgtgactgtgaccttgggggagccttaaacaacagttgctttgcggagtcaggccagtgctcatgccggcctcacatgattggacgtcagtgcaacgaagtggaacctggttactactttgccaccctggatcactacctctatgaagcggaggaagccaacttggggcctggggttagcatagtggagcggcaatatatccaggaccggattccctcctggactggagccggcttcgtccgagtgcctgaaggggcttatttggagtttttcattgacaacataccatattccatggagtacgacatcctaattcgctacgagccacagctacccgaccactgggaaaaagctgtcatcacagtgcagcgacctggaaggattccaaccagcagccgatgtggtaataccatccccgatgatgacaaccaggtggtgtcattatcaccaggctcaagatatgtcgtccttcctcggccggtgtgctttgagaagggaacaaactacacggtgaggttggagctgcctcagtacacctcctctgatagcgacgtggagagcccctacacgctgatcgattctcttgttctcatgccatactgtaaatcactggacatcttcaccgtgggaggttcaggagatggggtggtcaccaacagtgcctgggaaacctttcagagataccgatgtctagagaacagcagaagcgttgtgaaaacaccgatgacagatgtttgcagaaacatcatctttagcatttctgccctgttacaccagacaggcctggcttgtgaatgcgaccctcagggttcgttaagttccgtgtgtgatcccaacggaggccagtgccagtgccggcccaacgtggttggaagaacctgcaacagatgtgcacctggaacttttggctttggccccagtggatgcaaacgtaggttcctcaaaagcattgttatgcattcattcagattaactcagccattgtggcagggttccattgctgcagagccgatgcttccctcctgaagttgatcacaccaacccatgagcattctgaattggggacagggtgcttataaaaggagcatgtttccattgaatgagtttctcaaggca

SEQ ID NO: 147433 - DNA, 5766 bp, Homo sapiens
  Payload ID: 9159
  Gene Symbol: LAMB1
  Gene Name: laminin, beta 1
  ENST ID: ENST00000393561
  CDS Start-End: 186-5618
ggggctgatcagggtgggcgcgagcgtcggtgggtttcccgggagggaggctctcgctgctggacagacctgatgacgtgtgtgggtttctttccgtgtccttctcctttcggagtccctgccttcccagcctctcctgcgctcatctctccattgtcttttctgtgcattttgctttcttccgaatggactgtcctctctccgcacccactcccccgcccccgcttgttcgtttttttcgggctccactccctgcttgtgtccccccaactctgttgcctgtccttcccgcagccctgtgcagagcccgagtgcgcgctcaggaacccgagttcagctacggctgcgcagaaggcagctgctatcccgccacgggcgaccttctcatcggccgagcacagaagctttcggtgacctcgacgtgcgggctgcacaagcccgaaccctactgtatcgtcagccacttgcaggaggacaaaaaatgcttcatatgcaattcccaagatccttatcatgagaccctgaatcctgacagccatctcattgaaaatgtggtcactacatttgctccaaaccgccttaagatttggtggcaatctgaaaatggtgtggaaaatgtaactatccaactggatttggaagcagaattccattttactcatctcataatgactttcaagacattccgtccagctgctatgctgatagaacgatcgtccgactttgggaaaacctggggtgtgtatagatacttcgcctatgactgtgaggcctcgtttccaggcatttcaactggccccatgaaaaaagtcgatgacataatttgtgattctcgatattctgacattgaaccctcaactgaaggagaggtgatatttcgtgctttagatcctgctttcaaaatagaagatccttatagcccaaggatacagaatttattaaaaattaccaacttgagaatcaagtttgtgaaactgcatactttgggagataaccttctggattccaggatggaaatcagagaaaagtattattatgcagtttatgatatggtggttcgaggaaattgcttctgctatggtcatgccagcgaatgtgcccctgtggatggattcaatgaagaagtggaaggaatggttcacggacactgcatgtgcaggcataacaccaagggcttaaactgtgaactctgcatggatttctaccatgatttaccttggagacctgctgaaggccgaaacagcaacgcctgtaaaaaatgtaactgcaatgaacattccatctcttgtcactttgacatggctgtttacctggccacggggaacgtcagcggaggcgtgtgtgatgactgtcagcacaacaccatggggcgcaactgtgagcagtgcaagccgttttactaccagcacccagagagggacatccgagatcctaatttctgtgaacgatgtacgtgtgacccagctggctctcaaaatgagggaatttgtgacagctatactgatttttctactggtctcattgctggccagtgtcggtgtaaattaaatgtggaaggagaacattgtgatgtttgcaaagaaggcttctatgatttaagcagtgaagatccatttggttgtaaatcttgtgcttgcaatcctctgggaacaattcctggagggaatccttgtgattccgagacaggtcactgctactgcaagcgtctggtgacaggacagcattgtgaccagtgcctgccagagcactggggcttaagcaatgatttggatggatgtcgaccatgtgactgtgaccttgggggagccttaaacaacagttgctttgcggagtcaggccagtgctcatgccggcctcacatgattggacgtcagtgcaacgaagtggaacctggttactactttgccaccctggatcactacctctatgaagcggaggaagccaacttggggcctggggttagcatagtggagcggcaatatatccaggaccggattccctcctggactggagccggcttcgtccgagtgcctgaaggggcttatttggagtttttcattgacaacataccatattccatggagtacgacatcctaattcgctacgagccacagctacccgaccactgggaaaaagctgtcatcacagtgcagcgacctggaaggattccaaccagcagccgatgtggtaataccatccccgatgatgacaaccaggtggtgtcattatcaccaggctcaagatatgtcgtccttcctcggccggtgtgctttgagaagggaacaaactacacggtgaggttggagctgcctcagtacacctcctctgatagcgacgtggagagcccctacacgctgatcgattctcttgttctcatgccatactgtaaatcactggacatcttcaccgtgggaggttcaggagatggggtggtcaccaacagtgcctgggaaacctttcagagataccgatgtctagagaacagcagaagcgttgtgaaaacaccgatgacagatgtttgcagaaacatcatctttagcatttctgccctgttacaccagacaggcctggcttgtgaatgcgaccctcagggttcgttaagttccgtgtgtgatcccaacggaggccagtgccagtgccggcccaacgtggttggaagaacctgcaacagatgtgcacctggaacttttggctttggccccagtggatgcaaaccttgtgagtgccatctgcaaggatctgtcaatgccttctgcaatcccgtcactggccagtgccactgtttccagggagtgtatgctcggcagtgtgatcggtgcttacctgggcactggggctttccaagttgccagccctgccagtgcaatggccacgccgatgactgcgacccagtgactggggagtgcttgaactgccaggactacaccatgggtcataactgtgaaaggtgcttggctggttactatggcgaccccatcattgggtcaggagatcactgccgcccttgcccttgcccagatggtcccgacagtggacgccagtttgccaggagctgctaccaagatcctgttactttacagcttgcctgtgtttgtgatcctggatacattggttccagatgtgacgactgtgcctcaggatactttggcaatccatcagaagttggggggtcgtgtcagccttgccagtgtcacaacaacattgacacgacagacccagaagcctgtgacaaggagactgggaggtgtctcaagtgcctgtaccacacggaaggggaacactgtcagttctgccggtttggatactatggtgatgccctccagcaggactgtcgaaagtgtgtctgtaattacctgggcaccgtgcaagagcactgtaacggctctgactgccagtgcgacaaagccactggtcagtgcttgtgtcttcctaatgtgatcgggcagaactgtgaccgctgtgcgcccaatacctggcagctggccagtggcactggctgtgacccatgcaactgcaatgctgctcattccttcgggccatcttgcaatgagttcacggggcagtgccagtgcatgcctgggtttggaggccgcacctgcagcgagtgccaggaactcttctggggagaccccgacgtggagtgccgagcctgtgactgtgaccccaggggcattgagacgccacagtgtgaccagtccacgggccagtgtgtctgcgttgagggtgttgagggtccacgctgtgacaagtgcacgcgagggtactcgggggtcttccctgactgcacaccctgccaccagtgctttgctctctgggatgtgatcattgccgagctgaccaacaggacacacagattcctggagaaagccaaggccttgaagatcagtggtgtgatcgggccttaccgtgagactgtggactcggtggagaggaaagtcagcgagataaaagacatcctggcgcagagccccgcagcagagccactgaaaaacattgggaatctctttgaggaagcagagaaactgattaaagatgttacagaaatgatggctcaagtagaagtgaaattatctgacacaacttcccaaagcaacagcacagccaaagaactggattctctacagacagaagccgaaagcctagacaacactgtgaaagaacttgctgaacaactggaatttatcaaaaactcagatattcggggtgccttggatagcattaccaagtatttccagatgtctcttgaggcagaggagagggtgaatgcctccaccacagaacccaacagcactgtggagcagtcagccctcatgagagacagagtagaagacgtgatgatggagcgagaatcccagttcaaggaaaaacaagaggagcaggctcgcctccttgatgaactggcaggcaagctacaaagcctagacctttcagccgctgccgaaatgacctgtggaacacccccaggggcctcctgttccgagactgaatgtggcgggccaaactgcagaactgacgaaggagagaggaagtgtggggggcctggctgtggtggtctggttactgttgcacacaacgcctggcagaaagccatggacttggaccaagatgtcctgagtgccctggctgaagtggaacagctctccaagatggtctctgaagcaaaactgagggcagatgaggcaaaacaaagtgctgaagacattctgttgaagacaaatgctaccaaagaaaaaatggacaagagcaatgaggagctgagaaatctaatcaagcaaatcagaaactttttgacccaggatagtgctgatttggacagcattgaagcagttgctaatgaagtattgaaaatggagatgcctagcaccccacagcagttacagaacttgacagaagatatacgtgaacgagttgaaagcctttctcaagtagaggttattcttcagcatagtgctgctgacattgccagagctgagatgttgttagaagaagctaaaagagcaagcaaaagtgcaacagatgttaaagtcactgcagatatggtaaaggaagctctggaagaagcagaaaaggcccaggtcgcagcagagaaggcaattaaacaagcagatgaagacattcaaggaacccagaacctgttaacttcgattgagtctgaaacagcagcttctgaggaaaccttgttcaacgcgtcccagcgcatcagcgagttagagaggaatgtggaagaacttaagcggaaagctgcccaaaactccggggaggcagaatatattgaaaaagtagtatatactgtgaagcaaagtgcagaagatgttaagaagactttagatggtgaacttgatgaaaagtataaaaaagtagaaaatttaattgccaaaaaaactgaagagtcagctgatgccagaaggaaagccgaaatgctacaaaatgaagcaaaaactcttttagctcaagcaaatagcaagctgcaactgctcaaagatttagaaagaaaatatgaagacaatcaaagatacttagaagataaagctcaagaattagcaagactggaaggagaagtccgttcactcctaaaggatataagccagaaagttgctgtgtatagcacatgcttgtaacagaggagaataaaaaatggctgaggtgaacaaggtaaaacaactacattttaaaaactgacttaatgctcttcaaaataaaacatcacctatttaatgtttttaatcacattttgtatggagttaaataaagtacagtgcttttgta

SEQ ID NO: 147434 - DNA, 703 bp, Homo sapiens
  Payload ID: 9159
  Gene Symbol: LAMB1
  Gene Name: laminin, beta 1
  ENST ID: ENST00000439976
  CDS Start-End: 153-703
aaactttctaattcccttctttgggctcgggggctcccggagcagggcgagagctcgcgtcgccggaaaggaagacgggaagaaagggcaggcggctcggcgggcgtcttctccactcctctgccgcgtccccgtggctgcagggagccggcatggggcttctccagttgctagctttcagtttcttagaaacagcaggacctggcgcttccctggaatggagaagccttgaaaccactccagagccccagggactgtccatgggctcccctagctccggaaagcggcgtccaccgcgagccccggcgcctcgtccccagcgaagcgccggtgaccctcgcgcgtgcacgcacacgcactctcgcttcccaagctcacagatctccacgcgcacactcacaccgaggatgcgcgggctgccgcgtgcacgcgggttcacgtgcgtggccctgtgcagagcccgagtgcgcgctcaggaacccgagttcagctacggctgcgcagaaggcagctgctatcccgccacgggcgaccttctcatcggccgagcacagaagctttcggtgacctcgacgtgcgggctgcacaagcccgaaccctactgtatcgtcagccacttgcaggaggacaaaaaatgcttcatatgcaattcccaagatccttatcatgagaccctgaatcctgacagccatctcattgaaaa

SEQ ID NO: 147435 - DNA, 5643 bp, Homo sapiens
  Payload ID: 9160
  Gene Symbol: LAMB2
  Gene Name: laminin, beta 2 (laminin S)
  Uniprot ID: P55268
  ENST ID: ENST00000305544
  CDS Start-End: 154-5550
agggaccgctggacagacctgggaactgacagagggcctggagggaaacaggccaaagacccacaggcagagttgacacggaaccccaaagcaaggaggagggctcgggcccgagaccgttcacctccccttatccctgttcccctcttcaggatggagctgacctcaagggaaagagggaggggacagcctctgccctgggaacttcgactgggcctactgctaagcgtgctggctgccacactggcacaggcccctgccccggatgtgcctggctgttccaggggaagctgctaccccgccacgggcgacctgctggtgggccgagctgacagactgactgcctcatccacttgtggcctgaatggcccccagccctactgcatcgtcagtcacctgcaggacgaaaagaagtgcttcctttgtgactcccggcgccccttctctgctagagacaacccacacagccatcgcatccagaatgtagtcaccagctttgcaccacagcggcgggcagcctggtggcagtcagagaatggtatccctgcggtcaccatccagctggacctggaggctgagtttcatttcacacacctcattatgaccttcaagacatttcgccctgctgccatgctggtggaacgctcagcagactttggccgcacctggcatgtgtaccgatatttctcctatgactgtggggctgacttcccaggagtcccactagcacccccacggcactgggatgatgtagtctgtgagtcccgctactcagagattgagccatccactgaaggcgaggtcatctatcgtgtgctggaccctgccatccctatcccagacccctacagctcacggattcagaacctgttgaagatcaccaacctacgggtgaacctgactcgtctacacacgttgggagacaacctactcgacccacggagggagatccgagagaagtactactatgccctctatgagctggttgtacgtggcaactgcttctgctacggacacgcctcagagtgtgcacccgccccaggggcaccagcccatgctgagggcatggtgcacggagcttgcatctgcaaacacaacacacgtggcctcaactgcgagcagtgtcaggatttctatcgtgacctgccctggcgtccggctgaggacggccatagtcatgcctgtaggaagtgtgagtgccatgggcacacccacagctgccacttcgacatggccgtatacctggcatctggcaatgtgagtggaggtgtgtgtgatggatgtcagcataacacagctgggcgccactgtgagctctgtcggcccttcttctaccgtgacccaaccaaggacctgcgggatccggctgtgtgccgctcctgtgattgtgaccccatgggttctcaagacggtggtcgctgtgattcccatgatgaccctgcactgggactggtctccggccagtgtcgctgcaaagaacatgtggtgggcactcgctgccagcaatgccgtgatggcttctttgggctcagcatcagtgaccgtctgggctgccggcgatgtcaatgtaatgcacggggcacagtgcctgggagcactccttgtgaccccaacagtggatcctgttactgcaaacgtctagtgactggacgtggatgtgaccgctgcctgcctggccactggggcctgagccacgacctgctcggctgccgcccctgtgactgcgacgtgggtggtgctttggatccccagtgtgatgagggcacaggtcaatgccactgccgccagcacatggttgggcgacgctgtgagcaggtgcaacctggctacttccggcccttcctggaccacctaatttgggaggctgaggacacccgagggcaggtgctcgatgtggtggagcgcctggtgacccccggggaaactccatcctggactggctcaggcttcgtgcggctacaggaaggtcagaccctggagttcctggtggcctctgtgccgaaggctatggactatgacctgctgctgcgcttagagccccaggtccctgagcaatgggcagagttggaactgattgtgcagcgtccagggcctgtgcctgcccacagcctgtgtgggcatttggtgcccaaggatgatcgcatccaagggactctgcaaccacatgccaggtacttgatatttcctaatcctgtctgccttgagcctggtatctcctacaagctgcatctgaagctggtacggacagggggaagtgcccagcctgagactccctactctggacctggcctgctcattgactcgctggtgctgctgccccgtgtcctggtgctagagatgtttagtgggggtgatgctgctgccctggagcgccaggccacctttgaacgctaccaatgccatgaggagggtctggtgcccagcaagacttctccctctgaggcctgcgcacccctcctcatcagcctgtccaccctcatctacaatggtgccctgccatgtcagtgcaaccctcaaggttcactgagttctgagtgcaaccctcatggtggtcagtgcctgtgcaagcctggagtggttgggcgccgctgtgacctctgtgcccctggctactatggctttggccccacaggctgtcaagcctgccagtgcagccacgagggggcactcagcagtctctgtgaaaagaccagtgggcaatgtctctgtcgaactggtgcctttgggcttcgctgtgaccgctgccagcgtggccagtggggattccctagctgccggccatgtgtctgcaatgggcatgcagatgagtgcaacacccacacaggcgcttgcctgggctgccgtgatcacacagggggtgagcactgtgaaaggtgcattgctggtttccacggggacccacggctgccatatgggggccagtgccggccctgtccctgtcctgaaggccctgggagccaacggcactttgctacttcttgccaccaggatgaatattcccagcagattgtgtgccactgccgggcaggctatacggggctgcgatgtgaagcttgtgcccctgggcactttggggacccatcaaggccaggtggccggtgccaactgtgtgagtgcagtgggaacattgacccaatggatcctgatgcctgtgacccccacacggggcaatgcctgcgctgtttacaccacacagagggtccacactgtgcccactgcaagcctggcttccatgggcaggctgcccgacagagctgtcaccgctgcacatgcaacctgctgggcacaaatccgcagcagtgcccatctcctgaccagtgccactgtgatccaagcagtgggcagtgcccatgcctccccaatgtccagggccctagctgtgaccgctgtgcccccaacttctggaacctcaccagtggccatggttgccagccttgtgcctgccacccaagccgggccagaggccccacctgcaacgagttcacagggcagtgccactgccgtgccggctttggagggcggacttgttctgagtgccaagagctccactggggagaccctgggttgcagtgccatgcctgtgattgtgactctcgtggaatagatacacctcagtgtcaccgcttcacaggtcactgcagctgccgcccaggggtgtctggtgtgcgctgtgaccagtgtgcccgtggcttctcaggaatctttcctgcctgccatccctgccatgcatgcttcggggattgggaccgagtggtgcaggacttggcagcccgtacacagcgcctagagcagcgggcgcaggagttgcaacagacgggtgtgctgggtgcctttgagagcagcttctggcacatgcaggagaagctgggcattgtgcagggcatcgtaggtgcccgcaacacctcagccgcctccactgcacagcttgtggaggccacagaggagctgcggcgtgaaattggggaggccactgagcacctgactcagctcgaggcagacctgacagatgtgcaagatgagaacttcaatgccaaccatgcactaagtggtctggagcgagataggcttgcacttaatctcacactgcggcagctcgaccagcatcttgacttgctcaaacattcaaacttcctgggtgcctatgacagcatccggcatgcccatagccagtctgcagaggcagaacgtcgtgccaatacctcagccctggcagtacctagccctgtgagcaactcggcaagtgctcggcatcggacagaggcactgatggatgctcagaaggaggacttcaacagcaaacacatggccaaccagcgggcacttggcaagctctctgcccatacccacaccctgagcctgacagacataaatgagctggtgtgtggggcaccaggggatgcaccctgtgctacaagcccttgtgggggtgccggctgtcgagatgaggatgggcagccgcgctgtgggggcctcagctgcaatggggcagcggctacagcagacctagcactgggccgggcccggcacacacaggcagagctgcagcgggcactggcagaaggtggtagcatcctcagcagagtggctgagactcgtcggcaggcaagcgaggcacagcagcgggcccaggcagccctggacaaggctaatgcttccaggggacaggtggaacaggccaaccaggaacttcaagaacttatccagagtgtgaaggacttcctcaaccaggagggggctgatcctgatagcattgaaatggtggccacacgggtgctagagctctccatcccagcttcagctgagcagatccagcacctggcgggtgcgattgcagagcgagtccggagcctggcagatgtggatgcgatcctggcacgtactgtaggagatgtgcgtcgtgccgagcagctactgcaggatgcacggcgggcaaggagctgggctgaggatgagaaacagaaggcagagacagtacaggcagcactggaggaggcccagcgggcacagggtattgcccagggtgccatccggggggcagtggctgacacacgggacacagagcagaccctgtaccaggtacaggagaggatggcaggtgcagagcgggcactgagctctgcaggtgaaagggctcggcagttggatgctctcctggaggctctgaaattgaaacgggcaggaaatagtctggcagcctctacagcagaagaaacggcaggcagtgcccagggtcgtgcccaggaggctgagcagctgctacgcggtcctctgggtgatcagtaccagacggtgaaggccctagctgagcgcaaggcccaaggtgtgctggctgcacaggcaagggcagaacaactgcgggatgaggctcgggacctgttgcaagccgctcaggacaagctgcagcggctacaggaattggaaggcacctatgaggaaaatgagcgggcactggagagtaaggcagcccagttggacgggttggaggccaggatgcgcagcgtgcttcaagccatcaacttgcaggtgcagatctacaacacctgccagtgacccctgcccaaggcctaccccagttcctagcactgccccacatgcatgtctgcctatgcactgaagagctcttggcccggcagggcccccaat

SEQ ID NO: 147436 - DNA, 5674 bp, Homo sapiens
  Payload ID: 9160
  Gene Symbol: LAMB2
  Gene Name: laminin, beta 2 (laminin S)
  Uniprot ID: P55268
  ENST ID: ENST00000418109
  CDS Start-End: 166-5562
ccgcccggtgttgcgctccttcccagaatccgctccggcctttccttcctgccgcgattcccaactttgctcaaagtcgctggactctaagctgtcggagggaccgctggacagacctgggaactgacagagggcctggagggaaacaggccaaagacccacaggatggagctgacctcaagggaaagagggaggggacagcctctgccctgggaacttcgactgggcctactgctaagcgtgctggctgccacactggcacaggcccctgccccggatgtgcctggctgttccaggggaagctgctaccccgccacgggcgacctgctggtgggccgagctgacagactgactgcctcatccacttgtggcctgaatggcccccagccctactgcatcgtcagtcacctgcaggacgaaaagaagtgcttcctttgtgactcccggcgccccttctctgctagagacaacccacacagccatcgcatccagaatgtagtcaccagctttgcaccacagcggcgggcagcctggtggcagtcagagaatggtatccctgcggtcaccatccagctggacctggaggctgagtttcatttcacacacctcattatgaccttcaagacatttcgccctgctgccatgctggtggaacgctcagcagactttggccgcacctggcatgtgtaccgatatttctcctatgactgtggggctgacttcccaggagtcccactagcacccccacggcactgggatgatgtagtctgtgagtcccgctactcagagattgagccatccactgaaggcgaggtcatctatcgtgtgctggaccctgccatccctatcccagacccctacagctcacggattcagaacctgttgaagatcaccaacctacgggtgaacctgactcgtctacacacgttgggagacaacctactcgacccacggagggagatccgagagaagtactactatgccctctatgagctggttgtacgtggcaactgcttctgctacggacacgcctcagagtgtgcacccgccccaggggcaccagcccatgctgagggcatggtgcacggagcttgcatctgcaaacacaacacacgtggcctcaactgcgagcagtgtcaggatttctatcgtgacctgccctggcgtccggctgaggacggccatagtcatgcctgtaggaagtgtgagtgccatgggcacacccacagctgccacttcgacatggccgtatacctggcatctggcaatgtgagtggaggtgtgtgtgatggatgtcagcataacacagctgggcgccactgtgagctctgtcggcccttcttctaccgtgacccaaccaaggacctgcgggatccggctgtgtgccgctcctgtgattgtgaccccatgggttctcaagacggtggtcgctgtgattcccatgatgaccctgcactgggactggtctccggccagtgtcgctgcaaagaacatgtggtgggcactcgctgccagcaatgccgtgatggcttctttgggctcagcatcagtgaccgtctgggctgccggcgatgtcaatgtaatgcacggggcacagtgcctgggagcactccttgtgaccccaacagtggatcctgttactgcaaacgtctagtgactggacgtggatgtgaccgctgcctgcctggccactggggcctgagccacgacctgctcggctgccgcccctgtgactgcgacgtgggtggtgctttggatccccagtgtgatgagggcacaggtcaatgccactgccgccagcacatggttgggcgacgctgtgagcaggtgcaacctggctacttccggcccttcctggaccacctaatttgggaggctgaggacacccgagggcaggtgctcgatgtggtggagcgcctggtgacccccggggaaactccatcctggactggctcaggcttcgtgcggctacaggaaggtcagaccctggagttcctggtggcctctgtgccgaaggctatggactatgacctgctgctgcgcttagagccccaggtccctgagcaatgggcagagttggaactgattgtgcagcgtccagggcctgtgcctgcccacagcctgtgtgggcatttggtgcccaaggatgatcgcatccaagggactctgcaaccacatgccaggtacttgatatttcctaatcctgtctgccttgagcctggtatctcctacaagctgcatctgaagctggtacggacagggggaagtgcccagcctgagactccctactctggacctggcctgctcattgactcgctggtgctgctgccccgtgtcctggtgctagagatgtttagtgggggtgatgctgctgccctggagcgccaggccacctttgaacgctaccaatgccatgaggagggtctggtgcccagcaagacttctccctctgaggcctgcgcacccctcctcatcagcctgtccaccctcatctacaatggtgccctgccatgtcagtgcaaccctcaaggttcactgagttctgagtgcaaccctcatggtggtcagtgcctgtgcaagcctggagtggttgggcgccgctgtgacctctgtgcccctggctactatggctttggccccacaggctgtcaagcctgccagtgcagccacgagggggcactcagcagtctctgtgaaaagaccagtgggcaatgtctctgtcgaactggtgcctttgggcttcgctgtgaccgctgccagcgtggccagtggggattccctagctgccggccatgtgtctgcaatgggcatgcagatgagtgcaacacccacacaggcgcttgcctgggctgccgtgatcacacagggggtgagcactgtgaaaggtgcattgctggtttccacggggacccacggctgccatatgggggccagtgccggccctgtccctgtcctgaaggccctgggagccaacggcactttgctacttcttgccaccaggatgaatattcccagcagattgtgtgccactgccgggcaggctatacggggctgcgatgtgaagcttgtgcccctgggcactttggggacccatcaaggccaggtggccggtgccaactgtgtgagtgcagtgggaacattgacccaatggatcctgatgcctgtgacccccacacggggcaatgcctgcgctgtttacaccacacagagggtccacactgtgcccactgcaagcctggcttccatgggcaggctgcccgacagagctgtcaccgctgcacatgcaacctgctgggcacaaatccgcagcagtgcccatctcctgaccagtgccactgtgatccaagcagtgggcagtgcccatgcctccccaatgtccagggccctagctgtgaccgctgtgcccccaacttctggaacctcaccagtggccatggttgccagccttgtgcctgccacccaagccgggccagaggccccacctgcaacgagttcacagggcagtgccactgccgtgccggctttggagggcggacttgttctgagtgccaagagctccactggggagaccctgggttgcagtgccatgcctgtgattgtgactctcgtggaatagatacacctcagtgtcaccgcttcacaggtcactgcagctgccgcccaggggtgtctggtgtgcgctgtgaccagtgtgcccgtggcttctcaggaatctttcctgcctgccatccctgccatgcatgcttcggggattgggaccgagtggtgcaggacttggcagcccgtacacagcgcctagagcagcgggcgcaggagttgcaacagacgggtgtgctgggtgcctttgagagcagcttctggcacatgcaggagaagctgggcattgtgcagggcatcgtaggtgcccgcaacacctcagccgcctccactgcacagcttgtggaggccacagaggagctgcggcgtgaaattggggaggccactgagcacctgactcagctcgaggcagacctgacagatgtgcaagatgagaacttcaatgccaaccatgcactaagtggtctggagcgagataggcttgcacttaatctcacactgcggcagctcgaccagcatcttgacttgctcaaacattcaaacttcctgggtgcctatgacagcatccggcatgcccatagccagtctgcagaggcagaacgtcgtgccaatacctcagccctggcagtacctagccctgtgagcaactcggcaagtgctcggcatcggacagaggcactgatggatgctcagaaggaggacttcaacagcaaacacatggccaaccagcgggcacttggcaagctctctgcccatacccacaccctgagcctgacagacataaatgagctggtgtgtggggcaccaggggatgcaccctgtgctacaagcccttgtgggggtgccggctgtcgagatgaggatgggcagccgcgctgtgggggcctcagctgcaatggggcagcggctacagcagacctagcactgggccgggcccggcacacacaggcagagctgcagcgggcactggcagaaggtggtagcatcctcagcagagtggctgagactcgtcggcaggcaagcgaggcacagcagcgggcccaggcagccctggacaaggctaatgcttccaggggacaggtggaacaggccaaccaggaacttcaagaacttatccagagtgtgaaggacttcctcaaccaggagggggctgatcctgatagcattgaaatggtggccacacgggtgctagagctctccatcccagcttcagctgagcagatccagcacctggcgggtgcgattgcagagcgagtccggagcctggcagatgtggatgcgatcctggcacgtactgtaggagatgtgcgtcgtgccgagcagctactgcaggatgcacggcgggcaaggagctgggctgaggatgagaaacagaaggcagagacagtacaggcagcactggaggaggcccagcgggcacagggtattgcccagggtgccatccggggggcagtggctgacacacgggacacagagcagaccctgtaccaggtacaggagaggatggcaggtgcagagcgggcactgagctctgcaggtgaaagggctcggcagttggatgctctcctggaggctctgaaattgaaacgggcaggaaatagtctggcagcctctacagcagaagaaacggcaggcagtgcccagggtcgtgcccaggaggctgagcagctgctacgcggtcctctgggtgatcagtaccagacggtgaaggccctagctgagcgcaaggcccaaggtgtgctggctgcacaggcaagggcagaacaactgcgggatgaggctcgggacctgttgcaagccgctcaggacaagctgcagcggctacaggaattggaaggcacctatgaggaaaatgagcgggcactggagagtaaggcagcccagttggacgggttggaggccaggatgcgcagcgtgcttcaagccatcaacttgcaggtgcagatctacaacacctgccagtgacccctgcccaaggcctaccccagttcctagcactgccccacatgcatgtctgcctatgcactgaagagctcttggcccggcagggcccccaataaaccagtgtgaaccccca

SEQ ID NO: 147437 - DNA, 582 bp, Homo sapiens
  Payload ID: 9160
  Gene Symbol: LAMB2
  Gene Name: laminin, beta 2 (laminin S)
  ENST ID: ENST00000494831
  CDS Start-End: 130-582
aactttgctcaaagtcgctggactctaagctgtcggagggaccgctggacagacctgggaactgacagagggcctggagggaaacaggccaaagacccacaggctgagtttcatttcacacacctcattatgaccttcaagacatttcgccctgctgccatgctggtggaacgctcagcagactttggccgcacctggcatgtgtaccgatatttctcctatgactgtggggctgacttcccaggagtcccactagcacccccacggcactgggatgatgtagtctgtgagtcccgctactcagagattgagccatccactgaaggcgaggtcatctatcgtgtgctggaccctgccatccctatcccagacccctacagctcacggattcagaacctgttgaagatcaccaacctacgggtgaacctgactcgtctacacacgttgggagacaacctactcgacccacggagggagatccgagagaagtactactatgccctctatgagctggttgtacgtggcaactgcttctgctacggacacgcctcagagtgtgcacccgccccaggggcaccagcc

SEQ ID NO: 147438 - DNA, 4055 bp, Homo sapiens
  Payload ID: 9161
  Gene Symbol: LAMB3
  Gene Name: laminin, beta 3
  Uniprot ID: Q13751
  ENST ID: ENST00000356082
  CDS Start-End: 136-3654
ggctgttgtttaaaaacctggagccgggaggggagacccccacattcaagaggagctttcaggcgatctggagaaagaacggcagaacacacagcaaggaaaggtcctttctggggatcaccccattggctgaagatgagaccattcttcctcttgtgttttgccctgcctggcctcctgcatgcccaacaagcctgctcccgtggggcctgctatccacctgttggggacctgcttgttgggaggacccggtttctccgagcttcatctacctgtggactgaccaagcctgagacctactgcacccagtatggcgagtggcagatgaaatgctgcaagtgtgactccaggcagcctcacaactactacagtcaccgagtagagaatgtggcttcatcctccggccccatgcgctggtggcagtcacagaatgatgtgaaccctgtctctctgcagctggacctggacaggagattccagcttcaagaagtcatgatggagttccaggggcccatgcccgccggcatgctgattgagcgctcctcagacttcggtaagacctggcgagtgtaccagtacctggctgccgactgcacctccaccttccctcgggtccgccagggtcggcctcagagctggcaggatgttcggtgccagtccctgcctcagaggcctaatgcacgcctaaatggggggaaggtccaacttaaccttatggatttagtgtctgggattccagcaactcaaagtcaaaaaattcaagaggtgggggagatcacaaacttgagagtcaatttcaccaggctggcccctgtgccccaaaggggctaccaccctcccagcgcctactatgctgtgtcccagctccgtctgcaggggagctgcttctgtcacggccatgctgatcgctgcgcacccaagcctggggcctctgcaggcccctccaccgctgtgcaggtccacgatgtctgtgtctgccagcacaacactgccggcccaaattgtgagcgctgtgcacccttctacaacaaccggccctggagaccggcggagggccaggacgcccatgaatgccaaaggtgcgactgcaatgggcactcagagacatgtcactttgaccccgctgtgtttgccgccagccagggggcatatggaggtgtgtgtgacaattgccgggaccacaccgaaggcaagaactgtgagcggtgtcagctgcactatttccggaaccggcgcccgggagcttccattcaggagacctgcatctcctgcgagtgtgatccggatggggcagtgccaggggctccctgtgacccagtgaccgggcagtgtgtgtgcaaggagcatgtgcagggagagcgctgtgacctatgcaagccgggcttcactggactcacctacgccaacccgcagggctgccaccgctgtgactgcaacatcctggggtcccggagggacatgccgtgtgacgaggagagtgggcgctgcctttgtctgcccaacgtggtgggtcccaaatgtgaccagtgtgctccctaccactggaagctggccagtggccagggctgtgaaccgtgtgcctgcgacccgcacaactccctcagcccacagtgcaaccagttcacagggcagtgcccctgtcgggaaggctttggtggcctgatgtgcagcgctgcagccatccgccagtgtccagaccggacctatggagacgtggccacaggatgccgagcctgtgactgtgatttccggggaacagagggcccgggctgcgacaaggcatcaggccgctgcctctgccgccctggcttgaccgggccccgctgtgaccagtgccagcgaggctactgtaatcgctacccggtgtgcgtggcctgccacccttgcttccagacctatgatgcggacctccgggagcaggccctgcgctttggtagactccgcaatgccaccgccagcctgtggtcagggcctgggctggaggaccgtggcctggcctcccggatcctagatgcaaagagtaagattgagcagatccgagcagttctcagcagccccgcagtcacagagcaggaggtggctcaggtggccagtgccatcctctccctcaggcgaactctccagggcctgcagctggatctgcccctggaggaggagacgttgtcccttccgagagacctggagagtcttgacagaagcttcaatggtctccttactatgtatcagaggaagagggagcagtttgaaaaaataagcagtgctgatccttcaggagccttccggatgctgagcacagcctacgagcagtcagcccaggctgctcagcaggtctccgacagctcgcgccttttggaccagctcagggacagccggagagaggcagagaggctggtgcggcaggcgggaggaggaggaggcaccggcagccccaagcttgtggccctgaggctggagatgtcttcgttgcctgacctgacacccaccttcaacaagctctgtggcaactccaggcagatggcttgcaccccaatatcatgccctggtgagctatgtccccaagacaatggcacagcctgtggctcccgctgcaggggtgtccttcccagggccggtggggccttcttgatggcggggcaggtggctgagcagctgcggggcttcaatgcccagctccagcggaccaggcagatgattagggcagccgaggaatctgcctcacagattcaatccagtgcccagcgcttggagacccaggtgagcgccagccgctcccagatggaggaagatgtcagacgcacacggctcctaatccagcaggtccgggacttcctaacagaccccgacactgatgcagccactatccaggaggtcagcgaggccgtgctggccctgtggctgcccacagactcagctactgttctgcagaagatgaatgagatccaggccattgcagccaggctccccaacgtggacttggtgctgtcccagaccaagcaggacattgcgcgtgcccgccggttgcaggctgaggctgaggaagccaggagccgagcccatgcagtggagggccaggtggaagatgtggttgggaacctgcggcaggggacagtggcactgcaggaagctcaggacaccatgcaaggcaccagccgctcccttcggcttatccaggacagggttgctgaggttcagcaggtactgcggccagcagaaaagctggtgacaagcatgaccaagcagctgggtgacttctggacacggatggaggagctccgccaccaagcccggcagcagggggcagaggcagtccaggcccagcagcttgcggaaggtgccagcgagcaggcattgagtgcccaagagggatttgagagaataaaacaaaagtatgctgagttgaaggaccggttgggtcagagttccatgctgggtgagcagggtgcccggatccagagtgtgaagacagaggcagaggagctgtttggggagaccatggagatgatggacaggatgaaagacatggagttggagctgctgcggggcagccaggccatcatgctgcgctcagcggacctgacaggactggagaagcgtgtggagcagatccgtgaccacatcaatgggcgcgtgctctactatgccacctgcaagtgatgctacagcttccagcccgttgccccactcatctgccgcctttgcttttggttgggggcagattgggttggaatgctttccatctccaggagactttcatgcagcctaaagtacagcctggaccacccctggtgtgtagctagtaagattaccctgagctgcagctgagcctgagccaatgggacagttacacttgacagacaaagatggtggagattggcatgccattgaaactaagagctctcaagtcaaggaagctgggctgggcagtatcccccgcctttagttctccactggggaggaatcctggaccaagcacaaaaacttaacaaaagtgatgtaaaaatgaaaagccaaataaaaatctttggaaaagagcctggaggttcaacgaggaaaaa

SEQ ID NO: 147439 - DNA, 3931 bp, Homo sapiens
  Payload ID: 9161
  Gene Symbol: LAMB3
  Gene Name: laminin, beta 3
  Uniprot ID: Q13751
  ENST ID: ENST00000367030
  CDS Start-End: 119-3637
gcgggaggaggactgtatctctggatgcctggggcctggtttcagggcctgatttattcctcttcctgggagctcactcaggaaaggtcctttctggggatcaccccattggctgaagatgagaccattcttcctcttgtgttttgccctgcctggcctcctgcatgcccaacaagcctgctcccgtggggcctgctatccacctgttggggacctgcttgttgggaggacccggtttctccgagcttcatctacctgtggactgaccaagcctgagacctactgcacccagtatggcgagtggcagatgaaatgctgcaagtgtgactccaggcagcctcacaactactacagtcaccgagtagagaatgtggcttcatcctccggccccatgcgctggtggcagtcacagaatgatgtgaaccctgtctctctgcagctggacctggacaggagattccagcttcaagaagtcatgatggagttccaggggcccatgcccgccggcatgctgattgagcgctcctcagacttcggtaagacctggcgagtgtaccagtacctggctgccgactgcacctccaccttccctcgggtccgccagggtcggcctcagagctggcaggatgttcggtgccagtccctgcctcagaggcctaatgcacgcctaaatggggggaaggtccaacttaaccttatggatttagtgtctgggattccagcaactcaaagtcaaaaaattcaagaggtgggggagatcacaaacttgagagtcaatttcaccaggctggcccctgtgccccaaaggggctaccaccctcccagcgcctactatgctgtgtcccagctccgtctgcaggggagctgcttctgtcacggccatgctgatcgctgcgcacccaagcctggggcctctgcaggcccctccaccgctgtgcaggtccacgatgtctgtgtctgccagcacaacactgccggcccaaattgtgagcgctgtgcacccttctacaacaaccggccctggagaccggcggagggccaggacgcccatgaatgccaaaggtgcgactgcaatgggcactcagagacatgtcactttgaccccgctgtgtttgccgccagccagggggcatatggaggtgtgtgtgacaattgccgggaccacaccgaaggcaagaactgtgagcggtgtcagctgcactatttccggaaccggcgcccgggagcttccattcaggagacctgcatctcctgcgagtgtgatccggatggggcagtgccaggggctccctgtgacccagtgaccgggcagtgtgtgtgcaaggagcatgtgcagggagagcgctgtgacctatgcaagccgggcttcactggactcacctacgccaacccgcagggctgccaccgctgtgactgcaacatcctggggtcccggagggacatgccgtgtgacgaggagagtgggcgctgcctttgtctgcccaacgtggtgggtcccaaatgtgaccagtgtgctccctaccactggaagctggccagtggccagggctgtgaaccgtgtgcctgcgacccgcacaactccctcagcccacagtgcaaccagttcacagggcagtgcccctgtcgggaaggctttggtggcctgatgtgcagcgctgcagccatccgccagtgtccagaccggacctatggagacgtggccacaggatgccgagcctgtgactgtgatttccggggaacagagggcccgggctgcgacaaggcatcaggccgctgcctctgccgccctggcttgaccgggccccgctgtgaccagtgccagcgaggctactgtaatcgctacccggtgtgcgtggcctgccacccttgcttccagacctatgatgcggacctccgggagcaggccctgcgctttggtagactccgcaatgccaccgccagcctgtggtcagggcctgggctggaggaccgtggcctggcctcccggatcctagatgcaaagagtaagattgagcagatccgagcagttctcagcagccccgcagtcacagagcaggaggtggctcaggtggccagtgccatcctctccctcaggcgaactctccagggcctgcagctggatctgcccctggaggaggagacgttgtcccttccgagagacctggagagtcttgacagaagcttcaatggtctccttactatgtatcagaggaagagggagcagtttgaaaaaataagcagtgctgatccttcaggagccttccggatgctgagcacagcctacgagcagtcagcccaggctgctcagcaggtctccgacagctcgcgccttttggaccagctcagggacagccggagagaggcagagaggctggtgcggcaggcgggaggaggaggaggcaccggcagccccaagcttgtggccctgaggctggagatgtcttcgttgcctgacctgacacccaccttcaacaagctctgtggcaactccaggcagatggcttgcaccccaatatcatgccctggtgagctatgtccccaagacaatggcacagcctgtggctcccgctgcaggggtgtccttcccagggccggtggggccttcttgatggcggggcaggtggctgagcagctgcggggcttcaatgcccagctccagcggaccaggcagatgattagggcagccgaggaatctgcctcacagattcaatccagtgcccagcgcttggagacccaggtgagcgccagccgctcccagatggaggaagatgtcagacgcacacggctcctaatccagcaggtccgggacttcctaacagaccccgacactgatgcagccactatccaggaggtcagcgaggccgtgctggccctgtggctgcccacagactcagctactgttctgcagaagatgaatgagatccaggccattgcagccaggctccccaacgtggacttggtgctgtcccagaccaagcaggacattgcgcgtgcccgccggttgcaggctgaggctgaggaagccaggagccgagcccatgcagtggagggccaggtggaagatgtggttgggaacctgcggcaggggacagtggcactgcaggaagctcaggacaccatgcaaggcaccagccgctcccttcggcttatccaggacagggttgctgaggttcagcaggtactgcggccagcagaaaagctggtgacaagcatgaccaagcagctgggtgacttctggacacggatggaggagctccgccaccaagcccggcagcagggggcagaggcagtccaggcccagcagcttgcggaaggtgccagcgagcaggcattgagtgcccaagagggatttgagagaataaaacaaaagtatgctgagttgaaggaccggttgggtcagagttccatgctgggtgagcagggtgcccggatccagagtgtgaagacagaggcagaggagctgtttggggagaccatggagatgatggacaggatgaaagacatggagttggagctgctgcggggcagccaggccatcatgctgcgctcagcggacctgacaggactggagaagcgtgtggagcagatccgtgaccacatcaatgggcgcgtgctctactatgccacctgcaagtgatgctacagcttccagcccgttgccccactcatctgccgcctttgcttttggttgggggcagattgggttggaatgctttccatctccaggagactttcatgcagcctaaagtacagcctggaccacccctggtgtgtagctagtaagattaccctgagctgcagctgagcctgagccaatgggacagttacacttgacagacaaagatggtggagattggcatgccattgaaactaagagctctcaagtcaaggaagctgggctgggcagtatcccccgcctttagttctccac

SEQ ID NO: 147440 - DNA, 4305 bp, Homo sapiens
  Payload ID: 9161
  Gene Symbol: LAMB3
  Gene Name: laminin, beta 3
  Uniprot ID: Q13751
  ENST ID: ENST00000391911
  CDS Start-End: 391-3909
cttttctcctgcaaagggtccagccttttcctgctccccacgttgtccttacggctgtgtggggtagggcagggtccacactccttcccatccattttagaggaggaagctggagtctgggaagggatgggattttcccagggcaccctgtgagtcacatgccacttgagacaagggtctagagctccagcattttccaagctacaaatgtatctgctgctccaagtgtcctagatcaggaccctaggtaaagacttctgaaaaatacttgagtctagaaacagaaaagaaaaagggctagtgtgctctaggggtttgcactgttgtacccagtttgctttgctgtgtcctaggaaaggtcctttctggggatcaccccattggctgaagatgagaccattcttcctcttgtgttttgccctgcctggcctcctgcatgcccaacaagcctgctcccgtggggcctgctatccacctgttggggacctgcttgttgggaggacccggtttctccgagcttcatctacctgtggactgaccaagcctgagacctactgcacccagtatggcgagtggcagatgaaatgctgcaagtgtgactccaggcagcctcacaactactacagtcaccgagtagagaatgtggcttcatcctccggccccatgcgctggtggcagtcacagaatgatgtgaaccctgtctctctgcagctggacctggacaggagattccagcttcaagaagtcatgatggagttccaggggcccatgcccgccggcatgctgattgagcgctcctcagacttcggtaagacctggcgagtgtaccagtacctggctgccgactgcacctccaccttccctcgggtccgccagggtcggcctcagagctggcaggatgttcggtgccagtccctgcctcagaggcctaatgcacgcctaaatggggggaaggtccaacttaaccttatggatttagtgtctgggattccagcaactcaaagtcaaaaaattcaagaggtgggggagatcacaaacttgagagtcaatttcaccaggctggcccctgtgccccaaaggggctaccaccctcccagcgcctactatgctgtgtcccagctccgtctgcaggggagctgcttctgtcacggccatgctgatcgctgcgcacccaagcctggggcctctgcaggcccctccaccgctgtgcaggtccacgatgtctgtgtctgccagcacaacactgccggcccaaattgtgagcgctgtgcacccttctacaacaaccggccctggagaccggcggagggccaggacgcccatgaatgccaaaggtgcgactgcaatgggcactcagagacatgtcactttgaccccgctgtgtttgccgccagccagggggcatatggaggtgtgtgtgacaattgccgggaccacaccgaaggcaagaactgtgagcggtgtcagctgcactatttccggaaccggcgcccgggagcttccattcaggagacctgcatctcctgcgagtgtgatccggatggggcagtgccaggggctccctgtgacccagtgaccgggcagtgtgtgtgcaaggagcatgtgcagggagagcgctgtgacctatgcaagccgggcttcactggactcacctacgccaacccgcagggctgccaccgctgtgactgcaacatcctggggtcccggagggacatgccgtgtgacgaggagagtgggcgctgcctttgtctgcccaacgtggtgggtcccaaatgtgaccagtgtgctccctaccactggaagctggccagtggccagggctgtgaaccgtgtgcctgcgacccgcacaactccctcagcccacagtgcaaccagttcacagggcagtgcccctgtcgggaaggctttggtggcctgatgtgcagcgctgcagccatccgccagtgtccagaccggacctatggagacgtggccacaggatgccgagcctgtgactgtgatttccggggaacagagggcccgggctgcgacaaggcatcaggccgctgcctctgccgccctggcttgaccgggccccgctgtgaccagtgccagcgaggctactgtaatcgctacccggtgtgcgtggcctgccacccttgcttccagacctatgatgcggacctccgggagcaggccctgcgctttggtagactccgcaatgccaccgccagcctgtggtcagggcctgggctggaggaccgtggcctggcctcccggatcctagatgcaaagagtaagattgagcagatccgagcagttctcagcagccccgcagtcacagagcaggaggtggctcaggtggccagtgccatcctctccctcaggcgaactctccagggcctgcagctggatctgcccctggaggaggagacgttgtcccttccgagagacctggagagtcttgacagaagcttcaatggtctccttactatgtatcagaggaagagggagcagtttgaaaaaataagcagtgctgatccttcaggagccttccggatgctgagcacagcctacgagcagtcagcccaggctgctcagcaggtctccgacagctcgcgccttttggaccagctcagggacagccggagagaggcagagaggctggtgcggcaggcgggaggaggaggaggcaccggcagccccaagcttgtggccctgaggctggagatgtcttcgttgcctgacctgacacccaccttcaacaagctctgtggcaactccaggcagatggcttgcaccccaatatcatgccctggtgagctatgtccccaagacaatggcacagcctgtggctcccgctgcaggggtgtccttcccagggccggtggggccttcttgatggcggggcaggtggctgagcagctgcggggcttcaatgcccagctccagcggaccaggcagatgattagggcagccgaggaatctgcctcacagattcaatccagtgcccagcgcttggagacccaggtgagcgccagccgctcccagatggaggaagatgtcagacgcacacggctcctaatccagcaggtccgggacttcctaacagaccccgacactgatgcagccactatccaggaggtcagcgaggccgtgctggccctgtggctgcccacagactcagctactgttctgcagaagatgaatgagatccaggccattgcagccaggctccccaacgtggacttggtgctgtcccagaccaagcaggacattgcgcgtgcccgccggttgcaggctgaggctgaggaagccaggagccgagcccatgcagtggagggccaggtggaagatgtggttgggaacctgcggcaggggacagtggcactgcaggaagctcaggacaccatgcaaggcaccagccgctcccttcggcttatccaggacagggttgctgaggttcagcaggtactgcggccagcagaaaagctggtgacaagcatgaccaagcagctgggtgacttctggacacggatggaggagctccgccaccaagcccggcagcagggggcagaggcagtccaggcccagcagcttgcggaaggtgccagcgagcaggcattgagtgcccaagagggatttgagagaataaaacaaaagtatgctgagttgaaggaccggttgggtcagagttccatgctgggtgagcagggtgcccggatccagagtgtgaagacagaggcagaggagctgtttggggagaccatggagatgatggacaggatgaaagacatggagttggagctgctgcggggcagccaggccatcatgctgcgctcagcggacctgacaggactggagaagcgtgtggagcagatccgtgaccacatcaatgggcgcgtgctctactatgccacctgcaagtgatgctacagcttccagcccgttgccccactcatctgccgcctttgcttttggttgggggcagattgggttggaatgctttccatctccaggagactttcatgcagcctaaagtacagcctggaccacccctggtgtgtagctagtaagattaccctgagctgcagctgagcctgagccaatgggacagttacacttgacagacaaagatggtggagattggcatgccattgaaactaagagctctcaagtcaaggaagctgggctgggcagtatcccccgcctttagttctccactggggaggaatcctggaccaagcacaaaaacttaacaaaagtgatgtaaaaatgaaaagccaaataaaaatctttggaaaagagcctggaggttcaacgagg

SEQ ID NO: 147441 - DNA, 908 bp, Homo sapiens
  Payload ID: 9161
  Gene Symbol: LAMB3
  Gene Name: laminin, beta 3
  ENST ID: ENST00000415782
  CDS Start-End: 345-908
ccctgagaaaagccagccctctctcttggggctggaactaggtcttggccctttctacagcttttctcctgcaaagggtccagccttttcctgctccccacgttgtccttacggctgtgtggggtagggcagggtccacactccttcccatccattttagaggaggaagctggagtctgggaagggatgggattttcccagggcaccctgtgagtcacatgccacttgagacaagggtctagagctccagcattttccaagctacaaatgtatctgctgctccaagtgtcctagatcaggaccctaggaaaggtcctttctggggatcaccccattggctgaagatgagaccattcttcctcttgtgttttgccctgcctggcctcctgcatgcccaacaagcctgctcccgtggggcctgctatccacctgttggggacctgcttgttgggaggacccggtttctccgagcttcatctacctgtggactgaccaagcctgagacctactgcacccagtatggcgagtggcagatgaaatgctgcaagtgtgactccaggcagcctcacaactactacagtcaccgagtagagaatgtggcttcatcctccggccccatgcgctggtggcagtcacagaatgatgtgaaccctgtctctctgcagctggacctggacaggagattccagcttcaagaagtcatgatggagttccaggggcccatgcccgccggcatgctgattgagcgctcctcagacttcggtaagacctggcgagtgtaccagtacctggctgccgactgcacctccaccttccctcgggtccgccagggtcggcctcagagctggcaggatgttcggtgccagtccctgcctcagaggcctaatgcacgcctaaatggggggaag

SEQ ID NO: 147442 - DNA, 710 bp, Homo sapiens
  Payload ID: 9161
  Gene Symbol: LAMB3
  Gene Name: laminin, beta 3
  ENST ID: ENST00000455193
  CDS Start-End: 232-710
agggggcagcagctccttgggacaccacggtagaggggccactgtgggtgccttccacaagtgctgctcagctaggagaggcctcgtatctctggggaggttagtgggctcctacagtcaaatgcgtgttgtcttccagaccccgacactgatgcagccactatccaggaggtcagcgaggccgtgctggccctgtggctgcccacagactcagctactgttctgcagaagatgaatgagatccaggccattgcagccaggctccccaacgtggacttggtgctgtcccagaccaagcaggacattgcgcgtgcccgccggttgcaggctgaggctgaggaagccaggagccgagcccatgcagtggagggccaggtggaagatgtggttgggaacctgcggcaggggacagtggcactgcaggaagctcaggacaccatgcaaggcaccagccgctcccttcggcttatccaggacagggttgctgaggttcagcaggtactgcggccagcagaaaagctggtgacaagcatgaccaagcagctgggtgacttctggacacggatggaggagctccgccaccaagcccggcagcagggggcagaggcagtccaggcccagcagcttgcggaaggtgccagcgagcaggcattgagtgcccaagagggatttgagagaataaaacaaaagtatgctgagttgaaggaccg

SEQ ID NO: 147443 - DNA, 5857 bp, Homo sapiens
  Payload ID: 9162
  Gene Symbol: LAMB4
  Gene Name: laminin, beta 4
  Uniprot ID: A4D0S4
  ENST ID: ENST00000205386
  CDS Start-End: 81-5366
acatgccccgtttgctgcctgaacctctccacaaagactcccagatcctgaattgaatttaatcatctcctgacaaaagaatgcaatttcaactgaccctttttttgcaccttgggtggctcagttactcaaaagctcaagatgactgcaacaggggtgcctgtcatcccaccactggtgatctcctggtgggcaggaacacgcagcttatggcttcttctacctgtgggctgagcagagcccagaaatactgcatcctcagttacctggagggggaacaaaaatgcttcatctgtgactctagatttccatatgatccgtatgaccaacccaacagccacaccattgagaatgtcattgtaagttttgaaccagacagagaaaagaaatggtggcaatctgaaaatggtcttgatcatgtcagcatcagactggacttagaggcattatttcggttcagccaccttatcctgacctttaagacttttcggcctgctgcaatgttagttgaacgttccacagactatggacacaactggaaagtgttcaaatattttgcaaaagactgtgccacttcctttcctaacatcacatctggccaggcccagggagtgggagacattgtttgtgactccaaatactcggatattgaaccctcaacaggtggagaggttgttttaaaagttttggatcccagttttgaaattgaaaacccttatagcccctacatccaagaccttgtgacattgacaaacctgaggataaactttaccaagctccacacccttggggatgctttgcttggaaggaggcaaaatgattcccttgataaatactactatgctctgtacgagatgattgttcggggaagctgcttttgcaatggccatgctagcgaatgtcgccctatgcagaagatgcggggagatgttttcagccctcctggaatggttcacggtcagtgtgtgtgtcagcacaatacagatggtccgaactgtgagagatgcaaggacttcttccaggatgctccttggaggccagctgcagacctccaggacaacgcttgcagatcgtgcagctgtaatagccactccagccgctgtcactttgacatgactacgtacctggcaagcggtggcctcagcgggggcgtgtgtgaagactgccagcacaacactgaggggcagcactgcgaccgctgcagacccctcttctacagggacccgctcaagaccatctcagatccctacgcgtgcattccttgtgaatgtgaccccgatgggaccatatctggtggcatttgtgtgagccactctgatcctgccttagggtctgtggccggccagtgcctttgtaaagagaacgtggaaggagccaaatgcgaccagtgcaaacccaaccactacggactaagcgccaccgaccccctgggctgccagccctgcgactgtaacccccttgggagtctgccattcttgacctgtgatgtggatacaggccaatgcttgtgcctgtcatatgtcaccggagcacactgcgaagaatgcactgttggatactggggcctgggaaatcatctccatgggtgttctccctgtgactgtgatattggaggtgcttattctaacgtgtgctcacccaagaatgggcagtgtgaatgccgcccacatgtcactggccgtagctgctctgaaccagcccctggctacttctttgctcctttgaatttctatctctacgaggcagaggaagccacaacactccaaggactggcgcctttgggctcggagacgtttggccagagtcctgctgttcacgttgttttaggagagccagttcctgggaaccctgttacatggactggacctggatttgccagggttctccctggggctggcttgagatttgctgtcaacaacattccctttcctgtggacttcaccattgccattcactatgaaacccagtctgcagctgactggactgtccagattgtggtgaacccccctggagggagtgagcactgcatacccaagactctacagtcaaagcctcagtcttttgccttaccagcggctacgagaatcatgctgcttcccacacccatctgtttagaaccagatgtacaatattccatagatgtctatttttctcagcctttgcaaggagagtcccacgctcattcacatgtcctggtggactctcttggccttattccccaaatcaattcattggagaatttctgcagcaagcaggacttagatgagtatcagcttcacaactgtgttgaaattgcctcagcaatgggacctcaagtgctcccgggtgcctgtgaaaggctgatcatcagcatgtctgccaagctgcatgatggggctgtggcctgcaagtgtcacccccagggctcagtcggatccagctgcagccgacttggaggccagtgccagtgtaaacctcttgtggtcgggcgctgctgtgacaggtgctcaactggaagctatgatttggggcatcacggctgtcacccatgtcactgccatcctcaaggatcaaaggacactgtatgtgaccaagtaacaggacagtgcccctgccatggagaggtgtctggccgccgctgtgatcgctgcctggcaggctactttggatttcccagctgccacccttgcccttgtaataggtttgctgaactttgtgatcctgagacagggtcatgcttcaattgtggaggctttacaactggcagaaactgtgaaaggtgtattgatggttactatggaaatccttcttcaggacagccctgtcgtccttgcctgtgtccagatgatccctcaagcaatcagtattttgcccattcctgttatcagaatctgtggagctcagatgtaatctgcaattgtcttcaaggttatacgggtactcagtgtggagaatgctctactggtttctatggaaatccaagaatttcaggagcaccttgccaaccatgtgcctgcaacaacaacatagatgtaaccgatccagagtcctgcagccgggtaacaggggagtgccttcgatgtttgcacaacactcagggcgcaaactgccagctctgcaaaccaggtcactatggatcagccctcaatcagacctgcagaagatgctcctgccatgcttccggcgtgagtcccatggagtgtccccctggtgggggagcttgcctctgtgaccctgtcactggtgcatgtccttgtctgccgaatgtcacaggcctggcctgtgaccgttgtgctgatggatactggaatctggtccctggcagaggatgtcagtcatgtgactgtgaccctaggacctctcaaagtagccactgtgaccagcttacaggccagtgtccgtgtaaattaggttacggcgggaaacgttgcagtgagtgccaggaaaattattatggtgatccacctgggcgatgcattccatgtgattgtaacagggcaggtacccagaagcccatctgtgatccagacacaggcatgtgccgctgccgggagggtgtcagcggccagagatgtgatcgctgtgcccggggacacagccaggaattccctacttgtcttcaatgtcacttgtgctttgatcagtgggaccacaccatttcttccctctccaaagcggtgcaagggttaatgagactggctgctaacatggaagataaaagagagaccctgcctgtctgtgaggcagacttcaaagacctcagagggaacgtgtctgaaatagaaaggattttgaaacatcctgttttcccatctgggaaattcttaaaagtcaaggattatcatgactctgttagaagacaaatcatgcagctaaatgaacaactgaaagcagtgtatgaatttcaagatctgaaagatacaatagaaagagcaaagaatgaagcagacctcttacttgaagaccttcaggaagaaattgatttgcaatccagtgtccttaatgcaagcattgcggactcctcagaaaacatcaagaaatattatcacatatcatcatctgctgaaaagaaaattaatgaaactagttccaccattaatacctctgcaaatacaaggaatgacttacttaccatcttagatacactaacctcaaaaggaaacttgtcattggaaagattaaagcagattaagataccagatatccaaatattgaatgaaaaggtgtgcggagatccaggaaatgtgccatgtgtgcccttgccctgtggcggtgctctctgcacgggccggaaggggcacaggaagtgtaggggtcccggctgtcacggctccctgaccctctcaacgaatgccctccaaaaagcccaggaagcaaaatccattattcgtaatttggacaaacaggttcgtgggttgaaaaatcagatcgaaagtataagtgaacaggcagaagtctccaaaaacaatgccttacagctgagggaaaaactgggaaatataagaaaccaaagtgactctgaagaagaaaacatcaatcttttcatcaaaaaagtgaaaaactttttgttagaggaaaacgtgcctccagaagacatcgagaaggttgcgaatggtgtgcttgacattcacctaccaattccatcccaaaatctaaccgatgaacttgtcaaaatacagaaacatatgcaactctgtgaggattacaggacagatgaaaacaggttaaatgaagaagcagatggagcccaaaagcttttggtgaaggccaaagcagctgagaaagcagcaaatattctattaaatcttgacaaaacattgaaccagttacaacaagctcaaatcactcaaggacgggcaaactctaccattacacagctgactgccaatataacaaaaataaaaaagaatgtgctgcaggctgaaaatcaaaccagggaaatgaagagtgagctggagttagcaaagcagcgatcagggctggaggatggactttccctgctgcagaccaagttgcaaaggcatcaagaccacgctgtcaatgcgaaagttcaggctgaatctgcccaacaccaggctgggagtcttgagaaggaatttgttgagctgaaaaaacaatatgctattctccaacgtaagacaagcactacaggactaacaaaggagacattaggaaaagttaaacagctaaaagatgcggcagaaaaattggctggagatacagaggccaagataagaagaataacagatttagaaaggaaaatccaagatttgaatctaagtagacaagcaaaagctgatcaactgagaatattggaagatcaagttgttgccattaaaaatgaaattgttgaacaagaaaaaaaatatgctaggtgctatagctaggcagagttaaagagcaaaagcttgtgcctttgtttctggtttctgatgtacaagcccctggggctctgttgaacctgtgaaatactgacaatgtcttctaccttccttccccacaccctgtccttattagacacctgctcagtgtggctggaggttgaaatgccaccaggaaaatgccacttcataattgaaaggggaaagtaatgaaattgtctctggtttcagaaacttttcctcttaccttcctttctctttcctaacttaaaaataacagtttccatataacaagtagaaatttaagtaagtactctactaactaataatcatttcagtcagataaacctaaacattaaataaatatctccaatattaggatggaatacatatgtatggcatgtactagattgtcctatattttatgtttatttggatttgcttttatttgtaaaattattcttttctgaataaactgcatacaattcaaaatgcaa

SEQ ID NO: 147444 - DNA, 5858 bp, Homo sapiens
  Payload ID: 9162
  Gene Symbol: LAMB4
  Gene Name: laminin, beta 4
  Uniprot ID: A4D0S4
  ENST ID: ENST00000388781
  CDS Start-End: 85-5370
cacatgccccgtttgctgcctgaacctctccacaaagactcccagatcctgtagaattgaatttaatcatctcctgacaaaagaatgcaatttcaactgaccctttttttgcaccttgggtggctcagttactcaaaagctcaagatgactgcaacaggggtgcctgtcatcccaccactggtgatctcctggtgggcaggaacacgcagcttatggcttcttctacctgtgggctgagcagagcccagaaatactgcatcctcagttacctggagggggaacaaaaatgcttcatctgtgactctagatttccatatgatccgtatgaccaacccaacagccacaccattgagaatgtcattgtaagttttgaaccagacagagaaaagaaatggtggcaatctgaaaatggtcttgatcatgtcagcatcagactggacttagaggcattatttcggttcagccaccttatcctgacctttaagacttttcggcctgctgcaatgttagttgaacgttccacagactatggacacaactggaaagtgttcaaatattttgcaaaagactgtgccacttcctttcctaacatcacatctggccaggcccagggagtgggagacattgtttgtgactccaaatactcggatattgaaccctcaacaggtggagaggttgttttaaaagttttggatcccagttttgaaattgaaaacccttatagcccctacatccaagaccttgtgacattgacaaacctgaggataaactttaccaagctccacacccttggggatgctttgcttggaaggaggcaaaatgattcccttgataaatactactatgctctgtacgagatgattgttcggggaagctgcttttgcaatggccatgctagcgaatgtcgccctatgcagaagatgcggggagatgttttcagccctcctggaatggttcacggtcagtgtgtgtgtcagcacaatacagatggtccgaactgtgagagatgcaaggacttcttccaggatgctccttggaggccagctgcagacctccaggacaacgcttgcagatcgtgcagctgtaatagccactccagccgctgtcactttgacatgactacgtacctggcaagcggtggcctcagcgggggcgtgtgtgaagactgccagcacaacactgaggggcagcactgcgaccgctgcagacccctcttctacagggacccgctcaagaccatctcagatccctacgcgtgcattccttgtgaatgtgaccccgatgggaccatatctggtggcatttgtgtgagccactctgatcctgccttagggtctgtggccggccagtgcctttgtaaagagaacgtggaaggagccaaatgcgaccagtgcaaacccaaccactacggactaagcgccaccgaccccctgggctgccagccctgcgactgtaacccccttgggagtctgccattcttgacctgtgatgtggatacaggccaatgcttgtgcctgtcatatgtcaccggagcacactgcgaagaatgcactgttggatactggggcctgggaaatcatctccatgggtgttctccctgtgactgtgatattggaggtgcttattctaacgtgtgctcacccaagaatgggcagtgtgaatgccgcccacatgtcactggccgtagctgctctgaaccagcccctggctacttctttgctcctttgaatttctatctctacgaggcagaggaagccacaacactccaaggactggcgcctttgggctcggagacgtttggccagagtcctgctgttcacgttgttttaggagagccagttcctgggaaccctgttacatggactggacctggatttgccagggttctccctggggctggcttgagatttgctgtcaacaacattccctttcctgtggacttcaccattgccattcactatgaaacccagtctgcagctgactggactgtccagattgtggtgaacccccctggagggagtgagcactgcatacccaagactctacagtcaaagcctcagtcttttgccttaccagcggctacgagaatcatgctgcttcccacacccatctgtttagaaccagatgtacaatattccatagatgtctatttttctcagcctttgcaaggagagtcccacgctcattcacatgtcctggtggactctcttggccttattccccaaatcaattcattggagaatttctgcagcaagcaggacttagatgagtatcagcttcacaactgtgttgaaattgcctcagcaatgggacctcaagtgctcccgggtgcctgtgaaaggctgatcatcagcatgtctgccaagctgcatgatggggctgtggcctgcaagtgtcacccccagggctcagtcggatccagctgcagccgacttggaggccagtgccagtgtaaacctcttgtggtcgggcgctgctgtgacaggtgctcaactggaagctatgatttggggcatcacggctgtcacccatgtcactgccatcctcaaggatcaaaggacactgtatgtgaccaagtaacaggacagtgcccctgccatggagaggtgtctggccgccgctgtgatcgctgcctggcaggctactttggatttcccagctgccacccttgcccttgtaataggtttgctgaactttgtgatcctgagacagggtcatgcttcaattgtggaggctttacaactggcagaaactgtgaaaggtgtattgatggttactatggaaatccttcttcaggacagccctgtcgtccttgcctgtgtccagatgatccctcaagcaatcagtattttgcccattcctgttatcagaatctgtggagctcagatgtaatctgcaattgtcttcaaggttatacgggtactcagtgtggagaatgctctactggtttctatggaaatccaagaatttcaggagcaccttgccaaccatgtgcctgcaacaacaacatagatgtaaccgatccagagtcctgcagccgggtaacaggggagtgccttcgatgtttgcacaacactcagggcgcaaactgccagctctgcaaaccaggtcactatggatcagccctcaatcagacctgcagaagatgctcctgccatgcttccggcgtgagtcccatggagtgtccccctggtgggggagcttgcctctgtgaccctgtcactggtgcatgtccttgtctgccgaatgtcacaggcctggcctgtgaccgttgtgctgatggatactggaatctggtccctggcagaggatgtcagtcatgtgactgtgaccctaggacctctcaaagtagccactgtgaccagcttacaggccagtgtccgtgtaaattaggttacggcgggaaacgttgcagtgagtgccaggaaaattattatggtgatccacctgggcgatgcattccatgtgattgtaacagggcaggtacccagaagcccatctgtgatccagacacaggcatgtgccgctgccgggagggtgtcagcggccagagatgtgatcgctgtgcccggggacacagccaggaattccctacttgtcttcaatgtcacttgtgctttgatcagtgggaccacaccatttcttccctctccaaagcggtgcaagggttaatgagactggctgctaacatggaagataaaagagagaccctgcctgtctgtgaggcagacttcaaagacctcagagggaacgtgtctgaaatagaaaggattttgaaacatcctgttttcccatctgggaaattcttaaaagtcaaggattatcatgactctgttagaagacaaatcatgcagctaaatgaacaactgaaagcagtgtatgaatttcaagatctgaaagatacaatagaaagagcaaagaatgaagcagacctcttacttgaagaccttcaggaagaaattgatttgcaatccagtgtccttaatgcaagcattgcggactcctcagaaaacatcaagaaatattatcacatatcatcatctgctgaaaagaaaattaatgaaactagttccaccattaatacctctgcaaatacaaggaatgacttacttaccatcttagatacactaacctcaaaaggaaacttgtcattggaaagattaaagcagattaagataccagatatccaaatattgaatgaaaaggtgtgcggagatccaggaaatgtgccatgtgtgcccttgccctgtggcggtgctctctgcacgggccggaaggggcacaggaagtgtaggggtcccggctgtcacggctccctgaccctctcaacgaatgccctccaaaaagcccaggaagcaaaatccattattcgtaatttggacaaacaggttcgtgggttgaaaaatcagatcgaaagtataagtgaacaggcagaagtctccaaaaacaatgccttacagctgagggaaaaactgggaaatataagaaaccaaagtgactctgaagaagaaaacatcaatcttttcatcaaaaaagtgaaaaactttttgttagaggaaaacgtgcctccagaagacatcgagaaggttgcgaatggtgtgcttgacattcacctaccaattccatcccaaaatctaaccgatgaacttgtcaaaatacagaaacatatgcaactctgtgaggattacaggacagatgaaaacaggttaaatgaagaagcagatggagcccaaaagcttttggtgaaggccaaagcagctgagaaagcagcaaatattctattaaatcttgacaaaacattgaaccagttacaacaagctcaaatcactcaaggacgggcaaactctaccattacacagctgactgccaatataacaaaaataaaaaagaatgtgctgcaggctgaaaatcaaaccagggaaatgaagagtgagctggagttagcaaagcagcgatcagggctggaggatggactttccctgctgcagaccaagttgcaaaggcatcaagaccacgctgtcaatgcgaaagttcaggctgaatctgcccaacaccaggctgggagtcttgagaaggaatttgttgagctgaaaaaacaatatgctattctccaacgtaagacaagcactacaggactaacaaaggagacattaggaaaagttaaacagctaaaagatgcggcagaaaaattggctggagatacagaggccaagataagaagaataacagatttagaaaggaaaatccaagatttgaatctaagtagacaagcaaaagctgatcaactgagaatattggaagatcaagttgttgccattaaaaatgaaattgttgaacaagaaaaaaaatatgctaggtgctatagctaggcagagttaaagagcaaaagcttgtgcctttgtttctggtttctgatgtacaagcccctggggctctgttgaacctgtgaaatactgacaatgtcttctaccttccttccccacaccctgtccttattagacacctgctcagtgtggctggaggttgaaatgccaccaggaaaatgccacttcataattgaaaggggaaagtaatgaaattgtctctggtttcagaaacttttcctcttaccttcctttctctttcctaacttaaaaataacagtttccatataacaagtagaaatttaagtaagtactctactaactaataatcatttcagtcagataaacctaaacattaaataaatatctccaatattaggatggaatacatatgtatggcatgtactagattgtcctatattttatgtttatttggatttgcttttatttgtaaaattattcttttctgaataaactgcatacaattcaaaatg

SEQ ID NO: 147445 - DNA, 2600 bp, Homo sapiens
  Payload ID: 9162
  Gene Symbol: LAMB4
  Gene Name: laminin, beta 4
  ENST ID: ENST00000418464
  CDS Start-End: 81-2399
acatgccccgtttgctgcctgaacctctccacaaagactcccagatcctgaattgaatttaatcatctcctgacaaaagaatgcaatttcaactgaccctttttttgcaccttgggtggctcagttactcaaaagctcaagatgactgcaacaggggtgcctgtcatcccaccactggtgatctcctggtgggcaggaacacgcagcttatggcttcttctacctgtgggctgagcagagcccagaaatactgcatcctcagttacctggagggggaacaaaaatgcttcatctgtgactctagatttccatatgatccgtatgaccaacccaacagccacaccattgagaatgtcattgtaagttttgaaccagacagagaaaagaaatggtggcaatctgaaaatggtcttgatcatgtcagcatcagactggacttagaggcattatttcggttcagccaccttatcctgacctttaagacttttcggcctgctgcaatgttagttgaacgttccacagactatggacacaactggaaagtgttcaaatattttgcaaaagactgtgccacttcctttcctaacatcacatctggccaggcccagggagtgggagacattgtttgtgactccaaatactcggatattgaaccctcaacaggtggagaggttgttttaaaagttttggatcccagttttgaaattgaaaacccttatagcccctacatccaagaccttgtgacattgacaaacctgaggataaactttaccaagctccacacccttggggatgctttgcttggaaggaggcaaaatgattcccttgataaatactactatgctctgtacgagatgattgttcggggaagctgcttttgcaatggccatgctagcgaatgtcgccctatgcagaagatgcggggagatgttttcagccctcctggaatggttcacggtcagtgtgtgtgtcagcacaatacagatggtccgaactgtgagagatgcaaggacttcttccaggatgctccttggaggccagctgcagacctccaggacaacgcttgcagatcgtgcagctgtaatagccactccagccgctgtcactttgacatgactacgtacctggcaagcggtggcctcagcgggggcgtgtgtgaagactgccagcacaacactgaggggcagcactgcgaccgctgcagacccctcttctacagggacccgctcaagaccatctcagatccctacgcgtgcattccttgtgaatgtgaccccgatgggaccatatctggtggcatttgtgtgagccactctgatcctgccttagggtctgtggccggccagtgcctttgtaaagagaacgtggaaggagccaaatgcgaccagtgcaaacccaaccactacggactaagcgccaccgaccccctgggctgccagccctgcgactgtaacccccttgggagtctgccattcttgacctgtgatgtggatacaggccaatgcttgtgcctgtcatatgtcaccggagcacactgcgaagaatgcactgttggatactggggcctgggaaatcatctccatgggtgttctccctgtgactgtgatattggaggtgcttattctaacgtgtgctcacccaagaatgggcagtgtgaatgccgcccacatgtcactggccgtagctgctctgaaccagcccctggctacttctttgctcctttgaatttctatctctacgaggcagaggaagccacaacactccaaggactggcgcctttgggctcggagacgtttggccagagtcctgctgttcacgttgttttaggagagccagttcctgggaaccctgttacatggactggacctggatttgccagggttctccctggggctggcttgagatttgctgtcaacaacattccctttcctgtggacttcaccattgccattcactatgaaacccagtctgcagctgactggactgtccagattgtggtgaacccccctggagggagtgagcactgcatacccaagactctacagtcaaagcctcagtcttttgccttaccagcggctacgagaatcatgctgcttcccacacccatctgtttagaaccagatgtacaatattccatagatgtctatttttctcagcctttgcaaggagagtcccacgctcattcacatgtcctggtggactctgctgcagtgcagtggcacaatctcggctcactgcaacctccgcctcctgagtgcaagcaattctcctgcttcagcttcccgagtagctgggattacaggcacccgccaccacacctggctaatttttgtatttttagtagagatggggtttcaccacattggccaggctggtctcaaactcctgacctcaggtgatccacctgcctcagcctcccaaagtgctgggattacaggcatgagccacaatgcccagcctccccaattaatttttaagatcattagtacagtatgaaggtaccagtttcatcccaccttcaacagaattatatagaattgtgtgggatttttaaaaagtaatttcatggataaaaataaaatttctttgttaaaattgca

SEQ ID NO: 147446 - DNA, 2579 bp, Homo sapiens
  Payload ID: 9162
  Gene Symbol: LAMB4
  Gene Name: laminin, beta 4
  ENST ID: ENST00000422975
  CDS Start-End: 1-2250
aacatagatgtaaccgatccagagtcctgcagccgggtaacaggggagtgccttcgatgtttgcacaacactcagggcgcaaactgccagctctgcaaaccaggtcactatggatcagccctcaatcagacctgcagaagatgctcctgccatgcttccggcgtgagtcccatggagtgtccccctggtgggggagcttgcctctgtgaccctgtcactggtgcatgtccttgtctgccgaatgtcacaggcctggcctgtgaccgttgtgctgatggatactggaatctggtccctggcagaggatgtcagtcatgtgactgtgaccctaggacctctcaaagtagccactgtgaccagcttacaggccagtgtccgtgtaaattaggttacggcgggaaacgttgcagtgagtgccaggaaaattattatggtgatccacctgggcgatgcattccatgtgattgtaacagggcaggtacccagaagcccatctgtgatccagacacaggcatgtgccgctgccgggagggtgtcagcggccagagatgtgatcgctgtgcccggggacacagccaggaattccctacttgtcttcaatgtcacttgtgctttgatcagtgggaccacaccatttcttccctctccaaagcggtgcaagggttaatgagactggctgctaacatggaagataaaagagagaccctgcctgtctgtgaggcagacttcaaagacctcagagggaacgtgtctgaaatagaaaggattttgaaacatcctgttttcccatctgggaaattcttaaaagtcaaggattatcatgactctgttagaagacaaatcatgcagctaaatgaacaactgaaagcagtgtatgaatttcaagatctgaaagatacaatagaaagagcaaagaatgaagcagacctcttacttgaagaccttcaggaagaaattgatttgcaatccagtgtccttaatgcaagcattgcggactcctcagaaaacatcaagaaatattatcacatatcatcatctgctgaaaagaaaattaatgaaactagttccaccattaatacctctgcaaatacaaggaatgacttacttaccatcttagatacactaacctcaaaaggaaacttgtcattggaaagattaaagcagattaagataccagatatccaaatattgaatgaaaaggtgtgcggagatccaggaaatgtgccatgtgtgcccttgccctgtggcggtgctctctgcacgggccggaaggggcacaggaagtgtaggggtcccggctgtcacggctccctgaccctctcaacgaatgccctccaaaaagcccaggaagcaaaatccattattcgtaatttggacaaacaggttcgtgggttgaaaaatcagatcgaaagtataagtgaacaggcagaagtctccaaaaacaatgccttacagctgagggaaaaactgggaaatataagaaaccaaagtgactctgaagaagaaaacatcaatcttttcatcaaaaaagtgaaaaactttttgttagaggaaaacgtgcctccagaagacatcgagaaggttgcgaatggtgtgcttgacattcacctaccaattccatcccaaaatctaaccgatgaacttgtcaaaatacagaaacatatgcaactctgtgaggattacaggacagatgaaaacaggttaaatgaagaagcagatggagcccaaaagcttttggtgaaggccaaagcagctgagaaagcagcaaatattctattaaatcttgacaaaacattgaaccagttacaacaagctcaaatcactcaaggacgggcaaactctaccattacacagctgactgccaatataacaaaaataaaaaagaatgtgctgcaggctgaaaatcaaaccagggaaatgaagagtgagctggagttagcaaagcagcgatcagggctggaggatggactttccctgctgcagaccaagttgcaaaggcatcaagaccacgctgtcaatgcgaaagttcaggctgaatctgcccaacaccaggctgggagtcttgagaaggaatttgttgagctgaaaaaacaatatgctattctccaacgtaagacaagcactacaggactaacaaaggagacattaggaaaagttaaacagctaaaagatgcggcagaaaaattggctggagatacagaggccaagataagaagaataacaggctgttttcagaactcagcaagatagaaaaatgagacattgatttggctgtcttccccatgctgccacttgagaaggggcggaaccacaaggctgtgcctgttcctctctgttaggaagaggagcccctggatcccagtatggagcccttggcagcaacaatgttgagagagtggggaatggactctagtcttcagccagggtccttccacagaacttggtgtcagtcggggtcccagcaagaaacagaaagcatgcgtgggcataattttggataaagtatttagaagtggagttgtctcagtcatttattcactgcataataaattaccccaaaatgtaatggcttaaaataa

SEQ ID NO: 147447 - DNA, 7889 bp, Homo sapiens
  Payload ID: 9163
  Gene Symbol: LAMC1
  Gene Name: laminin, gamma 1 (formerly LAMB2)
  Uniprot ID: P11047
  ENST ID: ENST00000258341
  CDS Start-End: 258-5087
gtgcaggctgctcccggggtaggtgagggaagcgcggaggcggcgcgcgggggcagtggtcggcgagcagcgcggtcctcgctaggggcgcccacccgtcagtctctccggcgcgagccgccgccaccgcccgcgccggagtcaggcccctgggcccccaggctcaagcagcgaagcggcctccgggggacgccgctaggcgagaggaacgcgccggtgcccttgccttcgccgtgacccagcgtgcgggcggcgggatgagagggagccatcgggccgcgccggccctgcggccccgggggcggctctggcccgtgctggccgtgctggcggcggccgccgcggcgggctgtgcccaggcagccatggacgagtgcacggacgagggcgggcggccgcagcgctgcatgcccgagttcgtcaacgccgccttcaacgtgactgtggtggccaccaacacgtgtgggactccgcccgaggaatactgtgtgcagaccggggtgaccggggtcaccaagtcctgtcacctgtgcgacgccgggcagccccacctgcagcacggggcagccttcctgaccgactacaacaaccaggccgacaccacctggtggcaaagccagaccatgctggccggggtgcagtaccccagctccatcaacctcacgctgcacctgggaaaagcttttgacatcacctatgtgcgtctcaagttccacaccagccgcccggagagctttgccatttacaagcgcacacgggaagacgggccctggattccttaccagtactacagtggttcctgtgagaacacctactccaaggcaaaccgcggcttcatcaggacaggaggggacgagcagcaggccttgtgtactgatgaattcagtgacatttctcccctcactgggggcaacgtggccttttctaccctggaaggaaggcccagcgcctataactttgacaatagccctgtgctgcaggaatgggtaactgccactgacatcagagtaactcttaatcgcctgaacacttttggagatgaagtgtttaacgatcccaaagttctcaagtcctattattatgccatctctgattttgctgtaggtggcagatgtaaatgtaatggacacgcaagcgagtgtatgaagaacgaatttgataagctggtgtgtaattgcaaacataacacatatggagtagactgtgaaaagtgtcttcctttcttcaatgaccggccgtggaggagggcaactgcggaaagtgccagtgaatgcctgccctgtgattgcaatggtcgatcccaggaatgctacttcgaccctgaactctatcgttccactggccatgggggccactgtaccaactgccaggataacacagatggcgcccactgtgagaggtgccgagagaacttcttccgccttggcaacaatgaagcctgctcttcatgccactgtagtcctgtgggctctctaagcacacagtgtgatagttacggcagatgcagctgtaagccaggagtgatgggggacaaatgtgaccgttgccagcctggattccattctctcactgaagcaggatgcaggccatgctcttgtgatccctctggcagcatagatgaatgtaatattgaaacaggaagatgtgtttgcaaagacaatgtcgaaggcttcaattgtgaaagatgcaaacctggattttttaatctggaatcatctaatcctcggggttgcacaccctgcttctgctttgggcattcttctgtctgtacaaacgctgttggctacagtgtttattctatctcctctacctttcagattgatgaggatgggtggcgtgcggaacagagagatggctctgaagcatctctcgagtggtcctctgagaggcaagatatcgccgtgatctcagacagctactttcctcggtacttcattgctcctgcaaagttcttgggcaagcaggtgttgagttatggtcagaacctctccttctcctttcgagtggacaggcgagatactcgcctctctgcagaagaccttgtgcttgagggagctggcttaagagtatctgtacccttgatcgctcagggcaattcctatccaagtgagaccactgtgaagtatgtcttcaggctccatgaagcaacagattacccttggaggcctgctcttaccccttttgaatttcagaagctcctaaacaacttgacctctatcaagatacgtgggacatacagtgagagaagtgctggatatttggatgatgtcaccctggcaagtgctcgtcctgggcctggagtccctgcaacttgggtggagtcctgcacctgtcctgtgggatatggagggcagttttgtgagatgtgcctctcaggttacagaagagaaactcctaatcttggaccatacagtccatgtgtgctttgcgcctgcaatggacacagcgagacctgtgatcctgagacaggtgtttgtaactgcagagacaatacggctggcccgcactgtgagaagtgcagtgatgggtactatggagattcaactgcaggcacctcctccgattgccaaccctgtccgtgtcctggaggttcaagttgtgctgttgttcccaagacaaaggaggtggtgtgcaccaactgtcctactggcaccactggtaagagatgtgagctctgtgatgatggctactttggagaccccctgggtagaaacggccctgtgagactttgccgcctgtgccagtgcagtgacaacatcgatcccaatgcagttggaaattgcaatcgcttgacgggagaatgcctgaagtgcatctataacactgctggcttctattgtgaccggtgcaaagacggattttttggaaatcccctggctcccaatccagcagacaaatgcaaagcctgcaattgcaatctgtatgggaccatgaagcagcagagcagctgtaaccccgtgacggggcagtgtgaatgtttgcctcacgtgactggccaggactgtggtgcttgtgaccctggattctacaatctgcagagtgggcaaggctgtgagaggtgtgactgccatgccttgggctccaccaatgggcagtgtgacatccgcaccggccagtgtgagtgccagcccggcatcactggtcagcactgtgagcgctgtgaggtcaaccactttgggtttggacctgaaggctgcaaaccctgtgactgtcatcctgagggatctctttcacttcagtgcaaagatgatggtcgctgtgaatgcagagaaggctttgtgggaaatcgctgtgaccagtgtgaagaaaactatttctacaatcggtcttggcctggctgccaggaatgtccagcttgttaccggctggtaaaggataaggttgctgatcatagagtgaagctccaggaattagagagtctcatagcaaaccttggaactggggatgagatggtgacagatcaagccttcgaggatagactaaaggaagcagagagggaagttatggacctccttcgtgaggcccaggatgtcaaagatgttgaccagaatttgatggatcgcctacagagagtgaataacactctgtccagccaaattagccgtttacagaatatccggaataccattgaagagactggaaacttggctgaacaagcgcgtgcccatgtagagaacacagagcggttgattgaaatcgcatccagagaacttgagaaagcaaaagtcgctgctgccaatgtgtcagtcactcagccagaatctacaggggacccaaacaacatgactcttttggcagaagaggctcgaaagcttgctgaacgtcataaacaggaagctgatgacattgttcgagtggcaaagacagccaatgatacgtcaactgaggcatacaacctgcttctgaggacactggcaggagaaaatcaaacagcatttgagattgaagagcttaataggaagtatgaacaagcgaagaacatctcacaggatctggaaaaacaagctgcccgagtacatgaggaggccaaaagggccggtgacaaagctgtggagatctatgccagcgtggctcagctgagccctttggactctgagacactggagaatgaagcaaataacataaagatggaagctgagaatctggaacaactgattgaccagaaattaaaagattatgaggacctcagagaagatatgagagggaaggaacttgaagtcaagaaccttctggagaaaggcaagactgaacagcagaccgcagaccaactcctagcccgagctgatgctgccaaggccctcgctgaagaagctgcaaagaagggacgggataccttacaagaagctaatgacattctcaacaacctgaaagattttgataggcgtgtgaacgataacaagacggccgcagaggaggcactaaggaagattcctgccatcaaccagaccatcactgaagccaatgaaaagaccagagaagcccagcaggccctgggcagtgctgcggcggatgccacagaggccaagaacaaggcccatgaggcggagaggatcgcgagcgctgtccaaaagaatgccaccagcaccaaggcagaagctgaaagaacttttgcagaagttacagatctggataatgaggtgaacaatatgttgaagcaactgcaggaagcagaaaaagagctaaagagaaaacaagatgacgctgaccaggacatgatgatggcagggatggcttcacaggctgctcaagaagccgagatcaatgccagaaaagccaaaaactctgttactagcctcctcagcattattaatgacctcttggagcagctggggcagctggatacagtggacctgaataagctaaacgagattgaaggcaccctaaacaaagccaaagatgaaatgaaggtcagcgatcttgataggaaagtgtctgacctggagaatgaagccaagaagcaggaggctgccatcatggactataaccgagatatcgaggagatcatgaaggacattcgcaatctggaggacatcaggaagaccttaccatctggctgcttcaacaccccgtccattgaaaagccctagtgtctttagggctggaaggcagcatccctctgacaggggggcagttgtgaggccacagagtgccttgacacaaagattacatttttcagacccccactcctctgctgctgtccatgactgtccttttgaaccaggaaaagtcacagagtttaaagagaagcaaattaaacatcctgaatcgggaacaaagggttttatctaataaagtgtctcttccattcacgttgctaccttacccacactttcccttctgatttgcgtgaggacgtggcatcctacgttactgtacagtggcataagcacatcgtgtgagcccatgtatgctggggtagagcaagtagccctcccctgtctcatcgataccagcagaacctcctcagtctcagtactcttgtttctatgaaggaaaagtttggctactaacagtagcattgtgatggccagtatatccagtccatggataaagaaaatgcatctgcatctcctacccctcttccttctaagcaaaaggaaataaacatcctgtgccaaaggtattggtcatttagaatgtcggtagccatccatcagtgcttttagttattatgagtgtaggacactgagccatccgtgggtcaggatgcaattatttataaaagtctccaggtgaacatggctgaagatttttctagtatattaataattgactaggaagatgaactttttttcagatctttgggcagctgataatttaaatctggatgggcagcttgcactcaccaatagaccaaaagacatcttttgatattcttataaatggaacttacacagaagaaatagggatatgataaccactaaaattttgttttcaaaatcaaactaattcttacagcttttttattagttagtcttggaactagtgttaagtatctggcagagaacagttaatccctaaggtcttgacaaaacagaagaaaaacaagcctcctcgtcctagtcttttctagcaaagggataaaacttagatggcagcttgtactgtcagaatcccgtgtatccatttgttcttctgttggagagatgagacatttgacccttagctccagttttcttctgatgtttccatcttccagaatccctcaaaaaacattgtttgccaaatcctggtggcaaatacttgcactcagtatttcacacagctgccaacgctatcgagttcctgcactttgtgatttaaatccactctaaaccttccctctaagtgtagagggaagacccttacgtggagtttcctagtgggcttctcaacttttgatcctcagctctgtggttttaagaccacagtgtgacagttccctgccacacacccccttcctcctaccaacccacctttgagattcatatatagcctttaacactatgcaactttgtactttgcgtagcaggggcggggtggggggaaagaaactattatctgacacactggtgctattaattatttcaaatttatatttttgtgtgaatgttttgtgttttgtttatcatgattatagaataaggaatttatgtaaatatacttagtcctatttctagaatgacactctgttcactttgctcaatttttcctcttcactggcacaatgtatctgaatacctccttccctcccttctagaattctttggattgtactccaaagaattgtgccttgtgtttgcagcatctccattctctaaaattaatataattgctttcctccacacccagccactgtaaagaggtaacttgggtcctcttccattgcagtcctgatgatcctaacctgcagcacggtggttttacaatgttccagagcaggaacgccaggttgacaagctatggtaggattaggaaagtttgctgaagaggatctttgacgccacagtgggactagccaggaatgagggagaaatgccctttctggcaattgttggagctggataggtaagttttataagggagtacattttgactgagcacttagggcatcaggaacagtgctacttactgatgggtagactgggagaggtggtgtaacttagttcttgatgatcccacttcctgtttccatctgcttgggatataccagagtttaccacaagtgttttgacgatatactcctgagctttcactctgctgcttctcccaggcctcttctactatggcaggagatgtggcgtgctgttgcaaagttttcacgtcattgtttcctggctagttcatttcattaagtggctacatcctaacatatgcatttggtcaaggttgcagaagaggactgaagattgactgccaagctagtttgggtgaagttcactccagcaagtctcaggccacaatggggtggtttggtttggtttccttttaactttctttttgttatttgcttttctcctccacctgtgtggtatattttttaagcagaattttattttttaaaataaaaggttctttacaagatgataccttaattacactcccgcaacacagccattattttattgtctagctccagttatctgtattttatgtaatgtaattgacaggatggctgctgcagaatgctggttgacacagggattattatactgctatttttccctgaatttttttcctttgaattccaactgtggaccttttatatgtgccttcactttagctgtttgccttaatctctacagccttgctctccggggtggttaataaaatgcaacacttggcatttttatgttttaagaaaaacagtattttatttataataaaatctgaatatttgtaacccttta

SEQ ID NO: 147448 - DNA, 657 bp, Homo sapiens
  Payload ID: 9163
  Gene Symbol: LAMC1
  Gene Name: laminin, gamma 1 (formerly LAMB2)
  ENST ID: ENST00000484114
  CDS Start-End: 545-657
gcttattgcctgtactcagaaaacatgactgttgaagccctttgttcattcatttgaaagggatactttctcaaattgaaaagcttttgacatcacctatgtgcgtctcaagttccacaccagccgcccggagagctttgccatttacaagcgcacacgggaagacgggccctggattccttaccagtactacagtggttcctgtgagaacacctactccaaggcaaaccgcggcttcatcaggacaggaggggacgagcagcaggccttgtgtactgatgaattcagtgacatttctcccctcactgggggcaacgtggccttttctaccctggaaggaaggcccagcgcctataactttgacaatagccctgtgctgcaggaatgggtaactgccactgacatcagagtaactcttaatcgcctgaacacttttggagatgaagtgtttaacgatcccaaagttctcaagtcctattattatgccatctctgattttgctgtaggtggcagatgtaaatgtaatggacacgcaagcgagtgtatgaagaacgaatttgataagctggtgtgtaattgcaaacataacacatatggagtagactgtgaaaagtgtcttcctttcttcaatgaccggccgtggaggagggcaactgc

SEQ ID NO: 147449 - DNA, 5147 bp, Homo sapiens
  Payload ID: 9164
  Gene Symbol: LAMC2
  Gene Name: laminin, gamma 2
  Uniprot ID: Q13753
  ENST ID: ENST00000264144
  CDS Start-End: 66-3647
accaaccgaggcgccgggcagcgacccctgcagcggagacagagactgagcggcccggccccgccatgcctgcgctctggctgggctgctgcctctgcttctcgctcctcctgcccgcagcccgggccacctccaggagggaagtctgtgattgcaatgggaagtccaggcagtgtatctttgatcgggaacttcacagacaaactggtaatggattccgctgcctcaactgcaatgacaacactgatggcattcactgcgagaagtgcaagaatggcttttaccggcacagagaaagggaccgctgtttgccctgcaattgtaactccaaaggttctcttagtgctcgatgtgacaactccggacggtgcagctgtaaaccaggtgtgacaggagccagatgcgaccgatgtctgccaggcttccacatgctcacggatgcggggtgcacccaagaccagagactgctagactccaagtgtgactgtgacccagctggcatcgcagggccctgtgacgcgggccgctgtgtctgcaagccagctgtcactggagaacgctgtgataggtgtcgatcaggttactataatctggatggggggaaccctgagggctgtacccagtgtttctgctatgggcattcagccagctgccgcagctctgcagaatacagtgtccataagatcacctctacctttcatcaagatgttgatggctggaaggctgtccaacgaaatgggtctcctgcaaagctccaatggtcacagcgccatcaagatgtgtttagctcagcccaacgactagaccctgtctattttgtggctcctgccaaatttcttgggaatcaacaggtgagctatggtcaaagcctgtcctttgactaccgtgtggacagaggaggcagacacccatctgcccatgatgtgattctggaaggtgctggtctacggatcacagctcccttgatgccacttggcaagacactgccttgtgggctcaccaagacttacacattcaggttaaatgagcatccaagcaataattggagcccccagctgagttactttgagtatcgaaggttactgcggaatctcacagccctccgcatccgagctacatatggagaatacagtactgggtacattgacaatgtgaccctgatttcagcccgccctgtctctggagccccagcaccctgggttgaacagtgtatatgtcctgttgggtacaaggggcaattctgccaggattgtgcttctggctacaagagagattcagcgagactggggccttttggcacctgtattccttgtaactgtcaagggggaggggcctgtgatccagacacaggagattgttattcaggggatgagaatcctgacattgagtgtgctgactgcccaattggtttctacaacgatccgcacgacccccgcagctgcaagccatgtccctgtcataacgggttcagctgctcagtgatgccggagacggaggaggtggtgtgcaataactgccctcccggggtcaccggtgcccgctgtgagctctgtgctgatggctactttggggacccctttggtgaacatggcccagtgaggccttgtcagccctgtcaatgcaacaacaatgtggaccccagtgcctctgggaattgtgaccggctgacaggcaggtgtttgaagtgtatccacaacacagccggcatctactgcgaccagtgcaaagcaggctacttcggggacccattggctcccaacccagcagacaagtgtcgagcttgcaactgtaaccccatgggctcagagcctgtaggatgtcgaagtgatggcacctgtgtttgcaagccaggatttggtggccccaactgtgagcatggagcattcagctgtccagcttgctataatcaagtgaagattcagatggatcagtttatgcagcagcttcagagaatggaggccctgatttcaaaggctcagggtggtgatggagtagtacctgatacagagctggaaggcaggatgcagcaggctgagcaggcccttcaggacattctgagagatgcccagatttcagaaggtgctagcagatcccttggtctccagttggccaaggtgaggagccaagagaacagctaccagagccgcctggatgacctcaagatgactgtggaaagagttcgggctctgggaagtcagtaccagaaccgagttcgggatactcacaggctcatcactcagatgcagctgagcctggcagaaagtgaagcttccttgggaaacactaacattcctgcctcagaccactacgtggggccaaatggctttaaaagtctggctcaggaggccacaagattagcagaaagccacgttgagtcagccagtaacatggagcaactgacaagggaaactgaggactattccaaacaagccctctcactggtgcgcaaggccctgcatgaaggagtcggaagcggaagcggtagcccggacggtgctgtggtgcaagggcttgtggaaaaattggagaaaaccaagtccctggcccagcagttgacaagggaggccactcaagcggaaattgaagcagataggtcttatcagcacagtctccgcctcctggattcagtgtctcggcttcagggagtcagtgatcagtcctttcaggtggaagaagcaaagaggatcaaacaaaaagcggattcactctcaagcctggtaaccaggcatatggatgagttcaagcgtacacagaagaatctgggaaactggaaagaagaagcacagcagctcttacagaatggaaaaagtgggagagagaaatcagatcagctgctttcccgtgccaatcttgctaaaagcagagcacaagaagcactgagtatgggcaatgccactttttatgaagttgagagcatccttaaaaacctcagagagtttgacctgcaggtggacaacagaaaagcagaagctgaagaagccatgaagagactctcctacatcagccagaaggtttcagatgccagtgacaagacccagcaagcagaaagagccctggggagcgctgctgctgatgcacagagggcaaagaatggggccggggaggccctggaaatctccagtgagattgaacaggagattgggagtctgaacttggaagccaatgtgacagcagatggagccttggccatggaaaagggactggcctctctgaagagtgagatgagggaagtggaaggagagctggaaaggaaggagctggagtttgacacgaatatggatgcagtacagatggtgattacagaagcccagaaggttgataccagagccaagaacgctggggttacaatccaagacacactcaacacattagacggcctcctgcatctgatggaccagcctctcagtgtagatgaagaggggctggtcttactggagcagaagctttcccgagccaagacccagatcaacagccaactgcggcccatgatgtcagagctggaagagagggcacgtcagcagaggggccacctccatttgctggagacaagcatagatgggattctggctgatgtgaagaacttggagaacattagggacaacctgcccccaggctgctacaatacccaggctcttgagcaacagtgaagctgccataaatatttctcaactgaggttcttgggatacagatctcagggctcgggagccatgtcatgtgagtgggtgggatggggacatttgaacatgtttaatgggtatgctcaggtcaactgacctgaccccattcctgatcccatggccaggtggttgtcttattgcaccatactccttgcttcctgatgctgggcaatgaggcagatagcactgggtgtgagaatgatcaaggatctggaccccaaagaatagactggatggaaagacaaactgcacaggcagatgtttgcctcataatagtcgtaagtggagtcctggaatttggacaagtgctgttgggatatagtcaacttattctttgagtaatgtgactaaaggaaaaaactttgactttgcccaggcatgaaattcttcctaatgtcagaacagagtgcaacccagtcacactgtggccagtaaaatactattgcctcatattgtcctctgcaagcttcttgctgatcagagttcctcctacttacaacccagggtgtgaacatgttctccattttcaagctggaagaagtgagcagtgttggagtgaggacctgtaaggcaggcccattcagagctatggtgcttgctggtgcctgccaccttcaagttctggacctgggcatgacatcctttcttttaatgatgccatggcaacttagagattgcatttttattaaagcatttcctaccagcaaagcaaatgttgggaaagtatttactttttcggtttcaaagtgatagaaaagtgtggcttgggcattgaaagaggtaaaattctctagatttattagtcctaattcaatcctacttttcgaacaccaaaaatgatgcgcatcaatgtattttatcttattttctcaatctcctctctctttcctccacccataataagagaatgttcctactcacacttcagctgggtcacatccatccctccattcatccttccatccatctttccatccattacctccatccatccttccaacatatatttattgagtacctactgtgtgccaggggctggtgggacagtggtgacatagtctctgccctcatagagttgattgtctagtgaggaagacaagcatttttaaaaaataaatttaaacttacaaactttgtttgtcacaagtggtgtttattgcaataaccgcttggtttgcaacctctttgctcaacagaacatatgttgcaagaccctcccatgggggcacttgagttttggcaaggctgacagagctctgggttgtgcacatttctttgcattccagctgtcactctgtgcctttctacaactgattgcaacagactgttgagttatgataacaccagtgggaattgctggaggaaccagaggcacttccaccttggctgggaagactatggtgctgccttgcttctgtatttccttggattttcctgaaagtgtttttaaataaagaacaattgttaga

SEQ ID NO: 147450 - DNA, 4313 bp, Homo sapiens
  Payload ID: 9164
  Gene Symbol: LAMC2
  Gene Name: laminin, gamma 2
  Uniprot ID: Q13753
  ENST ID: ENST00000493293
  CDS Start-End: 116-3451
accacctgatcaaggaaaaggaaggcacagcggagcgcagagtgagaaccaccaaccgaggcgccgggcagcgacccctgcagcggagacagagactgagcggcccggccccgccatgcctgcgctctggctgggctgctgcctctgcttctcgctcctcctgcccgcagcccgggccacctccaggagggaagtctgtgattgcaatgggaagtccaggcagtgtatctttgatcgggaacttcacagacaaactggtaatggattccgctgcctcaactgcaatgacaacactgatggcattcactgcgagaagtgcaagaatggcttttaccggcacagagaaagggaccgctgtttgccctgcaattgtaactccaaaggttctcttagtgctcgatgtgacaactccggacggtgcagctgtaaaccaggtgtgacaggagccagatgcgaccgatgtctgccaggcttccacatgctcacggatgcggggtgcacccaagaccagagactgctagactccaagtgtgactgtgacccagctggcatcgcagggccctgtgacgcgggccgctgtgtctgcaagccagctgtcactggagaacgctgtgataggtgtcgatcaggttactataatctggatggggggaaccctgagggctgtacccagtgtttctgctatgggcattcagccagctgccgcagctctgcagaatacagtgtccataagatcacctctacctttcatcaagatgttgatggctggaaggctgtccaacgaaatgggtctcctgcaaagctccaatggtcacagcgccatcaagatgtgtttagctcagcccaacgactagaccctgtctattttgtggctcctgccaaatttcttgggaatcaacaggtgagctatggtcaaagcctgtcctttgactaccgtgtggacagaggaggcagacacccatctgcccatgatgtgattctggaaggtgctggtctacggatcacagctcccttgatgccacttggcaagacactgccttgtgggctcaccaagacttacacattcaggttaaatgagcatccaagcaataattggagcccccagctgagttactttgagtatcgaaggttactgcggaatctcacagccctccgcatccgagctacatatggagaatacagtactgggtacattgacaatgtgaccctgatttcagcccgccctgtctctggagccccagcaccctgggttgaacagtgtatatgtcctgttgggtacaaggggcaattctgccaggattgtgcttctggctacaagagagattcagcgagactggggccttttggcacctgtattccttgtaactgtcaagggggaggggcctgtgatccagacacaggagattgttattcaggggatgagaatcctgacattgagtgtgctgactgcccaattggtttctacaacgatccgcacgacccccgcagctgcaagccatgtccctgtcataacgggttcagctgctcagtgatgccggagacggaggaggtggtgtgcaataactgccctcccggggtcaccggtgcccgctgtgagctctgtgctgatggctactttggggacccctttggtgaacatggcccagtgaggccttgtcagccctgtcaatgcaacaacaatgtggaccccagtgcctctgggaattgtgaccggctgacaggcaggtgtttgaagtgtatccacaacacagccggcatctactgcgaccagtgcaaagcaggctacttcggggacccattggctcccaacccagcagacaagtgtcgagcttgcaactgtaaccccatgggctcagagcctgtaggatgtcgaagtgatggcacctgtgtttgcaagccaggatttggtggccccaactgtgagcatggagcattcagctgtccagcttgctataatcaagtgaagattcagatggatcagtttatgcagcagcttcagagaatggaggccctgatttcaaaggctcagggtggtgatggagtagtacctgatacagagctggaaggcaggatgcagcaggctgagcaggcccttcaggacattctgagagatgcccagatttcagaaggtgctagcagatcccttggtctccagttggccaaggtgaggagccaagagaacagctaccagagccgcctggatgacctcaagatgactgtggaaagagttcgggctctgggaagtcagtaccagaaccgagttcgggatactcacaggctcatcactcagatgcagctgagcctggcagaaagtgaagcttccttgggaaacactaacattcctgcctcagaccactacgtggggccaaatggctttaaaagtctggctcaggaggccacaagattagcagaaagccacgttgagtcagccagtaacatggagcaactgacaagggaaactgaggactattccaaacaagccctctcactggtgcgcaaggccctgcatgaaggagtcggaagcggaagcggtagcccggacggtgctgtggtgcaagggcttgtggaaaaattggagaaaaccaagtccctggcccagcagttgacaagggaggccactcaagcggaaattgaagcagataggtcttatcagcacagtctccgcctcctggattcagtgtctcggcttcagggagtcagtgatcagtcctttcaggtggaagaagcaaagaggatcaaacaaaaagcggattcactctcaagcctggtaaccaggcatatggatgagttcaagcgtacacagaagaatctgggaaactggaaagaagaagcacagcagctcttacagaatggaaaaagtgggagagagaaatcagatcagctgctttcccgtgccaatcttgctaaaagcagagcacaagaagcactgagtatgggcaatgccactttttatgaagttgagagcatccttaaaaacctcagagagtttgacctgcaggtggacaacagaaaagcagaagctgaagaagccatgaagagactctcctacatcagccagaaggtttcagatgccagtgacaagacccagcaagcagaaagagccctggggagcgctgctgctgatgcacagagggcaaagaatggggccggggaggccctggaaatctccagtgagattgaacaggagattgggagtctgaacttggaagccaatgtgacagcagatggagccttggccatggaaaagggactggcctctctgaagagtgagatgagggaagtggaaggagagctggaaaggaaggagctggagtttgacacgaatatggatgcagtacagatggtgattacagaagcccagaaggttgataccagagccaagaacgctggggttacaatccaagacacactcaacacattagacggcctcctgcatctgatgggtatgtgaacccacaacccacaaccttccagctccatgctccagggctttgctccagaacactcactatacctagccccagcaaaggggagtctcagctttccttaaggatatcagtaaatgtgctttgtttccaggcccagataactttcggcaggttcccttacatttactggaccctgttttaccgttgctaagatgggtcactgaacacctattgcacttgggggtaaaggtctgtgggccaaagaacaggtgtatataagcaacttcacagaacacgagacagcttgggaatcctgctaaagagtctggcctggaccctgagaagccagtggacagttttaagcagaggaataacatcaccactgtatatttcagaaagatcactagggcagccgagtggaggaaagcttgaagagggggttagagagaaggcaggttgagactacttaagatattgttgaaataattgaagagagaaatgacaggagcctgctctaaggcagtagaatggtggctgggaagatgtgaaggaagattttcccagtctgtgaagtcaagaatcacttgccggccgggtgtggtggctcacgcctgtaattctagcactttgggagactgaagcgggtggatcacccgaggtcaggagttgaagaccagcctggccaacatggtgaaaccctgtctctactaaaagtacaaaaattagctggatgtggtggtgggcgcctgtaattccagctactcaggagtctgaggcaggagaatcgcttgaacccaggaggcggaggttacagtgagccaagattgcaccactgctctccagcctggggaacagagcaagactgtctcaaaaaaaaaaaaaaaa

SEQ ID NO: 147451 - DNA, 3459 bp, Homo sapiens
  Payload ID: 9165
  Gene Symbol: LAMC3
  Gene Name: laminin, gamma 3
  ENST ID: ENST00000355452
  CDS Start-End: 1-773
gaaccctccagactgctgcccaggcgacgctacggcaaacagaacccctcacaaagctgcaccaggaggccagagccgccctgacccaggcttcctcatctgtccaggctgcgacagtgactgtcatgggagccaggactctgctggctgatctggaagacacgagaaagaagaccaagcaggcggagaggatgctgggaaacgcggcccctctttcctccagtgccaagaagaagggcagagaagcagaggtgttggccaaggacagtgccaagcttgccaaggccttgctgagggagcggaaacaggcgcaccgccgtgccagcaggctcaccagccagacgcaagccacgctccaacaggcgtcccagcaggtgctggcgtctgaagcacgcagacaggagctggaggaagctgagcgggtgggtgctgggctgagcgagatggagcagcagatccgggaatcgcgtatctcactggagaaggacatcgagaccttgtcagagctgcttgccaggctggggtcgctggacacccatcaagccccagcccaggccctgaacgagactcagtgggcactagaacgcctgaggctgcagctgggctccccggggtccttgcagaggaaactcagtctgctggagcaggaatcccagcagcaggagctgcagatccagggcttcgagagtgacctcgccgagatccgcgccgacaaacagaacctggaggccattctgcacagcctgcccgagaactgtgccagctggcagtgagggctgcccagatccccggcacacactcccccacctgctgtttacatgacccagggggtgcacactaccccacaggtgtgcccatacagacattccccggagccggctgctgtgaactcgcccccgtgtggatagtcactccctgccgattctgtctgtggcttcttccctgccagcaggactgagtgtgcgtacccagttcacctggacatgagtgcacactctcacccctgcacatgcataaacgggcacaccccagtgtcaataacatacacacgtgagggtgcatgtctgtgtgtatgacccacacgtgttcaagtctaatccatccagtcagcagcttacggtccacacacattacagtccacagctgttgtgagagccacctgtgtgctggacaccctctggatgttgggcaagttgttacatgagatgccctggggtgctacatccactcactccagatagcagggaggtctcagcagatctgcagagatcaagggggtcagcaacagccaaagcccctagtcccagagctggctgccctctgtttcacagcagctccctgacctgtgttgctgcgtgcactccctacagctcgacacagccaggggaccaacaggccaagaaatgcaagatcccgggagggttcttagcagcagaatctgaggcccagagaccctgaggccgtggccaggcctgctagtctggctagagcaaggcccattcctggcgggggtgtcattgccttcaccggacgcttccctctcagggtcctgggactgcaccagatgccctgagggaatggcccaccctggcctgtacccacttcagcctgtgatctatccaaagagccaggcccaaaagcgcctaggtcagggtgctcaggctaccaggagcacgcctctgtgcccccggcaacccagttgacctttaattgacgctttccagaccagccctgcggcaccacttgccatgcgggaggccaccagggtgtgcaagcctggctgccattccagtctgtcctgtctgggaatcgccctgtggccaggcccgcatgctggcctctgcccaggactcctcagcatttcctcttggcatccctcccctctcccagaccctcttccagcagatggcaaggcctcggcattgggaagtcaggcacctctgcgggcccagccccctcccgtggctcccctgacaggggcaggggtagggcagcagcacagaccaattccgttgaacgtggaaataaaggaccctttcactgggcagggtggtgtgcctcaccctccccggctggtgggcagccagggccctggctgtgggtgtgcatatgacacacctagtaggtggccagcatgtggaccggacgttggtaggaaggtggcaaaagccgagctcgtggctgggccagtacctcccattagagggctttgctggggttgtgtgatcacaggtacctaccctgtcctctcaggcacttaccacgtaaagcctaggagctggtgagttggaggggtggggtgcggagaggccctcagctgacctctggttcaggctcgagacgaactcacagccaagtgtccgaggatggtgaggagcagggaggggcgccatccaggagggggatggtgtgggtggggccttgaagggtggggaggcagagaaggaagcattccaggcaagagggtggacaacagtccggggcccgcagggttggggctcggccagcttgcatcactccaggaccccaggttgaatggggtgggatgttggagctgctcagtcagggctcttggccgcaggcctcaaacccctcctgaggtggtttcagcagaaaaggggtgttgggagggtcgcttggaaccctggagtaaaaacggctgccacgtgttggagatagcctagggaggggagcctgaggcttccgggataggttggcttccctcttcccccctcccgcctctcttcttggtctgtgtctctgctctcctctcctgtatctgcttcgttcttttctctttatttattgattttttttgagatggagtctcgctctgttgcccaggctggagtgcagtggcatgatctctgcccactgcatcctccacctcccaggtttaagcaattctcctgcctcagcctcccgagtagctaggactacaggtgcttgccaccatgcccagctaattttggtatttttagtagagacagggtttcaccacgttggtcaggctggtctcaaactcctgacctcagatgatatacctgcattggcctcttaaagttctgggatttcaggcatgagccactgcaaccggcccattcttttctctttgcagagtggctttctttgtttttcttgtgcctgataggagaggacacccacccctaccgccatcccccataatggccccaggtgtacatgtcatcaggtccagtgcttgcaagagacaagctggtgactctgtcctgattccagcttctcagcttaggtgaagtcccaccaacccccgttcaggataatgaggatctctggatctaaggccaataatggatgaccggtgccaccccccaacctaatgggagatggtgttcagagaagaggtgtgctcctccacagaaaactgtaaaatcaaggctacggtgggggattgacatgattaaactgagctaggagtga

SEQ ID NO: 147452 - DNA, 6133 bp, Homo sapiens
  Payload ID: 9165
  Gene Symbol: LAMC3
  Gene Name: laminin, gamma 3
  Uniprot ID: Q9Y6N6
  ENST ID: ENST00000361069
  CDS Start-End: 134-4861
gccgccgccgcccgcccctccctccagcctccccgccccgcaggggaaggcgggtcctggcggccagcgcgcggtccgcgcccaccctagccgagcggggccggcagagcgcgcggcgtcggtgcccttgaccatggcggcggctgcgcttctgctggggctggcgctgctggcaccgcgggcggccggcgcgggcatgggcgcgtgctatgacggcgcagggcgcccgcagcgctgcctgccggtgttcgagaacgcggcgtttgggcggctcgcccaggcctcgcacacgtgcggcagcccgcccgaggacttctgtccccacgtgggcgccgcgggcgcgggggctcattgccagcgctgcgacgccgccgacccccagcgccaccacaacgcctcctacctcaccgacttccacagccaggacgagagcacctggtggcagagcccgtccatggccttcggcgtgcagtaccccacctcggtcaacatcaccctccgcctagggaaggcttatgagatcacgtatgtgaggctgaagttccacaccagtcgccctgagagctttgccatctacaagcgcagccgcgccgacggcccatgggagccctaccagttctacagcgcctcctgccagaagacctacggccggcccgagggccagtacctgcgccccggcgaggacgagcgcgtggccttctgcacctctgagttcagcgacatctccccgctgagtggcggcaacgtggccttctccaccctggagggccggcccagcgcctacaacttcgaggagagccctgggctgcaggagtgggtcaccagcaccgaactcctcatctctctagaccggctcaacacgtttggggacgacatcttcaaggaccccaaggtgctccagtcctactattatgccgtgtccgacttctctgtgggcggcaggtgcaagtgcaacgggcatgccagcgagtgcggccccgacgtggcaggccagttggcctgccggtgccagcacaacaccaccggcacagactgtgagcgctgcctgcccttcttccaggaccgcccgtgggcccggggcaccgccgaggctgcccacgagtgtctgccctgcaactgcagtggccgctccgaggaatgcacgtttgatcgggagctcttccgcagcacaggccacggcgggcgctgtcaccactgccgtgaccacacagctgggccacactgtgagcgctgtcaggagaatttctatcactgggacccgcggatgccatgccagccctgtgactgccagtcggcaggctccctacacctccagtgcgatgacacaggcacctgcgcctgcaagcccacggtgactggctggaagtgtgaccgctgtctgcccgggttccactcgctcagtgagggaggctgcagaccctgcacttgcaatcccgctggcagcctggacacctgtgacccccgcagtgggcgctgcccctgcaaagagaatgtggaaggcaacctatgtgacagatgtcgcccggggacctttaacctgcagccccacaatccagctggctgcagcagctgtttctgctatggccactccaaggtgtgcgcgtccactgcccagttccaggtgcatcacatcctcagcgatttccaccagggagccgaaggctggtgggccagaagtgtggggggctctgagcaccccccacaatggagcccaaatggggtcctcctgagcccagaagacgaggaggagctcacagcaccagagaagttcctgggagaccagcggttcagctatgggcagcccctcatactgaccttccgggtgccccccggggactccccactccctgtacagctgaggctggaagggacaggcttggccctgtccctgaggcactctagcctgtctggcccccaggatgccgggcatcccagggaggtagagctcaggttccacctgcaggagacctccgaggacgtggcccctccactgccccccttccacttccagcggctcctcgccaacctgaccagcctccgcctccgcgtcagtcccggccccagccctgccggtccagtgttcctgactgaggtccggctcacatccgcccggccagggctttccccgccagcctcctgggtggagatttgttcatgtcccactggctacacgggccagttctgtgaatcctgtgctccgggatacaagagggagatgccacaggggggtccctatgccagctgtgtcccctgcacctgtaaccagcatggcacctgtgaccccaacacagggatctgtgtctgcagccaccataccgagggcccatcctgtgaacgctgtttgccaggtttctatggcaaccctttcgcgggccaagccgacgactgccagccctgtccctgccctggccagtcggcctgtacgaccatcccagagagccgggaggtggtgtgtacccactgccccccgggccagagagggcggcgctgtgaggtctgtgatgatggcttttttggggacccgctggggctctttgggcacccccagccctgccaccagtgccagtgtagcgggaacgtggaccccaatgccgtgggcaactgtgaccccctgtctggccactgcctgcgctgcctgcacaacaccacgggtgaccactgtgagcactgtcaggaaggcttctacgggagcgccctggcccctcgacccgcagacaaatgcatgccttgcagctgtcacccacagggctcggtcagtgagcagatgccctgcgacccagtgacaggccaatgctcctgcctgcctcatgtgactgcacgggactgcagccgctgctaccctggcttcttcgacctccagcctgggaggggctgccggagctgcaagtgtcacccactgggctcccaggaggaccagtgccatcccaagactggacagtgcacctgccgcccaggtgtcacaggccaggcctgtgacaggtgccagctgggtttcttcggcttctccatcaagggctgccgggcctgcaggtgctccccactgggcgctgcctcggcccagtgccacgagaacggcacatgcgtgtgcaggcctggcttcgagggctacaaatgtgaccgctgccacgacaacttcttcctcacggcagacggcacacactgccagcaatgtccgtcctgctacgccctggtgaaggaggaggcagccaagctgaaggccagactgactttgacggaggggtggctccaagggtccgactgtggcagtccctggggaccactagacattctgctgggagaggccccaaggggggacgtctaccagggccatcacctgcttccaggggctcgggaagccttcctggagcagatgatgagcctcgagggtgctgtcaaggccgcccgggagcagctgcagaggctgaacaagggtgcccgctgtgcccaggccggatcccagaagacctgcacccagctggcagacctggaggcagtgctggagtcctcggaagaggagattctgcatgcagctgccattctcgcgtctctggagattcctcaggaaggtcccagtcagccgaccaaatggagccacctggccacagaggcccgtgccctcgccaggagccacagagacaccgccaccaagatcgcagccactgcttggagggccctgctcgcctccaacaccagctacgcgcttctctggaatctgctggagggaagggtggccctagagacccagcgggacctggaggacaggtaccaggaggtccaggcggcccagaaagcactgaggacggctgtggcagaggtgctgcctgaagcggaaagcgtgttggccaccgtgcagcaagttggcgcagatacagccccgtacctggccttgctggcttccccgggagctctgcctcagaagtcccgggctgaagacctgggcctgaaggcgaaggccctggagaagacagttgcatcatggcagcacatggccactgaggctgcccgaaccctccagactgctgcccaggcgacgctacggcaaacagaacccctcacaaagctgcaccaggaggccagagccgccctgacccaggcttcctcatctgtccaggctgcgacagtgactgtcatgggagccaggactctgctggctgatctggaaggaatgaagctgcagtttccccggcccaaggaccaggcggcattgcagaggaaggcagactccgtcagtgacagactccttgcagacacgagaaagaagaccaagcaggcggagaggatgctgggaaacgcggcccctctttcctccagtgccaagaagaagggcagagaagcagaggtgttggccaaggacagtgccaagcttgccaaggccttgctgagggagcggaaacaggcgcaccgccgtgccagcaggctcaccagccagacgcaagccacgctccaacaggcgtcccagcaggtgctggcgtctgaagcacgcagacaggagctggaggaagctgagcgggtgggtgctgggctgagcgagatggagcagcagatccgggaatcgcgtatctcactggagaaggacatcgagaccttgtcagagctgcttgccaggctggggtcgctggacacccatcaagccccagcccaggccctgaacgagactcagtgggcactagaacgcctgaggctgcagctgggctccccggggtccttgcagaggaaactcagtctgctggagcaggaatcccagcagcaggagctgcagatccagggcttcgagagtgacctcgccgagatccgcgccgacaaacagaacctggaggccattctgcacagcctgcccgagaactgtgccagctggcagtgagggctgcccagatccccggcacacactcccccacctgctgtttacatgacccagggggtgcacactaccccacaggtgtgcccatacagacattccccggagccggctgctgtgaactcgcccccgtgtggatagtcactccctgccgattctgtctgtggcttcttccctgccagcaggactgagtgtgcgtacccagttcacctggacatgagtgcacactctcacccctgcacatgcataaacgggcacaccccagtgtcaataacatacacacgtgagggtgcatgtctgtgtgtatgacccacacgtgttcaagtctaatccatccagtcagcagcttacggtccacacacattacagtccacagctgttgtgagagccacctgtgtgctggacaccctctggatgttgggcaagttgttacatgagatgccctggggtgctacatccactcactccagatagcagggaggtctcagcagatctgcagagatcaagggggtcagcaacagccaaagcccctagtcccagagctggctgccctctgtttcacagcagctccctgacctgtgttgctgcgtgcactccctacagctcgacacagccaggggaccaacaggccaagaaatgcaagatcccgggagggttcttagcagcagaatctgaggcccagagaccctgaggccgtggccaggcctgctagtctggctagagcaaggcccattcctggcgggggtgtcattgccttcaccggacgcttccctctcagggtcctgggactgcaccagatgccctgagggaatggcccaccctggcctgtacccacttcagcctgtgatctatccaaagagccaggcccaaaagcgcctaggtcagggtgctcaggctaccaggagcacgcctctgtgcccccggcaacccagttgacctttaattgacgctttccagaccagccctgcggcaccacttgccatgcgggaggccaccagggtgtgcaagcctggctgccattccagtctgtcctgtctgggaatcgccctgtggccaggcccgcatgctggcctctgcccaggactcctcagcatttcctcttggcatccctcccctctcccagaccctcttccagcagatggcaaggcctcggcattgggaagtcaggcacctctgcgggcccagccccctcccgtggctcccctgacaggggcaggggtagggcagcagcacagaccaattccgttgaacgtggaaataaaggaccctttcactggg

SEQ ID NO: 147453 - DNA, 1647 bp, Homo sapiens
  Payload ID: 9166
  Gene Symbol: LANCL1
  Gene Name: LanC lantibiotic synthetase component C-like 1 (bacterial)
  Uniprot ID: O43813
  ENST ID: ENST00000233714
  CDS Start-End: 76-1275
gagaagggcttcaggacgcgggaggcgcacttgcttcaagtcgcgggcgtgggaacggggcttgcttccggcgtcatggctcaaagggccttcccgaatccttatgctgattataacaaatccctggccgaaggctactttgatgctgccgggaggctgactcctgagttctcacaacgcttgaccaataagattcgggagcttcttcagcaaatggagagaggcctgaaatcagcagaccctcgggatggcaccggttacactggctgggcaggtattgctgtgctttacttacatctttatgatgtatttggggaccctgcctacctacagttagcacatggctatgtaaagcaaagtctgaactgcttaaccaagcgctccatcaccttcctttgtggggatgcaggccccctggcagtggccgctgtgctatatcacaagatgaacaatgagaagcaggcagaagattgcatcacacggctaattcacctaaataagattgatcctcatgctccaaatgaaatgctctatgggcgaataggctacatctatgctcttctttttgtcaataagaactttggagtggaaaagattcctcaaagccatattcagcagatttgtgaaacaattttaacctctggagaaaacctagctaggaagagaaacttcacggcaaagtctccactgatgtatgaatggtaccaggaatattatgtaggggctgctcatggcctggctggaatttattactacctgatgcagcccagccttcaagtgagccaagggaagttacatagtttggtcaagcccagtgtagactacgtctgccagctgaaattcccttctggcaattaccctccatgtataggtgataatcgagatctgcttgtccattggtgccatggcgcccctggggtaatctacatgctcatccaggcctataaggtattcagagaggaaaagtatctctgtgatgcctatcagtgtgctgatgtgatctggcaatatgggttgctgaagaagggatatgggctgtgccacggttctgcagggaatgcctatgccttcctgacactctacaacctcacacaggacatgaagtacctgtatagggcctgtaagtttgctgaatggtgcttagagtatggagaacatggatgcagaacaccagacacccctttctctctctttgaaggaatggctggaacaatatatttcctggctgacctgctagtccccacaaaagccaggttccctgcatttgaactctgaaaggatagcatgccacctgcaactcactgcatgaccctttctgtatattcaaacccaagctaagtgcttccgttgctttccaaggaaacaaagagtcaaactgtggacttgattttgttagcttttttcagaatttatctttcattcagttcccttccattatcatttacttttacttagaagtatccaaggaagtcttttaactttaatttccatttcttcctaaagggagagtgagtgatatgtacagtgttttgagattgtatacatatattccagaacttggaggaaatcttatttaagtttatgaatataaccatctgttactgttctaaaaatgtttaaaagaaactcaatacagataaagataaa

SEQ ID NO: 147454 - DNA, 4781 bp, Homo sapiens
  Payload ID: 9166
  Gene Symbol: LANCL1
  Gene Name: LanC lantibiotic synthetase component C-like 1 (bacterial)
  Uniprot ID: O43813
  ENST ID: ENST00000443314
  CDS Start-End: 344-1543
actgtccggggctgcggggtgagaggccagggccgagaagggcttcaggacgcgggaggcgcacttgcttcaagtcgcgggcgtgggaacggggttgcaaaacggggcctctttgtccgggtgggttaagggccctggcagctttttcgcgaaggcgccatgtcctagcagttgggccgcagtgggcccgaggtccactcggaccgccgagacggctcgatggccctggagctggaggaagggggatacctgggcgccgccgccgccctcgcaactcggccgaggcccctatctcaacctagtttctgtttttcccctgttctgcaggcttgcttccggcgtcatggctcaaagggccttcccgaatccttatgctgattataacaaatccctggccgaaggctactttgatgctgccgggaggctgactcctgagttctcacaacgcttgaccaataagattcgggagcttcttcagcaaatggagagaggcctgaaatcagcagaccctcgggatggcaccggttacactggctgggcaggtattgctgtgctttacttacatctttatgatgtatttggggaccctgcctacctacagttagcacatggctatgtaaagcaaagtctgaactgcttaaccaagcgctccatcaccttcctttgtggggatgcaggccccctggcagtggccgctgtgctatatcacaagatgaacaatgagaagcaggcagaagattgcatcacacggctaattcacctaaataagattgatcctcatgctccaaatgaaatgctctatgggcgaataggctacatctatgctcttctttttgtcaataagaactttggagtggaaaagattcctcaaagccatattcagcagatttgtgaaacaattttaacctctggagaaaacctagctaggaagagaaacttcacggcaaagtctccactgatgtatgaatggtaccaggaatattatgtaggggctgctcatggcctggctggaatttattactacctgatgcagcccagccttcaagtgagccaagggaagttacatagtttggtcaagcccagtgtagactacgtctgccagctgaaattcccttctggcaattaccctccatgtataggtgataatcgagatctgcttgtccattggtgccatggcgcccctggggtaatctacatgctcatccaggcctataaggtattcagagaggaaaagtatctctgtgatgcctatcagtgtgctgatgtgatctggcaatatgggttgctgaagaagggatatgggctgtgccacggttctgcagggaatgcctatgccttcctgacactctacaacctcacacaggacatgaagtacctgtatagggcctgtaagtttgctgaatggtgcttagagtatggagaacatggatgcagaacaccagacacccctttctctctctttgaaggaatggctggaacaatatatttcctggctgacctgctagtccccacaaaagccaggttccctgcatttgaactctgaaaggatagcatgccacctgcaactcactgcatgaccctttctgtatattcaaacccaagctaagtgcttccgttgctttccaaggaaacaaagagtcaaactgtggacttgattttgttagcttttttcagaatttatctttcattcagttcccttccattatcatttacttttacttagaagtatccaaggaagtcttttaactttaatttccatttcttcctaaagggagagtgagtgatatgtacagtgttttgagattgtatacatatattccagaacttggaggaaatcttatttaagtttatgaatataaccatctgttactgttctaaaaatgtttaaaagaaactcaatacagataaagataaatatgtgactattattgggtattacacttcacttctctttaatatttttcctccaactggagggcagacaattttctgacttgcttttctctaggtggttcattttgaaaggggacagaaatataactaaatgcttccaggagaaaaattccaagagttacaatctggacttggtacctaaatatcattttttaaattcttgatgcctatttggactagaggtaaacatactttcagattggcctgtttttgtcggtaaggcatacagccttcagaagccaacatttttaatcaaaaacttataaaacatgatgatcattgtgaaaattctgagttgaaggttagtttaagataagctaacaataacagtctgtgttttctctaaaataatctgagttttttggaactctttatttaaatatgtgtgtttttcagtattcaaataagatcaggaagccaattttctatgtatgaatatgctttaacctaggatttcagtccactctgactgactttctaaactttaacttgggtttttacagtgactatgcattagtgctgactctttggtataagccataaaatattttccttcctatcaatttatctgaactttggtcttttcactaaattgtacagtattctacttctgtttaaaaaggggagatgagaaagggaatactatctaaccaataacttgaacaaaaacactaaactaagcatttaatagaaatgctttttattgaggaggtattatccagagttcatgcttagaacaaatgcatctttgcgtatcctagacttaacaattcatcagtttctgagaccacagaatcaggttttccgtagtagataaagactctctggtgcttcaaattctgttcaagtgttttgactcatcagcttctactctttctattactgcctttgcctggcttgttttgtctctttgcaactgattttgcaaaaaaaaattgtagctttaaaataacagggtctaagtattttaaatgtgcctatttcacagctctcttggtcacaaaaacatgctatttttattggaacttcaaaccaaatccccactgagtgtgtactggttcctgcaggtagcagtctcctattatctcctgtttagcaccaaaagagctaatattattggaaactgaccttttaaaggccactggcagtaggatttaaaaagcagcccactgctcagtttccaggatcagcttcctccttctgtcacttgtgtaagttggcactaccttgtgcctctcagattgctgaagtgctgctggtaagcatgtgcatgctctgcctttcttgtgaaagttttcaatcagcgatatcagcacttacagtaagaagtaaaagtagtgcacagcaaagctaatttgcctttgcctggggtgttcagcttgaaagaataaagctcatttggtttagttaaatgtcttactctactgtgcctatgcttttagctgcgttactaagcaagggaaaaataacagtttctctgagccagagaagacttgatcacagttctccaagcatcgtgatagcaatgcttaaccccaggaagatttcaaggcagggagaagaacatttcaaataagattcttgttaacccatttatgcctagtgttccattattggaatgctaagcttgtgggagtcatttacatcctactgctcaaagtcattgccaaggtctgatttttcacacaaaaaattgcaacccccagcataaatgggttagctactgtcatcagttagcaaattcatccacacaaacacaattagagtttggtttttttttaagcttttcaaaacttactaaactggcacaattttatatgtatgctatttgttgtatttatgcttaagagcaaaaaagttttgatgggattttaaattcaggcaaagcctacaacgctgagacaatcccctaacaacatggtagtaactaaagaaacttttatactaggcttcttagttttaaaaggaagtggcatcattgtttcagttctagtttgtatttttctctcagatatttttcttctttaaaaatctttcccagaagttggttcctagaaaactcaataccatcatctcttatctctatacagggactaggtaataaaaccttcaaaggttgtcaaaggtcatcaagcagtgttcatttatcctgtcacatgtttctgtttctatagtaatttagaaattgcaaatagttaacttttcatcatgtaaaaagttaacattatcctatttccatagataccatggacggcggtgtggcctgagttgtcagtctttaatcctgagtcatgtggctctcttttcatctttgatgtcagttccaattatttggcatcaaaaaccttcatggtaggtagagttttaggtaaaagtggatctagggttactttctttattaacatttcctaaataactgaattgagagacatactctgctactatgtcctcaggttaatttttgtctgatcttacgatgccctgccttttactagctactttagaaatagaaaatgtgaagagtgactatttacatgtatactcctttggctgctagaactcatctgtagtcctttattatttacactgaattccaatttcatttctgcttccgctaagtaagagcacctcattcctgtgttttctctactattgagctgtagacgaactgtttctctaattataaagcaaactgtttgggatattcagggaaactaccccaatgttatgttgtcatttaatgggaaaggctgggatcatatgtatttctatgttctgtaaagtatttgacttactagttctcaataaaattttattaggactatata

SEQ ID NO: 147455 - DNA, 4503 bp, Homo sapiens
  Payload ID: 9166
  Gene Symbol: LANCL1
  Gene Name: LanC lantibiotic synthetase component C-like 1 (bacterial)
  Uniprot ID: O43813
  ENST ID: ENST00000441020
  CDS Start-End: 66-1265
taaaatagcccttctgttactgtccggggctgcggggtgagaggccagggcttgcttccggcgtcatggctcaaagggccttcccgaatccttatgctgattataacaaatccctggccgaaggctactttgatgctgccgggaggctgactcctgagttctcacaacgcttgaccaataagattcgggagcttcttcagcaaatggagagaggcctgaaatcagcagaccctcgggatggcaccggttacactggctgggcaggtattgctgtgctttacttacatctttatgatgtatttggggaccctgcctacctacagttagcacatggctatgtaaagcaaagtctgaactgcttaaccaagcgctccatcaccttcctttgtggggatgcaggccccctggcagtggccgctgtgctatatcacaagatgaacaatgagaagcaggcagaagattgcatcacacggctaattcacctaaataagattgatcctcatgctccaaatgaaatgctctatgggcgaataggctacatctatgctcttctttttgtcaataagaactttggagtggaaaagattcctcaaagccatattcagcagatttgtgaaacaattttaacctctggagaaaacctagctaggaagagaaacttcacggcaaagtctccactgatgtatgaatggtaccaggaatattatgtaggggctgctcatggcctggctggaatttattactacctgatgcagcccagccttcaagtgagccaagggaagttacatagtttggtcaagcccagtgtagactacgtctgccagctgaaattcccttctggcaattaccctccatgtataggtgataatcgagatctgcttgtccattggtgccatggcgcccctggggtaatctacatgctcatccaggcctataaggtattcagagaggaaaagtatctctgtgatgcctatcagtgtgctgatgtgatctggcaatatgggttgctgaagaagggatatgggctgtgccacggttctgcagggaatgcctatgccttcctgacactctacaacctcacacaggacatgaagtacctgtatagggcctgtaagtttgctgaatggtgcttagagtatggagaacatggatgcagaacaccagacacccctttctctctctttgaaggaatggctggaacaatatatttcctggctgacctgctagtccccacaaaagccaggttccctgcatttgaactctgaaaggatagcatgccacctgcaactcactgcatgaccctttctgtatattcaaacccaagctaagtgcttccgttgctttccaaggaaacaaagagtcaaactgtggacttgattttgttagcttttttcagaatttatctttcattcagttcccttccattatcatttacttttacttagaagtatccaaggaagtcttttaactttaatttccatttcttcctaaagggagagtgagtgatatgtacagtgttttgagattgtatacatatattccagaacttggaggaaatcttatttaagtttatgaatataaccatctgttactgttctaaaaatgtttaaaagaaactcaatacagataaagataaatatgtgactattattgggtattacacttcacttctctttaatatttttcctccaactggagggcagacaattttctgacttgcttttctctaggtggttcattttgaaaggggacagaaatataactaaatgcttccaggagaaaaattccaagagttacaatctggacttggtacctaaatatcattttttaaattcttgatgcctatttggactagaggtaaacatactttcagattggcctgtttttgtcggtaaggcatacagccttcagaagccaacatttttaatcaaaaacttataaaacatgatgatcattgtgaaaattctgagttgaaggttagtttaagataagctaacaataacagtctgtgttttctctaaaataatctgagttttttggaactctttatttaaatatgtgtgtttttcagtattcaaataagatcaggaagccaattttctatgtatgaatatgctttaacctaggatttcagtccactctgactgactttctaaactttaacttgggtttttacagtgactatgcattagtgctgactctttggtataagccataaaatattttccttcctatcaatttatctgaactttggtcttttcactaaattgtacagtattctacttctgtttaaaaaggggagatgagaaagggaatactatctaaccaataacttgaacaaaaacactaaactaagcatttaatagaaatgctttttattgaggaggtattatccagagttcatgcttagaacaaatgcatctttgcgtatcctagacttaacaattcatcagtttctgagaccacagaatcaggttttccgtagtagataaagactctctggtgcttcaaattctgttcaagtgttttgactcatcagcttctactctttctattactgcctttgcctggcttgttttgtctctttgcaactgattttgcaaaaaaaaattgtagctttaaaataacagggtctaagtattttaaatgtgcctatttcacagctctcttggtcacaaaaacatgctatttttattggaacttcaaaccaaatccccactgagtgtgtactggttcctgcaggtagcagtctcctattatctcctgtttagcaccaaaagagctaatattattggaaactgaccttttaaaggccactggcagtaggatttaaaaagcagcccactgctcagtttccaggatcagcttcctccttctgtcacttgtgtaagttggcactaccttgtgcctctcagattgctgaagtgctgctggtaagcatgtgcatgctctgcctttcttgtgaaagttttcaatcagcgatatcagcacttacagtaagaagtaaaagtagtgcacagcaaagctaatttgcctttgcctggggtgttcagcttgaaagaataaagctcatttggtttagttaaatgtcttactctactgtgcctatgcttttagctgcgttactaagcaagggaaaaataacagtttctctgagccagagaagacttgatcacagttctccaagcatcgtgatagcaatgcttaaccccaggaagatttcaaggcagggagaagaacatttcaaataagattcttgttaacccatttatgcctagtgttccattattggaatgctaagcttgtgggagtcatttacatcctactgctcaaagtcattgccaaggtctgatttttcacacaaaaaattgcaacccccagcataaatgggttagctactgtcatcagttagcaaattcatccacacaaacacaattagagtttggtttttttttaagcttttcaaaacttactaaactggcacaattttatatgtatgctatttgttgtatttatgcttaagagcaaaaaagttttgatgggattttaaattcaggcaaagcctacaacgctgagacaatcccctaacaacatggtagtaactaaagaaacttttatactaggcttcttagttttaaaaggaagtggcatcattgtttcagttctagtttgtatttttctctcagatatttttcttctttaaaaatctttcccagaagttggttcctagaaaactcaataccatcatctcttatctctatacagggactaggtaataaaaccttcaaaggttgtcaaaggtcatcaagcagtgttcatttatcctgtcacatgtttctgtttctatagtaatttagaaattgcaaatagttaacttttcatcatgtaaaaagttaacattatcctatttccatagataccatggacggcggtgtggcctgagttgtcagtctttaatcctgagtcatgtggctctcttttcatctttgatgtcagttccaattatttggcatcaaaaaccttcatggtaggtagagttttaggtaaaagtggatctagggttactttctttattaacatttcctaaataactgaattgagagacatactctgctactatgtcctcaggttaatttttgtctgatcttacgatgccctgccttttactagctactttagaaatagaaaatgtgaagagtgactatttacatgtatactcctttggctgctagaactcatctgtagtcctttattatttacactgaattccaatttcatttctgcttccgctaagtaagagcacctcattcctgtgttttctctactattgagctgtagacgaactgtttctctaattataaagcaaactgtttgggatattcagggaaactaccccaatgttatgttgtcatttaatgggaaaggctgggatcatatgtatttctatgttctgtaaagtatttgacttactagttctcaataaaattttattaggactatata

SEQ ID NO: 147456 - DNA, 4602 bp, Homo sapiens
  Payload ID: 9166
  Gene Symbol: LANCL1
  Gene Name: LanC lantibiotic synthetase component C-like 1 (bacterial)
  Uniprot ID: O43813
  ENST ID: ENST00000450366
  CDS Start-End: 165-1364
aactgggcggtaaaatagcccttctgttactgtccggggctgcggggtgagaggccagggccgagaagggcttcaggacgcgggaggcgcacttgcttcaagtcgcgggcgtgggaacggggttgcaaaacggggcctctttgtccgggcttgcttccggcgtcatggctcaaagggccttcccgaatccttatgctgattataacaaatccctggccgaaggctactttgatgctgccgggaggctgactcctgagttctcacaacgcttgaccaataagattcgggagcttcttcagcaaatggagagaggcctgaaatcagcagaccctcgggatggcaccggttacactggctgggcaggtattgctgtgctttacttacatctttatgatgtatttggggaccctgcctacctacagttagcacatggctatgtaaagcaaagtctgaactgcttaaccaagcgctccatcaccttcctttgtggggatgcaggccccctggcagtggccgctgtgctatatcacaagatgaacaatgagaagcaggcagaagattgcatcacacggctaattcacctaaataagattgatcctcatgctccaaatgaaatgctctatgggcgaataggctacatctatgctcttctttttgtcaataagaactttggagtggaaaagattcctcaaagccatattcagcagatttgtgaaacaattttaacctctggagaaaacctagctaggaagagaaacttcacggcaaagtctccactgatgtatgaatggtaccaggaatattatgtaggggctgctcatggcctggctggaatttattactacctgatgcagcccagccttcaagtgagccaagggaagttacatagtttggtcaagcccagtgtagactacgtctgccagctgaaattcccttctggcaattaccctccatgtataggtgataatcgagatctgcttgtccattggtgccatggcgcccctggggtaatctacatgctcatccaggcctataaggtattcagagaggaaaagtatctctgtgatgcctatcagtgtgctgatgtgatctggcaatatgggttgctgaagaagggatatgggctgtgccacggttctgcagggaatgcctatgccttcctgacactctacaacctcacacaggacatgaagtacctgtatagggcctgtaagtttgctgaatggtgcttagagtatggagaacatggatgcagaacaccagacacccctttctctctctttgaaggaatggctggaacaatatatttcctggctgacctgctagtccccacaaaagccaggttccctgcatttgaactctgaaaggatagcatgccacctgcaactcactgcatgaccctttctgtatattcaaacccaagctaagtgcttccgttgctttccaaggaaacaaagagtcaaactgtggacttgattttgttagcttttttcagaatttatctttcattcagttcccttccattatcatttacttttacttagaagtatccaaggaagtcttttaactttaatttccatttcttcctaaagggagagtgagtgatatgtacagtgttttgagattgtatacatatattccagaacttggaggaaatcttatttaagtttatgaatataaccatctgttactgttctaaaaatgtttaaaagaaactcaatacagataaagataaatatgtgactattattgggtattacacttcacttctctttaatatttttcctccaactggagggcagacaattttctgacttgcttttctctaggtggttcattttgaaaggggacagaaatataactaaatgcttccaggagaaaaattccaagagttacaatctggacttggtacctaaatatcattttttaaattcttgatgcctatttggactagaggtaaacatactttcagattggcctgtttttgtcggtaaggcatacagccttcagaagccaacatttttaatcaaaaacttataaaacatgatgatcattgtgaaaattctgagttgaaggttagtttaagataagctaacaataacagtctgtgttttctctaaaataatctgagttttttggaactctttatttaaatatgtgtgtttttcagtattcaaataagatcaggaagccaattttctatgtatgaatatgctttaacctaggatttcagtccactctgactgactttctaaactttaacttgggtttttacagtgactatgcattagtgctgactctttggtataagccataaaatattttccttcctatcaatttatctgaactttggtcttttcactaaattgtacagtattctacttctgtttaaaaaggggagatgagaaagggaatactatctaaccaataacttgaacaaaaacactaaactaagcatttaatagaaatgctttttattgaggaggtattatccagagttcatgcttagaacaaatgcatctttgcgtatcctagacttaacaattcatcagtttctgagaccacagaatcaggttttccgtagtagataaagactctctggtgcttcaaattctgttcaagtgttttgactcatcagcttctactctttctattactgcctttgcctggcttgttttgtctctttgcaactgattttgcaaaaaaaaattgtagctttaaaataacagggtctaagtattttaaatgtgcctatttcacagctctcttggtcacaaaaacatgctatttttattggaacttcaaaccaaatccccactgagtgtgtactggttcctgcaggtagcagtctcctattatctcctgtttagcaccaaaagagctaatattattggaaactgaccttttaaaggccactggcagtaggatttaaaaagcagcccactgctcagtttccaggatcagcttcctccttctgtcacttgtgtaagttggcactaccttgtgcctctcagattgctgaagtgctgctggtaagcatgtgcatgctctgcctttcttgtgaaagttttcaatcagcgatatcagcacttacagtaagaagtaaaagtagtgcacagcaaagctaatttgcctttgcctggggtgttcagcttgaaagaataaagctcatttggtttagttaaatgtcttactctactgtgcctatgcttttagctgcgttactaagcaagggaaaaataacagtttctctgagccagagaagacttgatcacagttctccaagcatcgtgatagcaatgcttaaccccaggaagatttcaaggcagggagaagaacatttcaaataagattcttgttaacccatttatgcctagtgttccattattggaatgctaagcttgtgggagtcatttacatcctactgctcaaagtcattgccaaggtctgatttttcacacaaaaaattgcaacccccagcataaatgggttagctactgtcatcagttagcaaattcatccacacaaacacaattagagtttggtttttttttaagcttttcaaaacttactaaactggcacaattttatatgtatgctatttgttgtatttatgcttaagagcaaaaaagttttgatgggattttaaattcaggcaaagcctacaacgctgagacaatcccctaacaacatggtagtaactaaagaaacttttatactaggcttcttagttttaaaaggaagtggcatcattgtttcagttctagtttgtatttttctctcagatatttttcttctttaaaaatctttcccagaagttggttcctagaaaactcaataccatcatctcttatctctatacagggactaggtaataaaaccttcaaaggttgtcaaaggtcatcaagcagtgttcatttatcctgtcacatgtttctgtttctatagtaatttagaaattgcaaatagttaacttttcatcatgtaaaaagttaacattatcctatttccatagataccatggacggcggtgtggcctgagttgtcagtctttaatcctgagtcatgtggctctcttttcatctttgatgtcagttccaattatttggcatcaaaaaccttcatggtaggtagagttttaggtaaaagtggatctagggttactttctttattaacatttcctaaataactgaattgagagacatactctgctactatgtcctcaggttaatttttgtctgatcttacgatgccctgccttttactagctactttagaaatagaaaatgtgaagagtgactatttacatgtatactcctttggctgctagaactcatctgtagtcctttattatttacactgaattccaatttcatttctgcttccgctaagtaagagcacctcattcctgtgttttctctactattgagctgtagacgaactgtttctctaattataaagcaaactgtttgggatattcagggaaactaccccaatgttatgttgtcatttaatgggaaaggctgggatcatatgtatttctatgttctgtaaagtatttgacttactagttctcaataaaattttattaggactatata

SEQ ID NO: 147457 - DNA, 590 bp, Homo sapiens
  Payload ID: 9166
  Gene Symbol: LANCL1
  Gene Name: LanC lantibiotic synthetase component C-like 1 (bacterial)
  ENST ID: ENST00000453956
  CDS Start-End: 103-351
gagaagggcttcaggacgcgggaggcgcacttgcttcaagtcgcgggcgtgggaacggggttgcaaaacggggcctctttgtccgggcttgcttccggcgtcatggctcaaagggccttcccgaatccttatgctgattataacaaatccctggccgaaggctactttgatgctgccgggaggctgactcctgagttctcacaacgcttgaccaataagattcgggagcttcttcagcaaatggagagaggcctgaaatcagcagaccctcgggatggcaccggttacactggctgggcagtgggaagaattgggaagagttccaaaatacaatgcctgaagcggaggtaatgaggattgatctcaggaataaaatatgtccagaagcatgttttaaaaagttaacccgtaacaggaatccatacaggaatccatacaggggagattgatttggattttgattcacaacaccttaaagttttgtgttttttttttttcattcagtaagtctttgcgtaaagcctgccacagaaagtattgctgtgctttacttacatctttatgatgtatttggggaccctgcctaccta

SEQ ID NO: 147458 - DNA, 808 bp, Homo sapiens
  Payload ID: 9166
  Gene Symbol: LANCL1
  Gene Name: LanC lantibiotic synthetase component C-like 1 (bacterial)
  ENST ID: ENST00000448951
  CDS Start-End: 220-808
agagtttgggatggcagcctcagaaggacaaacttaggccaaggagggagggagttggggtggagactgagcttctccagttggaggtctggagctaggactcttcattgaaaccggagagaaggaaaaggagagagtgaggctgactttttaactgaactccaaaattctctgagcaatagaatgggcctaatatgtaccaggcttgcttccggcgtcatggctcaaagggccttcccgaatccttatgctgattataacaaatccctggccgaaggctactttgatgctgccgggaggctgactcctgagttctcacaacgcttgaccaataagattcgggagcttcttcagcaaatggagagaggcctgaaatcagcagaccctcgggatggcaccggttacactggctgggcaggtattgctgtgctttacttacatctttatgatgtatttggggaccctgcctacctacagttagcacatggctatgtaaagcaaagtctgaactgcttaaccaagcgctccatcaccttcctttgtggggatgcaggccccctggcagtggccgctgtgctatatcacaagatgaacaatgagaagcaggcagaagattgcatcacacggctaattcacctaaataagattgatcctcatgctccaaatgaaatgctctatgggcgaataggctacatctatgctcttctttttgtcaataagaactttggagtggaaaagattcctcaaagccatattcagcagatttgtgaaacaattttaacctctggagaaaacctagctaggaaga

SEQ ID NO: 147459 - DNA, 1270 bp, Homo sapiens
  Payload ID: 9166
  Gene Symbol: LANCL1
  Gene Name: LanC lantibiotic synthetase component C-like 1 (bacterial)
  Uniprot ID: O43813
  ENST ID: ENST00000431941
  CDS Start-End: 71-1270
ctggcaggaactgggcggtaaaatagcccttctgttactgtccggggctgcggggcttgcttccggcgtcatggctcaaagggccttcccgaatccttatgctgattataacaaatccctggccgaaggctactttgatgctgccgggaggctgactcctgagttctcacaacgcttgaccaataagattcgggagcttcttcagcaaatggagagaggcctgaaatcagcagaccctcgggatggcaccggttacactggctgggcaggtattgctgtgctttacttacatctttatgatgtatttggggaccctgcctacctacagttagcacatggctatgtaaagcaaagtctgaactgcttaaccaagcgctccatcaccttcctttgtggggatgcaggccccctggcagtggccgctgtgctatatcacaagatgaacaatgagaagcaggcagaagattgcatcacacggctaattcacctaaataagattgatcctcatgctccaaatgaaatgctctatgggcgaataggctacatctatgctcttctttttgtcaataagaactttggagtggaaaagattcctcaaagccatattcagcagatttgtgaaacaattttaacctctggagaaaacctagctaggaagagaaacttcacggcaaagtctccactgatgtatgaatggtaccaggaatattatgtaggggctgctcatggcctggctggaatttattactacctgatgcagcccagccttcaagtgagccaagggaagttacatagtttggtcaagcccagtgtagactacgtctgccagctgaaattcccttctggcaattaccctccatgtataggtgataatcgagatctgcttgtccattggtgccatggcgcccctggggtaatctacatgctcatccaggcctataaggtattcagagaggaaaagtatctctgtgatgcctatcagtgtgctgatgtgatctggcaatatgggttgctgaagaagggatatgggctgtgccacggttctgcagggaatgcctatgccttcctgacactctacaacctcacacaggacatgaagtacctgtatagggcctgtaagtttgctgaatggtgcttagagtatggagaacatggatgcagaacaccagacacccctttctctctctttgaaggaatggctggaacaatatatttcctggctgacctgctagtccccacaaaagccaggttccctgcatttgaactctga

SEQ ID NO: 147460 - DNA, 441 bp, Homo sapiens
  Payload ID: 9166
  Gene Symbol: LANCL1
  Gene Name: LanC lantibiotic synthetase component C-like 1 (bacterial)
  ENST ID: ENST00000412863
  CDS Start-End: 1-441
gatttgtgaaacaattttaacctctggagaaaacctagctaggaagagaaacttcacggcaaagtctccactgatgtatgaatggtaccaggaatattatgtaggggctgctcatggcctggctggaatttattactacctgatgcaggtattcagagaggaaaagtatctctgtgatgcctatcagtgtgctgatgtgatctggcaatatgggttgctgaagaagggatatgggctgtgccacggttctgcagggaatgcctatgccttcctgacactctacaacctcacacaggacatgaagtacctgtatagggcctgtaagtttgctgaatggtgcttagagtatggagaacatggatgcagaacaccagacacccctttctctctctttgaaggaatggctggaacaatatatttcctggctgacctgctagtccc

SEQ ID NO: 147461 - DNA, 4353 bp, Homo sapiens
  Payload ID: 9167
  Gene Symbol: LANCL2
  Gene Name: LanC lantibiotic synthetase component C-like 2 (bacterial)
  Uniprot ID: Q9NS86
  ENST ID: ENST00000254770
  CDS Start-End: 579-1931
gggctggcgcagcaggggccggtgaaatgcaggctgacgacggcgcgccaggggctgagctcgccccggtcggcgacgcgcacacaccttgagtgacagcgacctcttctctacaggttttccccgcgggagcgtggccctagcgggcgttcggttttctttggaaatcgcggagggggctggccgggcgcagcgatccccaccccgggactccagccccggccgtgcgcgtcgccgcggacgggctctgcgggccacggggaaggtgcgaggaggcgcgagcaggctgtgagccgctgggcgctcccgcgagcccgctcctctccgtcgggagcagggcaaaggcgccaggaacagggcagaggcacagcgcccaccgcctctgcggccgcctgatgtgcgagcagcccgcgacgaggcagtgcacgctcagacgccccgctcctcccgccagcgcgcggcctcgctcctcctagaggacgctctctgcgcgggccctcggaggaggcggcggcggggcgagctgcagcgccgggacaggaggtttgtccccgcccgcgcgccgtaccgcggcggagatgggcgagaccatgtcaaagaggctgaagctccacctgggaggggaggcagaaatggaggaacgggcgttcgtcaaccccttcccggactacgaggccgccgccggggcgctgctcgcctccggagcggccgaagagacaggctgtgttcgtcccccggcgaccacggatgagcccggcctcccttttcatcaggacgggaagatcattcataatttcataagacggatccagaccaaaattaaagatcttctgcagcaaatggaagaagggctgaagacagctgatccccatgactgctctgcttatactggctggacaggcatagcccttttgtacctgcagttgtaccgggtcacatgtgaccaaacctacctgctccgatccctggattacgtaaaaagaacacttcggaatctgaatggccgcagggtcaccttcctctgtggggatgctggccccctggctgttggagctgtgatttatcacaaactcagaagtgactgtgagtcccaggaatgtgtcacaaaacttttgcagctccagagatcggttgtctgccaagaatcagaccttcctgatgagctgctttatggacgggcaggttatctgtatgccttactgtacctgaacacagagataggtccaggcaccgtgtgtgagtcagctattaaagaggtagtcaatgctattattgaatcgggtaagactttgtcaagggaagaaagaaaaacggagcgctgcccgctgttgtaccagtggcaccggaagcagtacgttggagcagcccatggcatggctggaatttactatatgttaatgcagccggcagcaaaagtggaccaagaaaccttgacagaaatggtgaaacccagtattgattatgtgcgccacaaaaaattccgatctgggaattacccatcatcattaagcaatgaaacagaccggctggtgcactggtgccacggcgccccgggggtcatccacatgctcatgcaggcgtacaaggtctttaaggaggagaagtacttgaaagaggccatggagtgtagcgatgtgatttggcagcgaggtttgctgcggaagggctacgggatatgccatgggactgctggcaacggctattccttcctgtccctttaccgtctcacgcaggataagaagtacctctaccgagcttgcaagtttgcagagtggtgtctagattacggagcacacgggtgccgcattcctgacagaccctattcgctctttgaaggcatggctggcgctattcactttctctctgatgtcctgggaccagagacatcacggtttccagcatttgaacttgactcttcgaagagggattaaaaggtgcaaaaagacaactaaaatacccatttggaccaaaagccaccagattgcttagtgcctgacacagaaacaactgggaatcctgaaagagaagcagacaccgtcacaggcccctctggttagactagcatgagtgaccgaagccatccatcaacattttctaacagcaccctcatcaatataaaatatgacttcttcacatacagattctctgtagtgtttgcatgtttcttggtgtttgttgtctccaggtgtaagctgttttaaatggaaggcccttctattcctgagggctcagagctgaccatgcatgaatgtatggcagtgtccacttttctgtataaaatgtataaagtggggtttcttccatattgacaaatgagggaacaggtggtgtctatcttgtatatcagaaagattatctagggtctatcctagtgataatacattgtcagccttttctgtggcaccttccagatgagaatgagggagcgaccactccaaggacggacaggaccagcagttctgcaggggcgtgctggggtggtttgggagtgcacagctgaacgcttcccgtttggattttacactcaccttcgtgttttaaagaagcctcagagtgcattgcagctctgtcagggccccattcccagcagaggcttcaggtgctttgtgtagagtccagggcagctggagctttgttggggagacttctggacccaaagggagctttcccaagaagcctttgatggccacactgtaggcagcagtgactaagcactggcagttccagaacatttacccaggtatatgttactaaaacaggctccacctcagtttatcaacattataagttactgttctaagaaaagtaaatacagttccagatgggttattgcagattaacagaaagacactcaactggactcatgtccctgcaattaaacttacttcaaccttttggaaagttatcaaaatctaaatttggaatgaatgcatttcctattttttgtctacttttgggtgataaaaagtactagcccttatttatagatatgagaaacataatgttctaaccaacaacattatggtatttgtgtgacttttatttgaaaaaatgtgagcagtaatttgggttagcctaccttcattaattctatcacatagatttcagtttttagaagggtttctgtcatcatggaagaggtggtctgggactaggtacttctcgtcttgtgagctaaggcttgtgtcatgaaagacaagaggcctctcttaacagcccagtccttgtctgcagggggaggcctgagcatttcccagccccagtgtccacacctctcagaaaagagaaaaaagaatgtcagtttaggagaaaagcttcctttttacttgtgtggttatgtgtggggctggcacccgaaatgtgtgacattcagcttctaaacgatgcctggagagtctgtttgctgcagacacccttgctcctgagtcattattttctttcatgttagattgatgacttctgtgaatagaaatcatcctgatcctattttacctggcctccagggcctgttgatgggctttgcaggcagtccagcagcccacacctgcaggcaggatgctgtcgtcaatgagctgagggtagctgctttgctgaagacctcacacgatgtccaatctcatccaaataacattgttcccatcctccccacccaccacatcaaaacataacacatcacagcactcagtagaggtcctgcctccccatttctcaagggaagccagtaggcaacacagccagcacggtgctctccagggcagcccctctcagacgaggaggcagcgggtgcagccaggtgtctgcagagcagccacaaaggtggcctaggatgcgggtgtctccccaggtgagtccatccacacacgtttgaaaaacactattagtctttctaacacactgagggaaagattaaaatctgtggaataaaggaggagattttatttacagatttttttaaaagccacctgggttgacaccttcctacttatccactagatgtcatcagaggtgctgttccgtggttctgcattaacccctgcctcatgtctgtaacatgtgacagtaattccagctcggtccctccaggcaaaggagaaacgggacttacttcacaggacagaggattgacagaagtcagtttaagataagtgtttgaatcagatttcagtacatctcattcatttcttagatttgtattcacaattgtgttctctaaaatgtgtctaaattttaaaaatatgtacatgcataatgtcattttaaaatctgaaggaaagaatttgaagtccacaaaaagtgtttgaggttctttggttttgttagtaaaagccagttctgtggtgatgacctatggaa

SEQ ID NO: 147462 - DNA, 1663 bp, Homo sapiens
  Payload ID: 9167
  Gene Symbol: LANCL2
  Gene Name: LanC lantibiotic synthetase component C-like 2 (bacterial)
  ENST ID: ENST00000452107
  CDS Start-End: 1-122
cggactacgaggccgccgccggggcgctgctcgcctccggagcggccgaagagacaggctgtgttcgtcccccggcgaccacggatgagcccggcctcccttttcatcaggacgggaagtagaaaccaaaggtcaagacacaggaggcctaagttactaacatggagtcaaaaagtttttaagaagttggatggagaaccagacagttactctttttggtgcattcagtaacagaagcaaagttaaatacatttacaagcacatcaccaaaacaatagggaatggcaaatccagaaagcattgctaatcattcataatttcataagacggatccagaccaaaattaaagatcttctgcagcaaatggaagaagggctgaagacagctgatccccatgactgctctgcttatactggctggacaggcatagcccttttgtacctgcagttgtaccgggtcacatgtgaccaaacctacctgctccgatccctggattacgtaaaaagaacacttcggaatctgaatggccgcagggtcaccttcctctgtggggatgctggccccctggctgttggagctgtgatttatcacaaactcagaagtgactgtgagtcccaggaatgtgtcacaaaacttttgcagctccagagatcggttgtctgccaagaatcagaccttcctgatgagctgctttatggacgggcaggttatctgtatgccttactgtacctgaacacagagataggtccaggcaccgtgtgtgagtcagctattaaagaggtagtcaatgctattattgaatcgggtaagactttgtcaagggaagaaagaaaaacggagcgctgcccgctgttgtaccagtggcaccggaagcagtacgttggagcagcccatggcatggctggaatttactatatgttaatgcagccggcagcaaaagtggaccaagaaaccttgacagaaatggtgaaacccagtattgattatgtgcgccacaaaaaattccgatctgggaattacccatcatcattaagcaatgaaacagaccggctggtgcactggtgccacggcgccccgggggtcatccacatgctcatgcaggcgtacaaggtctttaaggaggagaagtacttgaaagaggccatggagtgtagcgatgtgatttggcagcgaggtttgctgcggaagggctacgggatatgccatgggactgctggcaacggctattccttcctgtccctttaccgtctcacgcaggataagaagtacctctaccgagcttgcaagtttgcagagtggtgtctagattacggagcacacgggtgccgcattcctgacagaccctattcgctctttgaaggcatggctggcgctattcactttctctctgatgtcctgggaccagagacatcacggtttccagcatttgaacttgactcttcgaagagggattaaaaggtgcaaaaagacaactaaaatacccatttggaccaaaagccaccagattgcttagtgcctgacacagaaacaactgggaatcctgaaagagaagcagacaccgtcacaggcccctctggttagactagcatgagtgaccgaagccatccatcaacattttctaacagcaccctcatcaatataaaatatgacttcttcacataca

SEQ ID NO: 147463 - DNA, 3063 bp, Homo sapiens
  Payload ID: 9168
  Gene Symbol: LANCL3
  Gene Name: LanC lantibiotic synthetase component C-like 3 (bacterial)
  Uniprot ID: Q6ZV70
  ENST ID: ENST00000378619
  CDS Start-End: 220-1482
gcccgggccactcgggagcctcgcggcagcccggcgccccacttggccatccgctccttgcccgcctcctcttgtcacctcccgtctcatccttctcgctccttccccgccgcatacaccggcatccgagtgcctcagagagccggaggtggtgtgcggggctgcagggcacgacttcaagcggtcctcagctccgcactagggggcacgggcaacagcatggacaccaagcgctgcttcgccaatcgcttcgatgactaccagggcagcctgctggcgggccagtgtgaggaggcggtggcgcccttggtcaccgccaccatcgagcgcatcctccaggagcttcccccactcgggggcggcgcggaggcccgaggggcgacggcgggggctagcgcctgccagggggggctttatggcggcgtggccggagtggcgtatatgctctaccacgtctcgcagagcccgcttttcgccacggcccgggaacgctacctgcgctcggctaagcgcctcatcgacgcgtgcgcccgcgctgaggagtggggcgaaccggacgccgacacccgcgccgccttcctgctcgggggcgcgggcgtgtacgccgtggccacgctcgtataccacgccctgggccggtccgactacgtgcagccgctgggcaagttccgggctctgtgtgccgtctgcgcgccggtctccttcctggagtgcggctccgacgagctgttcgtgggccgcgcgggttacctgtgtgccgcgctggtgctcaagcagaaactcgcccaggaggtgctgactccagcacagatcaagtcaatttgtcaggcaattctggactctgggaagcagtatgccataaagaagaggaaaccattccccctgatgtattcttactatggaaccgaatacttgggggcagctcacggcttgtcgtctattcttcagatgcttctttcttaccatgagcatctcaagccctcagatcgggaattggtatggcagagcgtggactttctcatggaacaggaacaaaactgcaactggccacctgagctcggcgagaccatcgagagagagaatgagctggtgcactggtgccatggcgctccaggaattgcctatctgtttgccaaagcttatctggtttccaagaaaccgcagtacctggacacatgtattcggtgtggggaactcacatggcagaaaggcctgctaaagaaggggcctgggatttgccatggagtagccggcagtgcctatgtcttcctgctgctgtaccggctcacgggaaactctaaatacatctaccgagctcaaaggtttgctcaattcttatttaccgaggaattcaaggccggttctcgggtccttgaaagtatatacagcttgtatgaaggcttctctgggacagtgtgctttctgattgacctgctgcagcccaatcaggctgaattcccactcttcagcgtctttgtttagaaggctctatcttccactgtggccctgcagagatcccctgagccaagccgaggcagtttccacataagccacattcaatggtatcgcaaccatgagccttaacattgccatcagaaggaaggaatcaggcaggtgaaggcaacatgatgccagatttgagaaaggatctgcaaaataaagataccacaattcatcttaaaactgcagagatttaatgtgtcagggaatagatgtgaaacaagggatcataggaaaaggggaaagagaaatgatctgtttttcagttatgacatagaaaaccaaactgcaagtgtagactatgacaaaaaatacactaatacctttgcaatctgaatgagaatttgaccatttgtgtgtgccctctacccttaaattcagaaataaagacaataaaaaattaaaataattgcccagctgaaaactgctatgaggaatggattgtcaggttgctgaagtataaaaataaactcttggttgtcctgtgcttatacttattgaaatttatggtttttactgagcaaagatatttgcatatgaatctctatttttttcattaccctgggcaatttaaagaaatcatatcatagcgtagttcagatactaaaatttgaagtttccttaggccctagaacatctcttttcctggttccttttttttcctcaaagctcaattagaatagcaaaatttataagctagtaaacttatactatagcaagtgttgctgtaaagtgtttttctccataggaagtgtgaactgtgtattgtctattgttagtaattttaaaaatgcctttatgtacataatcttgatggagctattagctgaactataaaatatgctcttggtaaatatcactaatttcaaagatcaggggaaccactacaaagacgtgtcatttctgcctttgtttgggacaggcagacaggctgaggaagtcaccagtgattgtggaaataattttgctccattttatactattaaatgaagagatgagtgaattctgtggttggttaccttaccttccaagatacagggtccactagaaattggctgtaatactcattgagccaagttgtcatatcaaattcaaccctgctgtaaacacatagaagttgtgaaactgcttcaagtaaatagtggtttgcagaacactgtaggagcatctgtcacttcattatgcagagcataagttgatccttttcctagaattttgtcagtggcaattgcatatatcagattgagtaggaaattgtgtactgtataagacttatttaaatagtcattaaatatttggatatattatgtgtgtgtgtgtgtgtgtgtgtgtgtgtatggtgtgtattccatatctattcccatgtaaatccaaatacttattctttatttcagtaattcttaacttgaatcatagactttggaacgagttagggaatgctctgttgcctaaaaagcaaacctacaagtatgttggtgtgtgtatgtgtatggaccagtttgtttgtgtgtgtgtgtgctcattttgaggggacaaggatctctagcattcataacattctca

SEQ ID NO: 147464 - DNA, 10298 bp, Homo sapiens
  Payload ID: 9168
  Gene Symbol: LANCL3
  Gene Name: LanC lantibiotic synthetase component C-like 3 (bacterial)
  Uniprot ID: Q6ZV70
  ENST ID: ENST00000378621
  CDS Start-End: 303-1469
aagctgcggcggcgcaggagggggcgggttcagcgagggcgcggcctctgagggggggcgcaggacacgcatcccccgcgatcgcccgggccactcgggagcctcgcggcagcccggcgccccacttggccatccgctccttgcccgcctcctcttgtcacctcccgtctcatccttctcgctccttccccgccgcatacaccggcatccgagtgcctcagagagccggaggtggtgtgcggggctgcagggcacgacttcaagcggtcctcagctccgcactagggggcacgggcaacagcatggacaccaagcgctgcttcgccaatcgcttcgatgactaccagggcagcctgctggcgggccagtgtgaggaggcggtggcgcccttggtcaccgccaccatcgagcgcatcctccaggagcttcccccactcgggggcggcgcggaggcccgaggggcgacggcgggggctagcgcctgccagggggggctttatggcggcgtggccggagtggcgtatatgctctaccacgtctcgcagagcccgcttttcgccacggcccgggaacgctacctgcgctcggctaagcgcctcatcgacgcgtgcgcccgcgctgaggagtggggcgaaccggacgccgacacccgcgccgccttcctgctcgggggcgcgggcgtgtacgccgtggccacgctcgtataccacgccctgggccggtccgactacgtgcagccgctgggcaagttccgggctctgtgtgccgtctgcgcgccggtctccttcctggagtgcggctccgacgagctgttcgtgggccgcgcgggttacctgtgtgccgcgctggtgctcaagcagaaactcgcccaggaggtgctgactccagcacagatcaagtcaatttgtcaggcaattctggactctgggaagcagtatgccataaagaagaggaaaccattccccctgatgtattcttactatggaaccgaatacttgggggcagctcacggcttgtcgtctattcttcagatgcttctttcttaccatgagcatctcaagccctcagatcgggaattggtatggcagagcgtggactttctcatggaacaggaacaaaactgcaactggccacctgagctcggcgagaccatcgagagagagaatgagctggtgcactggtgccatggcgctccaggaattgcctatctgtttgccaaagcttatctggtttccaagaaaccgcagtacctggacacatgtattcggtgtggggaactcacatggcagaaaggcctgctaaagaaggggcctgggatttgccatggagtagccggcagtgcctatgtcttcctgctgctgtaccggctcacgggaaactctaaatacatctaccgagctcaaagttcattccctgtaaacttgataaagatggaacatctgctgtataccagacaacattgcttttaatagatattacctctgactggtttgctcaattcttatttaccgaggaattcaaggccggttctcgggtccttgaaagtatatacagcttgtatgaaggcttctctgggacagtgtgctttctgattgacctgctgcagcccaatcaggctgaattcccactcttcagcgtctttgtttagaaggctctatcttccactgtggccctgcagagatcccctgagccaagccgaggcagtttccacataagccacattcaatggtatcgcaaccatgagccttaacattgccatcagaaggaaggaatcaggcaggtgaaggcaacatgatgccagatttgagaaaggatctgcaaaataaagataccacaattcatcttaaaactgcagagatttaatgtgtcagggaatagatgtgaaacaagggatcataggaaaaggggaaagagaaatgatctgtttttcagttatgacatagaaaaccaaactgcaagtgtagactatgacaaaaaatacactaatacctttgcaatctgaatgagaatttgaccatttgtgtgtgccctctacccttaaattcagaaataaagacaataaaaaattaaaataattgcccagctgaaaactgctatgaggaatggattgtcaggttgctgaagtataaaaataaactcttggttgtcctgtgcttatacttattgaaatttatggtttttactgagcaaagatatttgcatatgaatctctatttttttcattaccctgggcaatttaaagaaatcatatcatagcgtagttcagatactaaaatttgaagtttccttaggccctagaacatctcttttcctggttccttttttttcctcaaagctcaattagaatagcaaaatttataagctagtaaacttatactatagcaagtgttgctgtaaagtgtttttctccataggaagtgtgaactgtgtattgtctattgttagtaattttaaaaatgcctttatgtacataatcttgatggagctattagctgaactataaaatatgctcttggtaaatatcactaatttcaaagatcaggggaaccactacaaagacgtgtcatttctgcctttgtttgggacaggcagacaggctgaggaagtcaccagtgattgtggaaataattttgctccattttatactattaaatgaagagatgagtgaattctgtggttggttaccttaccttccaagatacagggtccactagaaattggctgtaatactcattgagccaagttgtcatatcaaattcaaccctgctgtaaacacatagaagttgtgaaactgcttcaagtaaatagtggtttgcagaacactgtaggagcatctgtcacttcattatgcagagcataagttgatccttttcctagaattttgtcagtggcaattgcatatatcagattgagtaggaaattgtgtactgtataagacttatttaaatagtcattaaatatttggatatattatgtgtgtgtgtgtgtgtgtgtgtgtgtgtatggtgtgtattccatatctattcccatgtaaatccaaatacttattctttatttcagtaattcttaacttgaatcatagactttggaacgagttagggaatgctctgttgcctaaaaagcaaacctacaagtatgttggtgtgtgtatgtgtatggaccagtttgtttgtgtgtgtgtgtgctcattttgaggggacaaggatctctagcattcataacattctcaaagaatctgaccaaagaaaggtaacaactatctttgtgtattttatgactgtgtgtgtttgcactcattgcaataaagtaggacaaaatgattttgaaatgcatacatcttttcagcttcctgtttcatttttacatcctcagatacaaccatatcaaattggcctcagttgttcatcagtgaaaatgctcagtttggggtgataccacataaatagcagctttcagatgactccccacattgggtccagaagttctttcatataggctgaatataataaccatcctatatacagagctttatggaacacatgcagtttttatcgtccaagaacccctcaagatgtgtttggtaaatgctccaaagtcttacagctagaaaaggacaaaaccaggattcaaacccagggtttcactttctaagtttatttattcagtattctagactagaatctggggatacaatagtgaacaaaataaactttccctcaaagctaccttctgtttccatttgctgttcctttcacaattcatccttgagacctgaaacctaaagcactcagaactgatactctagttcattatcatatcagttccatttctagtaacttcagaaaaacaagaccactttcaggcctatctgcccttttaagttctgataggtctgatgatgatgtgctaaccattttgatttgtgtgtcaaatctaagcaaagaccatgtttgagtattgtctttatgaaatgacatttcggtaaattagaaacaacaataggcttgtttagcccttaaacatgttgatgaaacttttcattttcctgaaagaattatagattttggaaggtcctcttctatattatttttccaagaaggggaaaacgattcttacattttgctgtaggaaagtgtggcatgttacttcttatttaattatccaacttgccccccttctctgtggtagcatttttaatgtagtacttaaggctgttgtctcttaaaggctacaggggcattttcaccaccactagtataactttaatattatttactatatacagcatgagcaattataaaccctgaaggtaatagtggaaatgtttgaggatacattgaaatagtctctcaataatggggagactgcattatgctttgatagcaagacattttggaaaccattacaactctgtgtattttgtttcattaatgtaattacataccatctcttccacacacaccccagaatattatacatttttattttgcccaagcctgtttcagtcatcagtttgtagtcttttacttccacttgtaacttgataactgagtagaacaggggtttgctagagtatatttccctgtgcttctttaggtagttgactatgctattaagataacagtatttgcttactgataacttgagaaacagtcattttcttggtctgtgctaaattgcatctcttccagtggcagcttatttctttaacttttttgacatattaagattttaatcatggtaatactgaaattgtttcaaatttgaaagagcgaacctcagtaacttcaatgaaacaaatgggtttgtgatttctagccatgttaaatgaacacacaattaaaaggaaaaccattagtggtgcaaagagccctgtgctggaaatctcaaagtcttgctctgccacttttaggggccactgtagtaataataataatcaccctgtctacttcacagggttgttataaaagttgtcaatgataaaatggatataagtgagttttttaatgtgcagatcctttatatatttaaaagggatgttatattttacccactatatacatagaaaaatcatgcccagttatgacttccaataagaatttcaaccaaatagaatctctatatgtggatgtagtgcttgaggtctgggtcactagatggataaaaaccaagtgtacatttttttatattctaccaccagtcctgagcacagcactttgcctcagaaggttctgattcaccaagacttactacatgggaatagactgatttagctcaggagctccttttaatgcaaatatttattttgcttgctgagaacaaaggattacagtgccaataactcaagaaaaggagcaggcaagccaggtctgtagagagaaaatgaactggaaaataaagtaattctggggtgagtttgatctgcactttaattcaagtctcagaaccacgtgacatatagtgatcaaaatatactctcaattgcatattaggccttcctttggggacctgggctatttattcagcactgtcccaaattaatagctaaatgactgagcctcaaatttgccgagcccgtgtaatattggtataaatttggcaaggaaagcaaatgagaaggcaggcaaaggggtgggtgaggggaagcttgctgaagctcagtatctcaaagtgagttgtggatgcgtgtttaacactataaagaaccagtccattcttacccatgagttttattgctttctgggacctctaacccaggaccacccctgattcaccaacttctccttcttctcctctttaaatattatagttcattgtgatatgtttttcctgtatctgctctatcatgtgacctcctttcgcctgggagggcagattttctccttatctcttccatccatgtctgttcttagctaagagttccagcctcagtacagctggattaccctttggacagaagggcagacaacctcaaggtcagcagcaacagaagttgggcctagtagtcagatcacaagtgagtgtggctattcatgagaatagggtggtggtggcatttatcctgcttcccctccataaataaacctggtaattttatttttaatgttacaaaaaaagttgatgctacattaaatgttttaccctcatccattatcataaatctcatactggaggtgtgatctctcttcttgtttctttaattgaaagtaccaatgaatcgaggcctggtggatgatgcctttagagttttttgttttgttttgtttttgttttcttgaatcattgaaacttgtcatttttatctagactcttccacaaatggcaaagtcacttatctgcagaattcccagaatcttcttttgcctttgtgcacctgctaattaccccctctgaactgaatttgaaaaaattaattaaaataaccgaatcacccatgtttttgttcttgcagggtttggtgagttatgtggattaaaagaacagactatcctctctctttttttgtctttcttctccctgtccaatactgaggaagaagagggagaagggggtaaagatacataaggcttaactacccagggttatgaaaacagtttgcaaagtcttcctgtttgcttcccttttggtttttcttagtccctgtaggaaaaagtttacccctctgtgtgcgagtgtgtgtgtgtgtgtgtgtaagtagttgagtgaaaaagaatgagactgacttaaggagagtcaatatcgcatatgaatcaaaagccaacatttagctattagatagatctcagtgaaaggatatgttcaagctaagttgattaagtttattaaacttatttattaagcttgactaagcttattaaaacttctgctaggttgaagccattagtaaccatctgtagaagataacagccatgagtttcacaaatacagcagcagtgtctgctagaattgtgctgtgagccacgaatgcaaaccacatatgcaattttcaaattttctagtagctaccaaaaaggtaaaagaaaaagatgaaattaattttaataatgtatttgacttagccttatatatccaaaatgatagcatttcaatatgcaatcaatataaaaacatgaatgagctattttacatttttgtactgagtcttcaaactctagtgtgtattttatacttactatacatctccagtctcgaagtagccacatttcaagtgtataagagctgcatgtgagttggctattgtattggacagtcccattcctgtttcctagtattgataaagtcttcctaccttccttcgttgttatgggagaaaatgtaaacagaacctgcctattacacgagagctgcaatatttccccaaatgcagcccagcagtaccatgagctgccctgtggaaaaatttaatctgtgattaaataagttaggaaagttttattattttacccccttttgaagattacatggtacattaacatattaaagattgagtaaactctcctgggtaaaaaaacctgtttgacgttgtttagttgttgagttctgtgtctataagaatcctagaaattgccacaagtgtctctccataagaaaaactttgtgttttcctctctttctccactccttttggggcccatttctatttatctttgtattcagaatcacccgagagccacaatatctcttttgttctagaacaaccacctcctaaattgaaaccaacagatggctttaaagtcttgcacttggacatagatcttcagaaagtaccaaaatatataccttcctcttattctttcagaaacggtgaacactctaaaaagatgtgggggtgtggtgggggatatgtgaatgtgtatatgtgtaaacaccaaatacatacagtttcttaagtagagtaatgcaattcttgctgatgttttatttttatttttatttttttatttttttttttttttgagacggagtctcgctctgtcgcccaggctggagtgcagtggcgggatctcggctcgctgcaagctccgcctcccgggttcacgccattctcctgcctcagcctcccaagtagctgggactacaggcgcccgccactacgcccggctaattttttgtatttttagtagagacggggtttcaccgttttagccgggatggtctcgatctcctgacctcgtgatccgcccgcctcggcctcccaatatttttatattttgtgtgtggtgacaatgtacatgctttaatgtgtactgttctagtaatatgtatgaagtagctgtgacatagcagtcagttttaaagatacagactataattgactactgtcaatctttaacaagtgatctttttgcaacttggttttagtggggtctctgacgttgtccccacaagtttcattttaaaatctatgcttaagtggcagttaccaatataattaattctgctgctgaatttggttcatattgaatgtggtaacccttatatgtggatatattcaaacatgtggattgatttagatcatccgttttgtctttgttttttaggactttgctatttcaatattaaagatgtcttttgaatactgtagcagcagtagaatccctatgttcttgaaaatgcaaaatgtaacatgagttgcacatagactctctagcagtagaaatggaatattctaagtgcagaagtttggttttagaatctgttaaggaaggacggcccaatctttgaaaaggtacagctttctcaactttgaacatctgggggaactcttcttggaagtctgaattttaatatctttaatccaatggctctaaattaacaaacattaaaaaatggatttcgtagaatcaaattattagggggagcactttgcaaagccatatactggtgaatatatactgggtcaagcaccacatgttagttttggaatgtgtatttcccagcgaatagaatttactgctccaaaaagcttttttggcataaatcacaatacttacagaaatataattgtatcattgaaaaaaacaaagctcaccttcctaatgatacatttcacaaactgcacattagggcaatttcttacttatgaggaggtacaaagaaatactctgtcaatatagtataactgcttatttcaaattgtatctaggaatgaataactactattatttaaagtactactgaattttgaggaactgatcaaagaattagtattattaataaaattgtactatttgcaatatatttgccttggcacaaatgcagagttaaaaacataaaattataaaaaaaaataatagtgattggttgttactactttaaaatcctactaatttccattagcactaaatcaaacagcacttatctgttgtatacaagtaaaattttgaaagactcggacacaaaatgaaaggctttttaaaaatgtctttgccataacaggttatatgacctcttgctaattgttatatttccttaggggcactttgaggctctttcaaagacatctgcagcaattaggtctaaatttagagtagaatattttgccagatattttactatatcacaaaatgtcatactactgtattttataataaaaccaaattctcaagtattctggtatgttacatattaatataccaaaacatcactttctataagtctattattatgtacataatatttttaaaaataatgggtattttggtcctagtgaaaaagtataatgcaatacatgacattaatctttagtcaaaacccattgaggtgtctgacagggaaattagcaatcataagctataagatatatattattttcaaggacaaaatggcaaatgataatacagaaagacgtgatcactggagcaagttagctggtgtgcagactaagaaggatcaacttgcaaatgctcatcagaatttagcttttgttattggttgttctgcaggggatagtactagtcagttgatattgcttccctttcatgtgggagtttgctcacagcccactgcatggtataatgaaatctctataagcaagatagagtcagaagcttagagatgcactttatggtttttacaactgctgttacaatgttctaaacactgtgatctttccaaatgtgttttctgtattcgttttgtactgtagaaaataattcgctataaactggactttatagtgtttaaagcgatgttatttattggcttattgcccctccttataatacatttatgtacagtacacttaatgtaaaacctgtgataatcctttgccttaaaataaaatctaatgctaaata

SEQ ID NO: 147465 - DNA, 1469 bp, Homo sapiens
  Payload ID: 9168
  Gene Symbol: LANCL3
  Gene Name: LanC lantibiotic synthetase component C-like 3 (bacterial)
  Uniprot ID: Q6ZV70
  ENST ID: ENST00000614025
  CDS Start-End: 303-1469
aagctgcggcggcgcaggagggggcgggttcagcgagggcgcggcctctgagggggggcgcaggacacgcatcccccgcgatcgcccgggccactcgggagcctcgcggcagcccggcgccccacttggccatccgctccttgcccgcctcctcttgtcacctcccgtctcatccttctcgctccttccccgccgcatacaccggcatccgagtgcctcagagagccggaggtggtgtgcggggctgcagggcacgacttcaagcggtcctcagctccgcactagggggcacgggcaacagcatggacaccaagcgctgcttcgccaatcgcttcgatgactaccagggcagcctgctggcgggccagtgtgaggaggcggtggcgcccttggtcaccgccaccatcgagcgcatcctccaggagcttcccccactcgggggcggcgcggaggcccgaggggcgacggcgggggctagcgcctgccagggggggctttatggcggcgtggccggagtggcgtatatgctctaccacgtctcgcagagcccgcttttcgccacggcccgggaacgctacctgcgctcggctaagcgcctcatcgacgcgtgcgcccgcgctgaggagtggggcgaaccggacgccgacacccgcgccgccttcctgctcgggggcgcgggcgtgtacgccgtggccacgctcgtataccacgccctgggccggtccgactacgtgcagccgctgggcaagttccgggctctgtgtgccgtctgcgcgccggtctccttcctggagtgcggctccgacgagctgttcgtgggccgcgcgggttacctgtgtgccgcgctggtgctcaagcagaaactcgcccaggaggtgctgactccagcacagatcaagtcaatttgtcaggcaattctggactctgggaagcagtatgccataaagaagaggaaaccattccccctgatgtattcttactatggaaccgaatacttgggggcagctcacggcttgtcgtctattcttcagatgcttctttcttaccatgagcatctcaagccctcagatcgggaattggtatggcagagcgtggactttctcatggaacaggaacaaaactgcaactggccacctgagctcggcgagaccatcgagagagagaatgagctggtgcactggtgccatggcgctccaggaattgcctatctgtttgccaaagcttatctggtttccaagaaaccgcagtacctggacacatgtattcggtgtggggaactcacatggcagaaaggcctgctaaagaaggggcctgggatttgccatggagtagccggcagtgcctatgtcttcctgctgctgtaccggctcacgggaaactctaaatacatctaccgagctcaaagttcattccctgtaaacttgataaagatggaacatctgctgtataccagacaacattgcttttaa

SEQ ID NO: 147466 - DNA, 2995 bp, Homo sapiens
  Payload ID: 9169
  Gene Symbol: LSS
  Gene Name: lanosterol synthase (2,3-oxidosqualene-lanosterol cyclase)
  Uniprot ID: P48449
  ENST ID: ENST00000356396
  CDS Start-End: 78-2276
gggcggggctgggcggcaggtcccgggtgcggacatctggcagctggcagtgggcggcgtagagcactgcagcagcaatgacggagggcacgtgtctgcggcgccgagggggcccctacaagaccgagcccgccaccgacctcggccgctggcgactcaactgcgagaggggccggcagacgtggacctacctgcaggacgagcgcgccggccgcgagcagaccggcctggaagcctacgccctggggctggacaccaagaattactttaaggacttgcccaaagcccacaccgcctttgagggggctctgaacgggatgacattttacgtggggctgcaggctgaggatgggcactggacgggtgattatggtggcccacttttcctcctgccaggcctcctgatcacttgccacgtggcacgcatccctctgccagccggatacagagaagagattgtgcggtacctgcggtcagtgcagctccctgacggtggctggggcctgcacattgaggataagtccaccgtgtttgggactgcgctcaactatgtgtctctcagaattctgggtgttgggcctgacgatcctgacctggtacgagcccggaacattcttcacaagaaaggtggtgctgtggccatcccctcctgggggaagttctggctggctgtcctgaatgtttacagctgggaaggcctcaataccctgttcccagagatgtggctgtttcctgactgggcaccggcacacccctccacactctggtgccactgccggcaggtgtacctgcccatgagctactgctacgccgttcggctgagtgccgcggaagacccgctggtccagagcctccgccaggagctctatgtggaggacttcgccagcattgactggctggcgcagaggaacaacgtggcccccgacgagctgtacacgccgcacagctggctgctccgcgtggtatatgcgctcctcaacctgtatgagcaccaccacagtgcccacctgcggcagcgggccgtgcagaagctgtatgaacacattgtggccgacgaccgattcaccaagagcatcagcatcggcccgatctcgaaaaccatcaacatgcttgtgcgctggtatgtggacgggcccgcctccactgccttccaggagcatgtctccagaatcccggactatctctggatgggccttgacggcatgaaaatgcagggcaccaacggctcacagatctgggacaccgcattcgccatccaggctctgcttgaggcgggcgggcaccacaggcccgagttttcgtcctgcctgcagaaggctcatgagttcctgaggctctcacaggtcccagataaccctcccgactaccagaagtactaccgccagatgcgcaagggtggcttctccttcagtacgctggactgcggctggatcgtttctgactgcacggctgaggccttgaaggctgtgctgctcctgcaggagaagtgtccccatgtcaccgagcacatccccagagaacggctctgcgatgctgtggctgtgctgctgaacatgagaaatccagatggagggttcgccacctatgagaccaagcgtggggggcacttgctggagctgctgaacccctcggaggtcttcggggacatcatgattgactacacctatgtggagtgcacctcagccgtgatgcaggcgcttaagtatttccacaagcgtttcccggagcacagggcagcggagatccgggagaccctcacgcagggcttagagttctgtcggcggcagcagagggccgatggctcctgggaaggctcctggggagtttgcttcacctacggcacctggtttggcctggaggccttcgcctgtatggggcagacctaccgagatgggactgcctgtgcagaggtctcccgggcctgtgacttcctgctgtcccggcagatggcagacggaggctggggggaggactttgagtcctgcgaggagcggcgttatttgcagagtgcccagtcccagatccataacacatgctgggccatgatggggctgatggccgttcggcatcctgacatcgaggcccaggagagaggagtccggtgtctacttgagaaacagctccccaatggcgactggccgcaggaaaacattgctggggtcttcaacaagtcctgtgccatctcctacacgagctacaggaacatcttccccatctgggccctcggccgcttctcccagctgtaccctgagagagcccttgctggccacccctgagaacatgcctacctgctgggtgccgtctgtgcgttccatggccttcaagtcacaggacgcagcgattccctgccctcttcggtgttattacacaggcaggacttcagtgtcagtatccctgccttcagtcttctttagaaatcacatctgtgttcaatccattgtttagagggagtgtatttttcctgttccacgaagaggactttttgttcacaattggatcacaatgcagaggagtctgttcctcccccgtcggcttctcggtgctgggagggtgacctgtcccagatgactcatcaccctgacatgctcttgacaaaggacaccaccaagaggagatggcagctgtaccggtgcagcctctgtctgagggggatatttgcctcagtgtgattaaaaatcagtcatgaaagatttttgaattcagattatttttatcaggaacagattttgaacatcctgaaatcttttccctggcatcatattaggttttctttgttcactatgatgtaaagtttcagactcttgatatttttaatatcaacatagacggtaggacaaggaacggtaccagaaatgagtaaagagacaataatgataagatcgatttatcaagacataacaaccccaaatgtatatgcactaaataacagcttcaaaatacatgaagcaaaatggcagaattgaagagaatgagataaaaacagaattttaacggg

SEQ ID NO: 147467 - DNA, 4936 bp, Homo sapiens
  Payload ID: 9169
  Gene Symbol: LSS
  Gene Name: lanosterol synthase (2,3-oxidosqualene-lanosterol cyclase)
  Uniprot ID: P48449
  ENST ID: ENST00000397728
  CDS Start-End: 80-2278
aggggcggggctgggcggcaggtcccgggtgcggacatctggcagctggcagtgggcggcgtagagcactgcagcagcaatgacggagggcacgtgtctgcggcgccgagggggcccctacaagaccgagcccgccaccgacctcggccgctggcgactcaactgcgagaggggccggcagacgtggacctacctgcaggacgagcgcgccggccgcgagcagaccggcctggaagcctacgccctggggctggacaccaagaattactttaaggacttgcccaaagcccacaccgcctttgagggggctctgaacgggatgacattttacgtggggctgcaggctgaggatgggcactggacgggtgattatggtggcccacttttcctcctgccaggcctcctgatcacttgccacgtggcacgcatccctctgccagccggatacagagaagagattgtgcggtacctgcggtcagtgcagctccctgacggtggctggggcctgcacattgaggataagtccaccgtgtttgggactgcgctcaactatgtgtctctcagaattctgggtgttgggcctgacgatcctgacctggtacgagcccggaacattcttcacaagaaaggtggtgctgtggccatcccctcctgggggaagttctggctggctgtcctgaatgtttacagctgggaaggcctcaataccctgttcccagagatgtggctgtttcctgactgggcaccggcacacccctccacactctggtgccactgccggcaggtgtacctgcccatgagctactgctacgccgttcggctgagtgccgcggaagacccgctggtccagagcctccgccaggagctctatgtggaggacttcgccagcattgactggctggcgcagaggaacaacgtggcccccgacgagctgtacacgccgcacagctggctgctccgcgtggtatatgcgctcctcaacctgtatgagcaccaccacagtgcccacctgcggcagcgggccgtgcagaagctgtatgaacacattgtggccgacgaccgattcaccaagagcatcagcatcggcccgatctcgaaaaccatcaacatgcttgtgcgctggtatgtggacgggcccgcctccactgccttccaggagcatgtctccagaatcccggactatctctggatgggccttgacggcatgaaaatgcagggcaccaacggctcacagatctgggacaccgcattcgccatccaggctctgcttgaggcgggcgggcaccacaggcccgagttttcgtcctgcctgcagaaggctcatgagttcctgaggctctcacaggtcccagataaccctcccgactaccagaagtactaccgccagatgcgcaagggtggcttctccttcagtacgctggactgcggctggatcgtttctgactgcacggctgaggccttgaaggctgtgctgctcctgcaggagaagtgtccccatgtcaccgagcacatccccagagaacggctctgcgatgctgtggctgtgctgctgaacatgagaaatccagatggagggttcgccacctatgagaccaagcgtggggggcacttgctggagctgctgaacccctcggaggtcttcggggacatcatgattgactacacctatgtggagtgcacctcagccgtgatgcaggcgcttaagtatttccacaagcgtttcccggagcacagggcagcggagatccgggagaccctcacgcagggcttagagttctgtcggcggcagcagagggccgatggctcctgggaaggctcctggggagtttgcttcacctacggcacctggtttggcctggaggccttcgcctgtatggggcagacctaccgagatgggactgcctgtgcagaggtctcccgggcctgtgacttcctgctgtcccggcagatggcagacggaggctggggggaggactttgagtcctgcgaggagcggcgttatttgcagagtgcccagtcccagatccataacacatgctgggccatgatggggctgatggccgttcggcatcctgacatcgaggcccaggagagaggagtccggtgtctacttgagaaacagctccccaatggcgactggccgcaggaaaacattgctggggtcttcaacaagtcctgtgccatctcctacacgagctacaggaacatcttccccatctgggccctcggccgcttctcccagctgtaccctgagagagcccttgctggccacccctgagaacatgcctacctgctgggtgccgtctgtgcgttccagtgaggccaaggggtcctggccgggttggggagccctcccataaccctgtcttgggctccaacccctcaacctctatctcatagatgtgaatctgggggccaggctggaggcagggatggggacagggtgggtggcttagactcttgatttttactgtaggttcatttctgaaagtagcttgtcgggcttgggtgaggaagggggcacaggagccgtgacccctgaggaggcacagcgccttctgccacctctgggcacggcctcaaggtagtgaggctaggaggttttttctgaccaatagctgagttcttgggagaggagcagctgtgcctgtgtgattccttagtgtcgagtgggctctgggctggggtcggccctgggcaggcttctcctgcaccttttgtctgctgggctgagggacacgagggcaaccctgtgacaatggcaggtagtgtgcatccgtgaatagcccagtgcgggggttgctcatggagcatcctgaggccgtgcagcagggagccccatgcccctgggtcgtgagcttgcctgcgtatggggtggtgtcatggagcctcatgcccctgggtcgtgagctcgcctgagtatggggtggtgtcatggagccgcatacccctgggttgtgagctcgcctgcatatgcagggtctgtcatggaacatcccaagtctgtgcagcagggagccccatgcccctgggacatgaacccacctgcgtggaatgctgtttgtgaggtgtctacagggtttatagtagtcttgtggacacagaaatgcacaggggacacttacggacacagaaatgcacaggggaggccgagcataaccaggggtgaggggcaggcagcagttgtagttactgccgcggggcactgctatgtgcagggacagccagcacccagcccatcaccactccctgggctggctggcaggtatggcaccctgggagcccggcatatacccagggcacccctacggctgccgccagtctcatgcccaggtgggtgctctgggctggagcgagggccaggttttgggccgaggcttccccaggcaatcctgtgagctcccttctagcctctgacccagtctggtctggcttgcatggatgtagggcttggggtgggaagttcaggtcctggctttgcctttgcctgatgtggatgagcagctcacatgctcagggccacctgagactgtcactgctctcccctggctactgggaggagtcactgagagcttcgttacccctgctgccttgcccagggcacaccctatacctccttatctgctcttcccctccctgccgccttctgggcaggtagcagtccctggcctctccccctggctgatcactctccctcaggcagtggagatctgcgtctggacaccctcagatcctgtcattgcctgcccagagtccttcaggggcacccctctgccttggtgtgcagtccagggctctcacccaggtgccgcaccctctggggtcttctgtccagctcccttgccccatgtgctgtcactgactctccttgggactcgcctgcctgctcagagccctgcagggcttggtcagctgcctgttcagtgtcaacacttccctgcacatcttaaaactgggctttattttcgctgaaggaactgtgttgggacccttgacatctgtcaggtttgcacatgctgtttttttttctcagcccacgtgttctcccccacgtggggtagcagcaggacagacagtgaatcacagagtctgccctgagcagaggctgctgtccctgggactcctagccatggtcagactgtacaaaacggttttccagaaatgaaatgtaaatccatttttatactgaaaatgttactgaaagtcacttttatgagcatctgccttaataaacagacattgattcccttatcagaagcctgtcacactgtgtttcgtttcatcctggggagaactgcagatttggggtttctggctgtcatacgtcacctgcctgtggggcgagtgggaggcccagcctggtttagggaacaagagtgacgtgaggagtagcagggtgcgtctccagttacctgagggaaaacagatattttaagagataatagcatagcctattttaatatgttttaaaggccataagcatatccaggaagataaataaacgtgatacaatgtccacataggaggaactttctttcactgcattgttttccttcacagtggccttcaagtcacaggacgcagcgattccctgccctcttcggtgttattacacaggcaggacttcagtgtcagtatccctgccttcagtcttctttagaaatcacatctgtgttcaatccattgtttagagggagtgtatttttcctgttccacgaagaggactttttgttcacaattggatcacaatgcagaggagtctgttcctcccccgtcggcttctcggtgctgggagggtgacctgtcccagatgactcatcaccctgacatgctcttgacaaaggacaccaccaagaggagatggcagctgtaccggtgcagcctctgtctgagggggatatttgcctcagtgtgattaaaaatcagtcatgaaaga

SEQ ID NO: 147468 - DNA, 853 bp, Homo sapiens
  Payload ID: 9169
  Gene Symbol: LSS
  Gene Name: lanosterol synthase (2,3-oxidosqualene-lanosterol cyclase)
  ENST ID: ENST00000450351
  CDS Start-End: 68-853
cggcgtagagcactgcagcagcaatgacggagggcacgtgagtcccctcgccccgggctcctgacgaatgcggggtggtcctaggtgtctgcggcgccgagggggcccctacaagaccgagcccgccaccgacctcggccgctggcgactcaactgcgagaggggccggcagacgtggacctacctgcaggacgagcgcgccggccgcgagcagaccggcctggaagcctacgccctggggctggacaccaagaattactttaaggacttgcccaaagcccacaccgcctttgagggggctctgaacgggatgacattttacgtggggctgcaggctgaggatgggcactggacgggtgattatggtggcccacttttcctcctgccaggcctcctgatcacttgccacgtggcacgcatccctctgccagccggatacagagaagagattgtgcggtacctgcggtcagtgcagctccctgacggtggctggggcctgcacattgaggataagtccaccgtgtttgggactgcgctcaactatgtgtctctcagaattctgggtgttgggcctgacgatcctgacctggtacgagcccggaacattcttcacaagaaaggtggtgctgtggccatcccctcctgggggaagttctggctggctgtcctgaatgtttacagctgggaaggcctcaataccctgttcccagagatgtggctgtttcctgactgggcaccggcacacccctccacactctggtgccactgccggcaggtgtacctgcccatgagctactgctacgccgttcggctgagtgccgcggaagacccgctggtccagagcctccgccag

SEQ ID NO: 147469 - DNA, 4390 bp, Homo sapiens
  Payload ID: 9169
  Gene Symbol: LSS
  Gene Name: lanosterol synthase (2,3-oxidosqualene-lanosterol cyclase)
  Uniprot ID: P48449
  ENST ID: ENST00000457828
  CDS Start-End: 452-2410
aggggcggggctgggcggcaggtcccgggtgcggacatctggcagctggcagtgggcggcgtagagcactgcagcagcaatgacggagggcacgtgagtcccctcgccccgggctcctgacgaatgcggggtggtcctaggtgctgaggagagcgcgactggggcagtgggccggcggccggcgttggggcggggcctgggtcgctgatggccggtggtcctcaggtgtctgcggcgccgagggggcccctacaagaccgagcccgccaccgacctcggccgctggcgactcaactgcgagaggggccggcagacgtggacctacctgcaggacgagcgcgccggccgcgagcagaccggcctggaagcctacgccctggggctggacaccaagaattactttaaggacttgcccaaagcccacaccgcctttgagggggctctgaacgggatgacattttacgtggggctgcaggctgaggatgggcactggacgggtgattatggtggcccacttttcctcctgccaggcctcctgatcacttgccacgtggcacgcatccctctgccagccggatacagagaagagattgtgcggtacctgcggtcagtgcagctccctgacggtggctggggcctgcacattgaggataagtccaccgtgtttgggactgcgctcaactatgtgtctctcagaattctgggtgttgggcctgacgatcctgacctggtacgagcccggaacattcttcacaagaaaggtggtgctgtggccatcccctcctgggggaagttctggctggctgtcctgaatgtttacagctgggaaggcctcaataccctgttcccagagatgtggctgtttcctgactgggcaccggcacacccctccacactctggtgccactgccggcaggtgtacctgcccatgagctactgctacgccgttcggctgagtgccgcggaagacccgctggtccagagcctccgccaggagctctatgtggaggacttcgccagcattgactggctggcgcagaggaacaacgtggcccccgacgagctgtacacgccgcacagctggctgctccgcgtggtatatgcgctcctcaacctgtatgagcaccaccacagtgcccacctgcggcagcgggccgtgcagaagctgtatgaacacattgtggccgacgaccgattcaccaagagcatcagcatcggcccgatctcgaaaaccatcaacatgcttgtgcgctggtatgtggacgggcccgcctccactgccttccaggagcatgtctccagaatcccggactatctctggatgggccttgacggcatgaaaatgcagggcaccaacggctcacagatctgggacaccgcattcgccatccaggctctgcttgaggcgggcgggcaccacaggcccgagttttcgtcctgcctgcagaaggctcatgagttcctgaggctctcacaggtcccagataaccctcccgactaccagaagtactaccgccagatgcgcaagggtggcttctccttcagtacgctggactgcggctggatcgtttctgactgcacggctgaggccttgaaggctgtgctgctcctgcaggagaagtgtccccatgtcaccgagcacatccccagagaacggctctgcgatgctgtggctgtgctgctgaacatgagaaatccagatggagggttcgccacctatgagaccaagcgtggggggcacttgctggagctgctgaacccctcggaggtcttcggggacatcatgattgactacacctatgtggagtgcacctcagccgtgatgcaggcgcttaagtatttccacaagcgtttcccggagcacagggcagcggagatccgggagaccctcacgcagggcttagagttctgtcggcggcagcagagggccgatggctcctgggaaggctcctggggagtttgcttcacctacggcacctggtttggcctggaggccttcgcctgtatggggcagacctaccgagatgggactgcctgtgcagaggtctcccgggcctgtgacttcctgctgtcccggcagatggcagacggaggctggggggaggactttgagtcctgcgaggagcggcgttatttgcagagtgcccagtcccagatccataacacatgctgggccatgatggggctgatggccgttcggcatcctgacatcgaggcccaggagagaggagtccggtgtctacttgagaaacagctccccaatggcgactggccgcaggaaaacattgctggggtcttcaacaagtcctgtgccatctcctacacgagctacaggaacatcttccccatctgggccctcggccgcttctcccagctgtaccctgagagagcccttgctggccacccctgagaacatgcctacctgctgggtgccgtctgtgcgttccagtgaggccaaggggtcctggccgggttggggagccctcccataaccctgtcttgggctccaacccctcaacctctatctcatagatgtgaatctgggggccaggctggaggcagggatggggacagggtgggtggcttagactcttgatttttactgtaggttcatttctgaaagtagcttgtcgggcttgggtgaggaagggggcacaggagccgtgacccctgaggaggcacagcgccttctgccacctctgggcacggcctcaaggtagtgaggctaggaggttttttctgaccaatagctgagttcttgggagaggagcagctgtgcctgtgtgattccttagtgtcgagtgggctctgggctggggtcggccctgggcaggcttctcctgcaccttttgtctgctgggctgagggacacgagggcaaccctgtgacaatggcaggtagtgtgcatccgtgaatagcccagtgcgggggttgctcatggagcatcctgaggccgtgcagcagggagccccatgcccctgggtcgtgagcttgcctgcgtatggggtggtgtcatggagcctcatgcccctgggtcgtgagctcgcctgagtatggggtggtgtcatggagccgcatacccctgggttgtgagctcgcctgcatatgcagggtctgtcatggaacatcccaagtctgtgcagcagggagccccatgcccctgggacatgaacccacctgcgtggaatgctgtttgtgaggtgtctacagggtttatagtagtcttgtggacacagaaatgcacaggggacacttacggacacagaaatgcacaggggaggccgagcataaccaggggtgaggggcaggcagcagttgtagttactgccgcggggcactgctatgtgcagggacagccagcacccagcccatcaccactccctgggctggctggcaggtatggcaccctgggagcccggcatatacccagggcacccctacggctgccgccagtctcatgcccaggtgggtgctctgggctggagcgagggccaggttttgggccgaggcttccccaggcaatcctgtgagctcccttctagcctctgacccagtctggtctggcttgcatggatgtagggcttggggtgggaagttcaggtcctggctttgcctttgcctgatgtggatgagcagctcacatgctcagggccacctgagactgtcactgctctcccctggctactgggaggagtcactgagagcttcgttacccctgctgccttgcccagggcacaccctatacctccttatctgctcttcccctccctgccgccttctgggcaggtagcagtccctggcctctccccctggctgatcactctccctcaggcagtggagatctgcgtctggacaccctcagatcctgtcattgcctgcccagagtccttcaggggcacccctctgccttggtgtgcagtccagggctctcacccaggtgccgcaccctctggggtcttctgtccagctcccttgccccatgtgctgtcactgactctccttgggactcgcctgcctgctcagagccctgcagggcttggtcagctgcctgttcagtgtcaacacttccctgcacatcttaaaactgggctttattttcgctgaaggaactgtgttgggacccttgacatctgtcaggtttgcacatgctgtttttttttctcagcccacgtgttctcccccacgtggggtagcagcaggacagacagtgaatcacagagtctgccctgagcagaggctgctgtccctgggactcctagccatggtcagactgtacaaaacggttttccagaaatgaaatgtaaatccatttttatactgaaaatgttactgaaagtcacttttatgagcatctgccttaataaacagacattgattcccttatcagaag

SEQ ID NO: 147470 - DNA, 517 bp, Homo sapiens
  Payload ID: 9169
  Gene Symbol: LSS
  Gene Name: lanosterol synthase (2,3-oxidosqualene-lanosterol cyclase)
  ENST ID: ENST00000419093
  CDS Start-End: 1-409
tgagtcctgcgaggagcggcgttatttgcagagtgcccagtcccagatccataacacatgctgggccatgatggggctgatggccgttcggcatcctgacatcgaggcccaggagagaggagtccggtgtctacttgagaaacagctccccaatggcgactggccgcagtggccttcaagtcacaggacgcagcgattccctgccctcttcggtgttattacacaggcaggacttcagtgtcagtatccctgccttcagtcttctttagaaatcacatctgtgttcaatccattgtttagagggagtgtatttttcctgttccacgaagaggactttttgttcacaattggatcacaatgcagaggagtctgttcctcccccgtcggcttctcggtgctgggagggtgacctgtcccagatgactcatcaccctgacatgctcttgacaaaggacaccaccaagaggagatggcagctgtaccggtgcagcctctgtctgagggggatatttgcctc

SEQ ID NO: 147471 - DNA, 2523 bp, Homo sapiens
  Payload ID: 9169
  Gene Symbol: LSS
  Gene Name: lanosterol synthase (2,3-oxidosqualene-lanosterol cyclase)
  Uniprot ID: P48449
  ENST ID: ENST00000522411
  CDS Start-End: 37-2202
agctggcagtgggcggcgtagagcactgcagcagcaatgacggagggcacgtgtctgcggcgccgagggggcccctacaagaccgagcccgccaccgacctcggccgctggcgactcaactgcgagaggggccggcagacgtggacctacctgcaggacgagcgcgccggccgcgagcagaccggcctggaagcctacgccctggggctggacaccaagaattactttaaggacttgcccaaagcccacaccgcctttgagggggctctgaacgggatgacattttacgtggggctgcaggctgaggatgggcactggacgggtgattatggtggcccacttttcctcctgccaggcctcctgatcacttgccacgtggcacgcatccctctgccagccggatacagagaagagattgtgcggtacctgcggcacattgaggataagtccaccgtgtttgggactgcgctcaactatgtgtctctcagaattctgggtgttgggcctgacgatcctgacctggtacgagcccggaacattcttcacaagaaaggtggtgctgtggccatcccctcctgggggaagttctggctggctgtcctgaatgtttacagctgggaaggcctcaataccctgttcccagagatgtggctgtttcctgactgggcaccggcacacccctccacactctggtgccactgccggcaggtgtacctgcccatgagctactgctacgccgttcggctgagtgccgcggaagacccgctggtccagagcctccgccaggagctctatgtggaggacttcgccagcattgactggctggcgcagaggaacaacgtggcccccgacgagctgtacacgccgcacagctggctgctccgcgtggtatatgcgctcctcaacctgtatgagcaccaccacagtgcccacctgcggcagcgggccgtgcagaagctgtatgaacacattgtggccgacgaccgattcaccaagagcatcagcatcggcccgatctcgaaaaccatcaacatgcttgtgcgctggtatgtggacgggcccgcctccactgccttccaggagcatgtctccagaatcccggactatctctggatgggccttgacggcatgaaaatgcagggcaccaacggctcacagatctgggacaccgcattcgccatccaggctctgcttgaggcgggcgggcaccacaggcccgagttttcgtcctgcctgcagaaggctcatgagttcctgaggctctcacaggtcccagataaccctcccgactaccagaagtactaccgccagatgcgcaagggtggcttctccttcagtacgctggactgcggctggatcgtttctgactgcacggctgaggccttgaaggctgtgctgctcctgcaggagaagtgtccccatgtcaccgagcacatccccagagaacggctctgcgatgctgtggctgtgctgctgaacatgagaaatccagatggagggttcgccacctatgagaccaagcgtggggggcacttgctggagctgctgaacccctcggaggtcttcggggacatcatgattgactacacctatgtggagtgcacctcagccgtgatgcaggcgcttaagtatttccacaagcgtttcccggagcacagggcagcggagatccgggagaccctcacgcagggcttagagttctgtcggcggcagcagagggccgatggctcctgggaaggctcctggggagtttgcttcacctacggcacctggtttggcctggaggccttcgcctgtatggggcagacctaccgagatgggactgcctgtgcagaggtctcccgggcctgtgacttcctgctgtcccggcagatggcagacggaggctggggggaggactttgagtcctgcgaggagcggcgttatttgcagagtgcccagtcccagatccataacacatgctgggccatgatggggctgatggccgttcggcatcctgacatcgaggcccaggagagaggagtccggtgtctacttgagaaacagctccccaatggcgactggccgcaggaaaacattgctggggtcttcaacaagtcctgtgccatctcctacacgagctacaggaacatcttccccatctgggccctcggccgcttctcccagctgtaccctgagagagcccttgctggccacccctgagaacatgcctacctgctgggtgccgtctgtgcgttccagtgaggccaaggggtcctggccgggttggggagccctcccataaccctgtcttgggctccaacccctcaacctctatctcatagatgtgaatctgggggccaggctggaggcagggatggggacagggtgggtggcttagactcttgatttttactgtaggttcatttctgaaagtagcttgtcgggcttgggtgaggaagggggcacaggagccgtgacccctgaggaggcacagcgccttctgccacctctgggcacggcctcaaggtagtgaggctagga

SEQ ID NO: 147472 - DNA, 4307 bp, Homo sapiens
  Payload ID: 9169
  Gene Symbol: LSS
  Gene Name: lanosterol synthase (2,3-oxidosqualene-lanosterol cyclase)
  ENST ID: ENST00000630761
  CDS Start-End: 1-1649
gtggtgctgtggccatcccctcctgggggaagttctggctggctgtcctgaatgtttacagctgggaaggcctcaataccctgttcccagagatgtggctgtttcctgactgggcaccggcacacccctccacactctggtgccactgccggcaggtgtacctgcccatgagctactgctacgccgttcggctgagtgccgcggaagacccgctggtccagagcctccgccaggagctctatgtggaggacttcgccagcattgactggctggcgcagaggaacaacgtggcccccgacgagctgtacacgccgcacagctggctgctccgcgtggtatatgcgctcctcaacctgtatgagcaccaccacagtgcccacctgcggcagcgggccgtgcagaagctgtatgaacacattgtggccgacgaccgattcaccaagagcatcagcatcggcccgatctcgaaaaccatcaacatgcttgtgcgctggtatgtggacgggcccgcctccactgccttccaggagcatgtctccagaatcccggactatctctggatgggccttgacggcatgaaaatgcagggcaccaacggctcacagatctgggacaccgcattcgccatccaggctctgcttgaggcgggcgggcaccacaggcccgagttttcgtcctgcctgcagaaggctcatgagttcctgaggctctcacaggtcccagataaccctcccgactaccagaagtactaccgccagatgcgcaagggtggcttctccttcagtacgctggactgcggctggatcgtttctgactgcacggctgaggccttgaaggctgtgctgctcctgcaggagaagtgtccccatgtcaccgagcacatccccagagaacggctctgcgatgctgtggctgtgctgctgaacatgagaaatccagatggagggttcgccacctatgagaccaagcgtggggggcacttgctggagctgctgaacccctcggaggtcttcggggacatcatgattgactacacctatgtggagtgcacctcagccgtgatgcaggcgcttaagtatttccacaagcgtttcccggagcacagggcagcggagatccgggagaccctcacgcagggcttagagttctgtcggcggcagcagagggccgatggctcctgggaaggctcctggggagtttgcttcacctacggcacctggtttggcctggaggccttcgcctgtatggggcagacctaccgagatgggactgcctgtgcagaggtctcccgggcctgtgacttcctgctgtcccggcagatggcagacggaggctggggggaggactttgagtcctgcgaggagcggcgttatttgcagagtgcccagtcccagatccataacacatgctgggccatgatggggctgatggccgttcggcatcctgacatcgaggcccaggagagaggagtccggtgtctacttgagaaacagctccccaatggcgactggccgcaggaaaacattgctggggtcttcaacaagtcctgtgccatctcctacacgagctacaggaacatcttccccatctgggccctcggccgcttctcccagctgtaccctgagagagcccttgctggccacccctgagaacatgcctacctgctgggtgccgtctgtgcgttccagtgaggccaaggggtcctggccgggttggggagccctcccataaccctgtcttgggctccaacccctcaacctctatctcatagatgtgaatctgggggccaggctggaggcagggatggggacagggtgggtggcttagactcttgatttttactgtaggttcatttctgaaagtagcttgtcgggcttgggtgaggaagggggcacaggagccgtgacccctgaggaggcacagcgccttctgccacctctgggcacggcctcaaggtagtgaggctaggaggttttttctgaccaatagctgagttcttgggagaggagcagctgtgcctgtgtgattccttagtgtcgagtgggctctgggctggggtcggccctgggcaggcttctcctgcaccttttgtctgctgggctgagggacacgagggcaaccctgtgacaatggcaggtagtgtgcatccgtgaatagcccagtgcgggggttgctcatggagcatcctgaggccgtgcagcagggagccccatgcccctgggtcgtgagcttgcctgcgtatggggtggtgtcatggagcctcatgcccctgggtcgtgagctcgcctgagtatggggtggtgtcatggagccgcatacccctgggttgtgagctcgcctgcatatgcagggtctgtcatggaacatcccaagtctgtgcagcagggagccccatgcccctgggacatgaacccacctgcgtggaatgctgtttgtgaggtgtctacagggtttatagtagtcttgtggacacagaaatgcacaggggacacttacggacacagaaatgcacaggggaggccgagcataaccaggggtgaggggcaggcagcagttgtagttactgccgcggggcactgctatgtgcagggacagccagcacccagcccatcaccactccctgggctggctggcaggtatggcaccctgggagcccggcatatacccagggcacccctacggctgccgccagtctcatgcccaggtgggtgctctgggctggagcgagggccaggttttgggccgaggcttccccaggcaatcctgtgagctcccttctagcctctgacccagtctggtctggcttgcatggatgtagggcttggggtgggaagttcaggtcctggctttgcctttgcctgatgtggatgagcagctcacatgctcagggccacctgagactgtcactgctctcccctggctactgggaggagtcactgagagcttcgttacccctgctgccttgcccagggcacaccctatacctccttatctgctcttcccctccctgccgccttctgggcaggtagcagtccctggcctctccccctggctgatcactctccctcaggcagtggagatctgcgtctggacaccctcagatcctgtcattgcctgcccagagtccttcaggggcacccctctgccttggtgtgcagtccagggctctcacccaggtgccgcaccctctggggtcttctgtccagctcccttgccccatgtgctgtcactgactctccttgggactcgcctgcctgctcagagccctgcagggcttggtcagctgcctgttcagtgtcaacacttccctgcacatcttaaaactgggctttattttcgctgaaggaactgtgttgggacccttgacatctgtcaggtttgcacatgctgtttttttttctcagcccacgtgttctcccccacgtggggtagcagcaggacagacagtgaatcacagagtctgccctgagcagaggctgctgtccctgggactcctagccatggtcagactgtacaaaacggttttccagaaatgaaatgtaaatccatttttatactgaaaatgttactgaaagtcacttttatgagcatctgccttaataaacagacattgattcccttatcagaagcctgtcacactgtgtttcgtttcatcctggggagaactgcagatttggggtttctggctgtcatacgtcacctgcctgtggggcgagtgggaggcccagcctggtttagggaacaagagtgacgtgaggagtagcagggtgcgtctccagttacctgagggaaaacagatattttaagagataatagcatagcctattttaatatgttttaaaggccataagcatatccaggaagataaataaacgtgatacaatgtccacataggaggaactttctttcactgcattgttttccttcacagtggccttcaagtcacaggacgcagcgattccctgccctcttcggtgttattacacaggcaggacttcagtgtcagtatccctgccttcagtcttctttagaaatcacatctgtgttcaatccattgtttagagggagtgtatttttcctgttccacgaagaggactttttgttcacaattggatcacaatgcagaggagtctgttcctcccccgtcggcttctcggtgctgggagggtgacctgtcccagatgactcatcaccctgacatgctcttgacaaaggacaccaccaagaggagatggcagctgtaccggtgcagcctctgtctgagggggatatttgcctcagtgtgattaaaaatcagtcatgaaaga

SEQ ID NO: 147473 - DNA, 2368 bp, Homo sapiens
  Payload ID: 9169
  Gene Symbol: LSS
  Gene Name: lanosterol synthase (2,3-oxidosqualene-lanosterol cyclase)
  ENST ID: ENST00000630343
  CDS Start-End: 1-1649
gtggtgctgtggccatcccctcctgggggaagttctggctggctgtcctgaatgtttacagctgggaaggcctcaataccctgttcccagagatgtggctgtttcctgactgggcaccggcacacccctccacactctggtgccactgccggcaggtgtacctgcccatgagctactgctacgccgttcggctgagtgccgcggaagacccgctggtccagagcctccgccaggagctctatgtggaggacttcgccagcattgactggctggcgcagaggaacaacgtggcccccgacgagctgtacacgccgcacagctggctgctccgcgtggtatatgcgctcctcaacctgtatgagcaccaccacagtgcccacctgcggcagcgggccgtgcagaagctgtatgaacacattgtggccgacgaccgattcaccaagagcatcagcatcggcccgatctcgaaaaccatcaacatgcttgtgcgctggtatgtggacgggcccgcctccactgccttccaggagcatgtctccagaatcccggactatctctggatgggccttgacggcatgaaaatgcagggcaccaacggctcacagatctgggacaccgcattcgccatccaggctctgcttgaggcgggcgggcaccacaggcccgagttttcgtcctgcctgcagaaggctcatgagttcctgaggctctcacaggtcccagataaccctcccgactaccagaagtactaccgccagatgcgcaagggtggcttctccttcagtacgctggactgcggctggatcgtttctgactgcacggctgaggccttgaaggctgtgctgctcctgcaggagaagtgtccccatgtcaccgagcacatccccagagaacggctctgcgatgctgtggctgtgctgctgaacatgagaaatccagatggagggttcgccacctatgagaccaagcgtggggggcacttgctggagctgctgaacccctcggaggtcttcggggacatcatgattgactacacctatgtggagtgcacctcagccgtgatgcaggcgcttaagtatttccacaagcgtttcccggagcacagggcagcggagatccgggagaccctcacgcagggcttagagttctgtcggcggcagcagagggccgatggctcctgggaaggctcctggggagtttgcttcacctacggcacctggtttggcctggaggccttcgcctgtatggggcagacctaccgagatgggactgcctgtgcagaggtctcccgggcctgtgacttcctgctgtcccggcagatggcagacggaggctggggggaggactttgagtcctgcgaggagcggcgttatttgcagagtgcccagtcccagatccataacacatgctgggccatgatggggctgatggccgttcggcatcctgacatcgaggcccaggagagaggagtccggtgtctacttgagaaacagctccccaatggcgactggccgcaggaaaacattgctggggtcttcaacaagtcctgtgccatctcctacacgagctacaggaacatcttccccatctgggccctcggccgcttctcccagctgtaccctgagagagcccttgctggccacccctgagaacatgcctacctgctgggtgccgtctgtgcgttccatggccttcaagtcacaggacgcagcgattccctgccctcttcggtgttattacacaggcaggacttcagtgtcagtatccctgccttcagtcttctttagaaatcacatctgtgttcaatccattgtttagagggagtgtatttttcctgttccacgaagaggactttttgttcacaattggatcacaatgcagaggagtctgttcctcccccgtcggcttctcggtgctgggagggtgacctgtcccagatgactcatcaccctgacatgctcttgacaaaggacaccaccaagaggagatggcagctgtaccggtgcagcctctgtctgagggggatatttgcctcagtgtgattaaaaatcagtcatgaaagatttttgaattcagattatttttatcaggaacagattttgaacatcctgaaatcttttccctggcatcatattaggttttctttgttcactatgatgtaaagtttcagactcttgatatttttaatatcaacatagacggtaggacaaggaacggtaccagaaatgagtaaagagacaataatgataagatcgatttatcaagacataacaaccccaaatgtatatgcactaaataacagcttcaaaatacatgaagcaaaatggcagaattgaagagaatgagataaaaacagaattttaacggg

SEQ ID NO: 147474 - DNA, 1970 bp, Homo sapiens
  Payload ID: 9169
  Gene Symbol: LSS
  Gene Name: lanosterol synthase (2,3-oxidosqualene-lanosterol cyclase)
  ENST ID: ENST00000625576
  CDS Start-End: 1-1649
gtggtgctgtggccatcccctcctgggggaagttctggctggctgtcctgaatgtttacagctgggaaggcctcaataccctgttcccagagatgtggctgtttcctgactgggcaccggcacacccctccacactctggtgccactgccggcaggtgtacctgcccatgagctactgctacgccgttcggctgagtgccgcggaagacccgctggtccagagcctccgccaggagctctatgtggaggacttcgccagcattgactggctggcgcagaggaacaacgtggcccccgacgagctgtacacgccgcacagctggctgctccgcgtggtatatgcgctcctcaacctgtatgagcaccaccacagtgcccacctgcggcagcgggccgtgcagaagctgtatgaacacattgtggccgacgaccgattcaccaagagcatcagcatcggcccgatctcgaaaaccatcaacatgcttgtgcgctggtatgtggacgggcccgcctccactgccttccaggagcatgtctccagaatcccggactatctctggatgggccttgacggcatgaaaatgcagggcaccaacggctcacagatctgggacaccgcattcgccatccaggctctgcttgaggcgggcgggcaccacaggcccgagttttcgtcctgcctgcagaaggctcatgagttcctgaggctctcacaggtcccagataaccctcccgactaccagaagtactaccgccagatgcgcaagggtggcttctccttcagtacgctggactgcggctggatcgtttctgactgcacggctgaggccttgaaggctgtgctgctcctgcaggagaagtgtccccatgtcaccgagcacatccccagagaacggctctgcgatgctgtggctgtgctgctgaacatgagaaatccagatggagggttcgccacctatgagaccaagcgtggggggcacttgctggagctgctgaacccctcggaggtcttcggggacatcatgattgactacacctatgtggagtgcacctcagccgtgatgcaggcgcttaagtatttccacaagcgtttcccggagcacagggcagcggagatccgggagaccctcacgcagggcttagagttctgtcggcggcagcagagggccgatggctcctgggaaggctcctggggagtttgcttcacctacggcacctggtttggcctggaggccttcgcctgtatggggcagacctaccgagatgggactgcctgtgcagaggtctcccgggcctgtgacttcctgctgtcccggcagatggcagacggaggctggggggaggactttgagtcctgcgaggagcggcgttatttgcagagtgcccagtcccagatccataacacatgctgggccatgatggggctgatggccgttcggcatcctgacatcgaggcccaggagagaggagtccggtgtctacttgagaaacagctccccaatggcgactggccgcaggaaaacattgctggggtcttcaacaagtcctgtgccatctcctacacgagctacaggaacatcttccccatctgggccctcggccgcttctcccagctgtaccctgagagagcccttgctggccacccctgagaacatgcctacctgctgggtgccgtctgtgcgttccagtgaggccaaggggtcctggccgggttggggagccctcccataaccctgtcttgggctccaacccctcaacctctatctcatagatgtgaatctgggggccaggctggaggcagggatggggacagggtgggtggcttagactcttgatttttactgtaggttcatttctgaaagtagcttgtcgggcttgggtgaggaagggggcacaggagccgtgacccctgaggaggcacagcgccttctgccacctctgggcacggcctcaaggtagtgaggctagga

SEQ ID NO: 147475 - DNA, 517 bp, Homo sapiens; identical to SEQ ID NO: 147470
  Payload ID: 9169
  Gene Symbol: LSS
  Gene Name: lanosterol synthase (2,3-oxidosqualene-lanosterol cyclase)
  ENST ID: ENST00000627118
  CDS Start-End: 1-409

SEQ ID NO: 147476 - DNA, 233 bp, Homo sapiens
  Payload ID: 9169
  Gene Symbol: LSS
  Gene Name: lanosterol synthase (2,3-oxidosqualene-lanosterol cyclase)
  ENST ID: ENST00000625922
  CDS Start-End: 1-233
gtggtgctgtggccatcccctcctgggggaagttctggctggctgtcctgaatgtttacagctgggaaggcctcaataccctgttcccagagatgtggctgtttcctgactgggcaccggcacacccctccacactctggtgccactgccggcaggtgtacctgcccatgagctactgctacgccgttcggctgagtgccgcggaagacccgctggtccagagcctccgccag

SEQ ID NO: 147477 - DNA, 3572 bp, Homo sapiens
  Payload ID: 9170
  Gene Symbol: LSG1
  Gene Name: large 60S subunit nuclear export GTPase 1
  Uniprot ID: Q9H089
  ENST ID: ENST00000265245
  CDS Start-End: 316-2292
tctcgccggacgctaaagaccgacgcacaaattaagaatggaccattcttttaactcagtcatttatccaaactcgagacattcgccaggaaatctatcgaaaatttcccagaaccattttttcacttatattctataatactggtaaaatcgagacgtaaaaggagaacttgagaacaagtcattctgctttcccctctcaagtttgagcctgaactacttgggctcgcttatcgtcacttccggggatcgaactgtgaatcccggaaactgcacgcgccgagccgggaagcttcgtccagcggtcgtgttgccatgggccggaggagagccccggccggtgggtcgctgggacgggcccttatgcgccatcagactcagcggagccgaagccatcgtcacactgactcctggttgcacacaagtgaactcaatgatggctatgattggggtcgtcttaatcttcagtcagtgactgaacagagctcccttgatgacttccttgctactgcagaacttgcaggaacagagtttgtagctgagaaacttaatattaagtttgtgcctgctgaggctagaactggactactgtctttcgaggagagccagagaattaagaagctccatgaagaaaacaaacagttcttgtgtataccgaggagaccaaactggaaccaaaatactaccccagaagaactcaaacaagcagagaaagataactttctagaatggagacgtcagcttgtccggctagaagaggaacagaagctgatattgactccatttgaacgaaatttggacttttggcgccagctctggagagtcattgagagaagtgatattgtggtccagatagtagatgctcgaaacccactcctgtttagatgtgaggatttggaatgttatgtgaaagaaatggatgccaataaggagaacgtcattctgatcaacaaggcagacttgctgactgctgagcagcggagtgcctgggccatgtacttcgaaaaagaagatgtgaaggttattttctggtcagctttggccggagccattcccctgaatggtgactctgaggaagaggcaaacagagatgatagacaaagcaacacaaccaagtttggacattccagtttcgaccaggctgaaatttcccacagtgaatccgaacatctcccagctagggattctccttcacttagtgaaaatcccacaacggatgaagatgacagtgagtatgaggactgtccagaggaggaggaagacgactggcagacgtgctcagaagaagacggtcccaaggaagaggactgcagccaggactggaaggaaagctctactgcagattctgaggctcggagcaggaaaaccccacagaagaggcagatacacaattttagccatctggtatccaagcaggagttactggagctctttaaggagctacacactgggagaaaggtgaaagatgggcaacttacggtcggactggtgggctaccctaatgttggtaagagttcaacaatcaacaccatcatgggcaacaagaaagtatctgtgtctgccacacctggtcacacaaagcactttcagactctctatgtggagcctggcctctgcctgtgtgactgtcctggcttggtgatgccatcttttgtgtctaccaaggcagaaatgacttgcagcggaatcctcccaattgatcagatgagagatcatgttcctcctgtatcactagtttgccagaatattccaagacatgttttagaagctacctatggcattaacatcataacgcctagagaggatgaagatccccaccgacctccaacatcggaagaactgttgacagcttatggatacatgcgaggattcatgacagcgcatggacagccagaccagcctcgatctgcgcgctacatcctgaaggactatgtcagtggtaagctgctgtactgccatcctcctcctggaagagatcctgtaacttttcagcatcaacaccagcgactcctagagaacaaaatgaacagtgatgaaataaaaatgcagctaggcagaaataaaaaagcaaagcagattgaaaatatcgttgacaaaacttttttccatcaagagaatgtgagggctttgaccaaaggagtccaggctgtgatgggttacaagcccgggagtggtgtagtgactgcatccactgcgagctctgagaacggggcggggaagccctggaaaaaacatggcaacagaaataaaaaagaaaaaagtcgtagactctacaagcacctggatatgtgaggttgggctgcaacagaaatgtcatctgcattgtgcagatggaaaagagcagaagctgcctgttgcctgtggaaccgtcccaagacactagcactgtagaacgggccctgctcttgcagagcacggctgcacccaacagtctccatgtcaagaccaagggcctcctggaaacaccaactctgacaaaaaggagtcatctgggagcccgagaatcctactcctggccgggcacagtggctcacgcaccaacatggagaaaccccgtctctactaaaaatacaaaaaaattagccaggcgtggtggcgcgcacctgtaatcccagctactcgggaggctgaggcaggagaatcacttgaaccagggaggcagagtttgcagtgaatggagattgcgccgctgcactccagcctgggcgacagagtgagactgcatcacaagaaaaaaaatttgcaagggatggttcacgagacacatttgggacgaaggtgaaagagaaattccccattctgagtgtcctagttgggttcctccgactctaaacaagggacttgggttcagttagtgtacagcgggggctcacgtccactaaggaacatgtagaatgtaaccaccgggtgacagggaagctgcggtatttactacctagcccccatcttcactggttattccacttatttaaaatgtccagaataagcaaatctccatatagaggaagtagattagtggttgcttcgggatgggaggaatgggaagattgaggtctttcttttgcagtgataaaaatgtcctaaaattgactgtagcgatggtcacacaactctgaatatgcttaagaccattgaattacacactttacgttggtgaattgtatggtatgtaaattatagttcaataacatagttacaaaagataatcaaaagcatgaaagcactgttgatgtggtttggatctgtgtcctcaccgagtctcatgttgaaatgtaagccccctggtgggaggcgatgggattatggggcagagtcctcacgaacggtttagcaccacccgctcagtgctgttctcctgatattgagtcctcatcacatctggttgcttcaaagtgtgtggtgcctcccctctgtctccctcctgctctggccatataagatgtgcctgcttctccttcgccttctaacatgattgtaagtttcctgaggcctccctagaagcaaaagctgctgtgcttcctgtaccatctacaggaccgtgagccaattaaacctcttttctttataaatta

SEQ ID NO: 147478 - DNA, 755 bp, Homo sapiens
  Payload ID: 9170
  Gene Symbol: LSG1
  Gene Name: large 60S subunit nuclear export GTPase 1
  ENST ID: ENST00000427461
  CDS Start-End: 1-537
atgggccggaggagagccccggccggtgggtcgctgggacgggcccttatgcgccatcagactcagcggagccgaagccatcgtcacactgactcctggttgcacacaagtgaactcaatgatggctatgattggggtcgtcttaatcttcagtcagtgactgaacagagctcccttgatgacttccttgctactgcagaacttgcaggaacagagtttgtagctgagaaacttaatattaagtttgtgcctgctgaggctagaactggactactgtctttcgaggagagccagagaattaagaagctccatgaagaaaacaaacagttcttgtgtataccgaggagaccaaactggaaccaaaatactaccccagaagaactcaaacaagcagagaaagataactttctagaatggagacgtcagcttgtccggctagaagaggaacagaagctgatattgactccatttgaacgaaatttggacttttggcgccagctctggagagtcattgagagaagtgctggacacctgtagtccccactatatttgtgagggatttgaggggcttgccaccagctgcagaaagttatcttattgctgtactttcttatacgtgatggaagaagttggacttgccattcctgcttcagccgggcaacctaatgatattgtggtccagatagtagatgctcgaaacccactcctgtttagatgtgaggatttggaatgttatgtgaaagaaatggatgcca

SEQ ID NO: 147479 - DNA, 854 bp, Homo sapiens
  Payload ID: 9170
  Gene Symbol: LSG1
  Gene Name: large 60S subunit nuclear export GTPase 1
  ENST ID: ENST00000437613
  CDS Start-End: 1-854
agtttggacattccagtttcgaccaggctgaaatttcccacagtgaatccgaacatctcccagctagggattctccttcacttagtgaaaatcccacaacggatgaagatgacagtgagtatgaggactgtccagaggaggaggaagacgactggcagacgtgctcagaagaagacggtcccaaggaagaggactgcagccaggactggaaggaaagctctactgcagattctgaggctcggagcaggaaaaccccacagaagaggcagatacacaattttagccatctggtatccaagcaggagttactggagctctttaaggagctacacactgggagaaaggtgaaagatgggcaacttacggtcggactggtgggctaccctaatgttggtaagagttcaacaatcaacaccatcatgggcaacaagaaagtatctgtgtctgccacacctggtcacacaaagcactttcagactctctatgtggagcctggcctctgcctgtgtgactgtcctggcttggtgatgccatcttttgtgtctaccaaggcagaaatgacttgcagcggaatcctcccaattgatcagatgagagatcatgttcctcctgtatcactaatcataacgcctagagaggatgaagatccccaccgacctccaacatcggaagaactgttgacagcttatggatacatgcgaggattcatgacagcgcatggacagccagaccagcctcgatctgcgcgctacatcctgaaggactatgtcagtggtaagctgctgtactgccatcctcctcctggaagagatcctgtaacttttcagcatcaacaccagcgactcctagagaac

SEQ ID NO: 147480 - DNA, 4256 bp, Homo sapiens
  Payload ID: 9171
  Gene Symbol: LATS1
  Gene Name: large tumor suppressor kinase 1
  Uniprot ID: O95835
  ENST ID: ENST00000253339
  CDS Start-End: 229-3621
aacccctatatcaatggacttttcctctaatacatggtactgctgtattaaccactttatagctttcctttctttctttcttttacagagttaattatttatattgtaaagaattttaacagtcctggggacttccttgaaggatcattttcacttttgctcagaagaaagctctggatctatcaaataaagaagtccttcgtgtgggctacatatatagatgttttcatgaagaggagtgaaaagccagaaggatatagacaaatgaggcctaagacctttcctgccagtaactatactgtcagtagccggcaaatgttacaagaaattcgggaatcccttaggaatttatctaaaccatctgatgctgctaaggctgagcataacatgagtaaaatgtcaaccgaagatcctcgacaagtcagaaatccacccaaatttgggacgcatcataaagccttgcaggaaattcgaaactctctgcttccatttgcaaatgaaacaaattcttctcggagtacttcagaagttaatccacaaatgcttcaagacttgcaagctgctggatttgatgaggatatggttatacaagctcttcagaaaactaacaacagaagtatagaagcagcaattgaattcattagtaaaatgagttaccaagatcctcgacgagagcagatggctgcagcagctgccagacctattaatgccagcatgaaaccagggaatgtgcagcaatcagttaaccgcaaacagagctggaaaggttctaaagaatccttagttcctcagaggcatggcccgccactaggagaaagtgtggcctatcattctgagagtcccaactcacagacagatgtaggaagacctttgtctggatctggtatatcagcatttgttcaagctcaccctagcaacggacagagagtgaaccccccaccaccacctcaagtaaggagtgttactcctccaccacctccaagaggccagactccccctccaagaggtacaactccacctcccccttcatgggaaccaaactctcaaacaaagcgctattctggaaacatggaatacgtaatctcccgaatctctcctgtcccacctggggcatggcaagagggctatcctccaccacctctcaacacttcccccatgaatcctcctaatcaaggacagagaggcattagttctgttcctgttggcagacaaccaatcatcatgcagagttctagcaaatttaactttccatcagggagacctggaatgcagaatggtactggacaaactgatttcatgatacaccaaaatgttgtccctgctggcactgtgaatcggcagccaccacctccatatcctctgacagcagctaatggacaaagcccttctgctttacaaacagggggatctgctgctccttcgtcatatacaaatggaagtattcctcagtctatgatggtgccaaacagaaatagtcataacatggaactatataacattagtgtacctggactgcaaacaaattggcctcagtcatcttctgctccagcccagtcatccccgagcagtgggcatgaaatccctacatggcaacctaacataccagtgaggtcaaattcttttaataacccattaggaaatagagcaagtcactctgctaattctcagccttctgctacaacagtcactgcaattacaccagctcctattcaacagcctgtgaaaagtatgcgtgtattaaaaccagagctacagactgctttagcacctacacacccttcttggataccacagccaattcaaactgttcaacccagtccttttcctgagggaaccgcttcaaatgtgactgtgatgccacctgttgctgaagctccaaactatcaaggaccaccaccaccctacccaaaacatctgctgcaccaaaacccatctgttcctccatacgagtcaatcagtaagcctagcaaagaggatcagccaagcttgcccaaggaagatgagagtgaaaagagttatgaaaatgttgatagtggggataaagaaaagaaacagattacaacttcacctattactgttaggaaaaacaagaaagatgaagagcgaagggaatctcgtattcaaagttattctcctcaagcatttaaattctttatggagcaacatgtagaaaatgtactcaaatctcatcagcagcgtctacatcgtaaaaaacaattagagaatgaaatgatgcgggttggattatctcaagatgcccaggatcaaatgagaaagatgctttgccaaaaagaatctaattacatccgtcttaaaagggctaaaatggacaagtctatgtttgtgaagataaagacactaggaataggagcatttggtgaagtctgtctagcaagaaaagtagatactaaggctttgtatgcaacaaaaactcttcgaaagaaagatgttcttcttcgaaatcaagtcgctcatgttaaggctgagagagatatcctggctgaagctgacaatgaatgggtagttcgtctatattattcattccaagataaggacaatttatactttgtaatggactacattcctgggggtgatatgatgagcctattaattagaatgggcatctttccagaaagtctggcacgattctacatagcagaacttacctgtgcagttgaaagtgttcataaaatgggttttattcatagagatattaaacctgataatattttgattgatcgtgatggtcatattaaattgactgactttggcctctgcactggcttcagatggacacacgattctaagtactatcagagtggtgaccatccacggcaagatagcatggatttcagtaatgaatggggggatccctcaagctgtcgatgtggagacagactgaagccattagagcggagagctgcacgccagcaccagcgatgtctagcacattctttggttgggactcccaattatattgcacctgaagtgttgctacgaacaggatacacacagttgtgtgattggtggagtgttggtgttattctttttgaaatgttggtgggacaacctcctttcttggcacaaacaccattagaaacacaaatgaaggttatcaactggcaaacatctcttcacattccaccacaagctaaactcagtcctgaagcttctgatcttattattaaactttgccgaggacccgaagatcgcttaggcaagaatggtgctgatgaaataaaagctcatccattttttaaaacaattgacttctccagtgacctgagacagcagtctgcttcatacattcctaaaatcacacacccaacagatacatcaaattttgatcctgttgatcctgataaattatggagtgatgataacgaggaagaaaatgtaaatgacactctcaatggatggtataaaaatggaaagcatcctgaacatgcattctatgaatttaccttccgaaggttttttgatgacaatggctacccatataattatccgaagcctattgaatatgaatacattaattcacaaggctcagagcagcagtcggatgaagatgatcaaaacacaggctcagagattaaaaatcgcgatctagtatatgtttaacacactagtaaataaatgtaatgaggatttgtaaaagggcctgaaatgcgaggtgttttgaggttctgagagtaaaattatgcaaatatgacagagctatatatgtgtgctctgtgtacaatattttattttcctaaattatgggaaatccttttaaaatgttaatttattccagccgtttaaatcagtatttagaaaaaaattgttataaggaaagtaaattatgaactgaatattatagtcagttcttggtacttaaagtacttaaaataagtagtgctttgtttaaaaggagaaacctggtatctatttgtatatatgctaaataattttaaaatacaagagtttttgaaatttttttgaaagacagttttagttttatcttgctttaaccaaatatgaaacataccccctattttacagagctcttttttcccctcataaccttgtttttggtagaaaataagctagagaaattaagccatcgtgttggtgagtgttcctaggctaatgataatctgtataattcacatcctgaaactaaggaatacagggttgaaaaaatattaatatgtttgtcagaaggaaaaataatgcatttatcttcccccccaccccccgccccatggaatatt

SEQ ID NO: 147481 - DNA, 3879 bp, Homo sapiens
  Payload ID: 9171
  Gene Symbol: LATS1
  Gene Name: large tumor suppressor kinase 1
  ENST ID: ENST00000441107
  CDS Start-End: 360-767
agcaatcatttttcagcatgaagatacagcgttgctttcacttttgatctgacaattattagaaagtgaactgaagaaaatgtcagtatgcagtttcctttaaagatgggaactcgctatgttgcctgcgctggattccaactcctggactcgagcaatcctcccaccacagcctctcaagtagctgggactacaggtgcactactgcacccagccaggagttaattatttatattgtaaagaattttaacagtcctggggacttccttgaaggatcattttcacttttgctcagaagaaagctctggatctatcaaataaagaagtccttcgtgtgggctacatatatagatgttttcatgaagaggagtgaaaagccagaaggatatagacaaatgaggcctaagacctttcctgccagtaactatactgtcagtagccggcaaatgttacaagaaattcgggaatcccttaggaatttatctaaaccatctgatgctgctaaggctgagcataacatgagtaaaatgtcaaccgaagatcctcgacaagtcagaaatccacccaaatttgggacgcatcataaagccttgcaggaaattcgaaactctctgcttccatttgcaaatgaaacaaattcttctcggagtacttcagaagttaatccacaaatgcttcaagacttgcaagctgctggatttgatgaggaggatcatctgtcagtagcctgttcacccattagtcttactaagccatttctcatttaaaaatgtcgtttgaaatactgaatcctctaggacaagatatggttatacaagctcttcagaaaactaacaacagaagtatagaagcagcaattgaattcattagtaaaatgagttaccaagatcctcgacgagagcagatggctgcagcagctgccagacctattaatgccagcatgaaaccagggaatgtgcagcaatcagttaaccgcaaacagagctggaaaggttctaaagaatccttagttcctcagaggcatggcccgccactaggagaaagtgtggcctatcattctgagagtcccaactcacagacagatgtaggaagacctttgtctggatctggtatatcagcatttgttcaagctcaccctagcaacggacagagagtgaaccccccaccaccacctcaagtaaggagtgttactcctccaccacctccaagaggccagactccccctccaagaggtacaactccacctcccccttcatgggaaccaaactctcaaacaaagcgctattctggaaacatggaatacgtaatctcccgaatctctcctgtcccacctggggcatggcaagagggctatcctccaccacctctcaacacttcccccatgaatcctcctaatcaaggacagagaggcattagttctgttcctgttggcagacaaccaatcatcatgcagagttctagcaaatttaactttccatcagggagacctggaatgcagaatggtactggacaaactgatttcatgatacaccaaaatgttgtccctgctggcactgtgaatcggcagccaccacctccatatcctctgacagcagctaatggacaaagcccttctgctttacaaacagggggatctgctgctccttcgtcatatacaaatggaagtattcctcagtctatgatggtgccaaacagaaatagtcataacatggaactatataacattagtgtacctggactgcaaacaaattggcctcagtcatcttctgctccagcccagtcatccccgagcagtgggcatgaaatccctacatggcaacctaacataccagtgaggtcaaattcttttaataacccattaggaaatagagcaagtcactctgctaattctcagccttctgctacaacagtcactgcaattacaccagctcctattcaacagcctgtgaaaagtatgcgtgtattaaaaccagagctacagactgctttagcacctacacacccttcttggataccacagccaattcaaactgttcaacccagtccttttcctgagggaaccgcttcaaatgtgactgtgatgccacctgttgctgaagctccaaactatcaaggaccaccaccaccctacccaaaacatctgctgcaccaaaacccatctgttcctccatacgagtcaatcagtaagcctagcaaagaggatcagccaagcttgcccaaggaagatgagagtgaaaagagttatgaaaatgttgatagtggggataaagaaaagaaacagattacaacttcacctattactgttaggaaaaacaagaaagatgaagagcgaagggaatctcgtattcaaagttattctcctcaagcatttaaattctttatggagcaacatgtagaaaatgtactcaaatctcatcagcagcgtctacatcgtaaaaaacaattagagaatgaaatgatgcgggttggattatctcaagatgcccaggatcaaatgagaaagatgctttgccaaaaagaatctaattacatccgtcttaaaagggctaaaatggacaagtctatgtttgtgaagataaagacactaggaataggagcatttggtgaagtctgtctagcaagaaaagtagatactaaggctttgtatgcaacaaaaactcttcgaaagaaagatgttcttcttcgaaatcaagtcgctcatgttaaggctgagagagatatcctggctgaagctgacaatgaatgggtagttcgtctatattattcattccaagataaggacaatttatactttgtaatggactacattcctgggggtgatatgatgagcctattaattagaatgggcatctttccagaaagtctggcacgattctacatagcagaacttacctgtgcagttgaaagtgttcataaaatgggttttattcatagagatattaaacctgataatattttgattgatcgtgatggtcatattaaattgactgactttggcctctgcactggcttcagatggacacacgattctaagtactatcagagtggtgaccatccacggcaagatagcatggatttcagtaatgaatggggggatccctcaagctgtcgatgtggagacagactgaagccattagagcggagagctgcacgccagcaccagcgatgtctagcacattctttggttgggactcccaattatattgcacctgaagtgttgctacgaacaggatacacacagttgtgtgattggtggagtgttggtgttattctttttgaaatgttggtgggacaacctcctttcttggcacaaacaccattagaaacacaaatgaaggttatcaactggcaaacatctcttcacattccaccacaagctaaactcagtcctgaagcttctgatcttattattaaactttgccgaggacccgaagatcgcttaggcaagaatggtgctgatgaaataaaagctcatccattttttaaaacaattgacttctccagtgacctgagacagcagtctgcttcatacattcctaaaatcacacacccaacagatacatcaaattttgatcctgttgatcctgataaattatggagtgatgataacgaggaagaaaatgtaaatgacactctcaatggatggtataaaaatggaaagcatcctgaacatgcattctatgaatttaccttccgaaggttttttgatgacaatggctacccatataattatccgaagcctattgaatatgaatacattaattcacaaggctcagagcagcagtcggatgaagatgatcaaaacacaggctcagagattaaaaatcgcgatctagtatatgtttaacacactagtaaataaatgtaatgaggatttgt

SEQ ID NO: 147482 - DNA, 7517 bp, Homo sapiens
  Payload ID: 9171
  Gene Symbol: LATS1
  Gene Name: large tumor suppressor kinase 1
  Uniprot ID: O95835
  ENST ID: ENST00000543571
  CDS Start-End: 549-3941
gcgacgctcacgaacgatcagagctgcgggcgacgcaacgaagcccggaggccgcaggctgcgcgctccctcgcagcagccgggcgggcaaaagcccccagtcctcggcccccgcgcaagcgacgccgggaaatgcccacatccgggaaacctgcagcggagtgcggcggcggcgacactgagtggaaggcaaaatggcggcggcggcggcggtggcctggtgttaaggggagagccaggtcctcacgacccctgggacgggccgcgctggcccgcggcagcccccccgttcgtctccccgctctgccccaccagggatacttggggttgctgggacggactctggccgcctcagcgtccgccctcaggcccgtggccgctgtccaggagctctgctctcccctccagagttaattatttatattgtaaagaattttaacagtcctggggacttccttgaaggatcattttcacttttgctcagaagaaagctctggatctatcaaataaagaagtccttcgtgtgggctacatatatagatgttttcatgaagaggagtgaaaagccagaaggatatagacaaatgaggcctaagacctttcctgccagtaactatactgtcagtagccggcaaatgttacaagaaattcgggaatcccttaggaatttatctaaaccatctgatgctgctaaggctgagcataacatgagtaaaatgtcaaccgaagatcctcgacaagtcagaaatccacccaaatttgggacgcatcataaagccttgcaggaaattcgaaactctctgcttccatttgcaaatgaaacaaattcttctcggagtacttcagaagttaatccacaaatgcttcaagacttgcaagctgctggatttgatgaggatatggttatacaagctcttcagaaaactaacaacagaagtatagaagcagcaattgaattcattagtaaaatgagttaccaagatcctcgacgagagcagatggctgcagcagctgccagacctattaatgccagcatgaaaccagggaatgtgcagcaatcagttaaccgcaaacagagctggaaaggttctaaagaatccttagttcctcagaggcatggcccgccactaggagaaagtgtggcctatcattctgagagtcccaactcacagacagatgtaggaagacctttgtctggatctggtatatcagcatttgttcaagctcaccctagcaacggacagagagtgaaccccccaccaccacctcaagtaaggagtgttactcctccaccacctccaagaggccagactccccctccaagaggtacaactccacctcccccttcatgggaaccaaactctcaaacaaagcgctattctggaaacatggaatacgtaatctcccgaatctctcctgtcccacctggggcatggcaagagggctatcctccaccacctctcaacacttcccccatgaatcctcctaatcaaggacagagaggcattagttctgttcctgttggcagacaaccaatcatcatgcagagttctagcaaatttaactttccatcagggagacctggaatgcagaatggtactggacaaactgatttcatgatacaccaaaatgttgtccctgctggcactgtgaatcggcagccaccacctccatatcctctgacagcagctaatggacaaagcccttctgctttacaaacagggggatctgctgctccttcgtcatatacaaatggaagtattcctcagtctatgatggtgccaaacagaaatagtcataacatggaactatataacattagtgtacctggactgcaaacaaattggcctcagtcatcttctgctccagcccagtcatccccgagcagtgggcatgaaatccctacatggcaacctaacataccagtgaggtcaaattcttttaataacccattaggaaatagagcaagtcactctgctaattctcagccttctgctacaacagtcactgcaattacaccagctcctattcaacagcctgtgaaaagtatgcgtgtattaaaaccagagctacagactgctttagcacctacacacccttcttggataccacagccaattcaaactgttcaacccagtccttttcctgagggaaccgcttcaaatgtgactgtgatgccacctgttgctgaagctccaaactatcaaggaccaccaccaccctacccaaaacatctgctgcaccaaaacccatctgttcctccatacgagtcaatcagtaagcctagcaaagaggatcagccaagcttgcccaaggaagatgagagtgaaaagagttatgaaaatgttgatagtggggataaagaaaagaaacagattacaacttcacctattactgttaggaaaaacaagaaagatgaagagcgaagggaatctcgtattcaaagttattctcctcaagcatttaaattctttatggagcaacatgtagaaaatgtactcaaatctcatcagcagcgtctacatcgtaaaaaacaattagagaatgaaatgatgcgggttggattatctcaagatgcccaggatcaaatgagaaagatgctttgccaaaaagaatctaattacatccgtcttaaaagggctaaaatggacaagtctatgtttgtgaagataaagacactaggaataggagcatttggtgaagtctgtctagcaagaaaagtagatactaaggctttgtatgcaacaaaaactcttcgaaagaaagatgttcttcttcgaaatcaagtcgctcatgttaaggctgagagagatatcctggctgaagctgacaatgaatgggtagttcgtctatattattcattccaagataaggacaatttatactttgtaatggactacattcctgggggtgatatgatgagcctattaattagaatgggcatctttccagaaagtctggcacgattctacatagcagaacttacctgtgcagttgaaagtgttcataaaatgggttttattcatagagatattaaacctgataatattttgattgatcgtgatggtcatattaaattgactgactttggcctctgcactggcttcagatggacacacgattctaagtactatcagagtggtgaccatccacggcaagatagcatggatttcagtaatgaatggggggatccctcaagctgtcgatgtggagacagactgaagccattagagcggagagctgcacgccagcaccagcgatgtctagcacattctttggttgggactcccaattatattgcacctgaagtgttgctacgaacaggatacacacagttgtgtgattggtggagtgttggtgttattctttttgaaatgttggtgggacaacctcctttcttggcacaaacaccattagaaacacaaatgaaggttatcaactggcaaacatctcttcacattccaccacaagctaaactcagtcctgaagcttctgatcttattattaaactttgccgaggacccgaagatcgcttaggcaagaatggtgctgatgaaataaaagctcatccattttttaaaacaattgacttctccagtgacctgagacagcagtctgcttcatacattcctaaaatcacacacccaacagatacatcaaattttgatcctgttgatcctgataaattatggagtgatgataacgaggaagaaaatgtaaatgacactctcaatggatggtataaaaatggaaagcatcctgaacatgcattctatgaatttaccttccgaaggttttttgatgacaatggctacccatataattatccgaagcctattgaatatgaatacattaattcacaaggctcagagcagcagtcggatgaagatgatcaaaacacaggctcagagattaaaaatcgcgatctagtatatgtttaacacactagtaaataaatgtaatgaggatttgtaaaagggcctgaaatgcgaggtgttttgaggttctgagagtaaaattatgcaaatatgacagagctatatatgtgtgctctgtgtacaatattttattttcctaaattatgggaaatccttttaaaatgttaatttattccagccgtttaaatcagtatttagaaaaaaattgttataaggaaagtaaattatgaactgaatattatagtcagttcttggtacttaaagtacttaaaataagtagtgctttgtttaaaaggagaaacctggtatctatttgtatatatgctaaataattttaaaatacaagagtttttgaaatttttttgaaagacagttttagttttatcttgctttaaccaaatatgaaacataccccctattttacagagctcttttttcccctcataaccttgtttttggtagaaaataagctagagaaattaagccatcgtgttggtgagtgttcctaggctaatgataatctgtataattcacatcctgaaactaaggaatacagggttgaaaaaatattaatatgtttgtcagaaggaaaaataatgcatttatcttcccccccaccccccgccccatggaatatttaatctatttaatcttcttgcatttatttctcaagaattactggctttaaaagaagccaaagcactactagctttttttccatattggtatttttgatgctgcttccaattttaaaagggaacaaagctgccataaatcgaaatgttcaatactaaaagctaaaatatttctcaccatcctaagcagataattattttaattttcatatacttttcctgtatagtaactattttgattatatcatcaatgttacctgtttcctctttcagaacagtgctgcatatacagattgttattggcaaaggaaaatctggctatctggcaatattttacctaagcgcagattaattggtgaaaaaattaactcttaagatggccattaataattaggaaagtttacagagtggtcttagtagaaaattcaagtcctcctaatttatttaaggttcaataatgcgttcaacatgcctgttatgtataacgcttaggttctaaggaagattaaggtttcataccaaaatacatgtagcttatcttttaggaaggggaaaaaggctccattttgaccatagtaaaatttgtgttgtgttttatttccttttcttaagctccactgataagggattgtttttatcaaaagttactatttgtagattggaggcataattttagtgattttcatacttttagctttcttcgcataaaagctaattgaaaccgtatatgtagtaaaattaaaggcagagctgttgcagttgaattggagagttagggcaaagaacacttattagcccacacttcccacctttctacaggtggtcctttcagagctcagcctgaaaacccactactgtgttatcgtgcgtcttttggggttagtggttcttttgagaatctgaaggaagctgtggactcttcctagaaaaaaaaaccacacatacacatacaatgttgcatgcagtttcaagggattttggacatattgaaacctatcacaggctgtaggttatggacctctgtgccatgagaaaattgatacattaaactaagaactttgtttttaacttaccaatcactactcagcacatcttatataagctgataatttgtgatggaaaaggtctgtagcatgtgatataaggtgaccttatgaatgcctctcttgctggtacattaagttgttttaatatatcatttggaggggactgaaatgttaggctcattacaagcttgatacagaaatatttctgaaggatttctaatcagaattgtaaaacaatgtgctatcatgaaatcgcagtcttcacctcatggttcatggaacatttggttagtcccataaaatcctatgcaaaacaaagtagttcaagaatttttaggtgggtagtcacatttataaggtattcctcttactctttgggctttttcagtctgatttatttaaattttcatttagttgttttacttttggactaaggtgcaatacagtagaagataactttgttacatttatgttgtaggaaaactaaggtgctgtctcctcccccttcccttcccacaaaatctgtattccccctattgctgaaatgtaacagacactacaaattttgtattctttttttgttttttgttttgagacagggtctcactctgtcacccaggctggagggcagtggcgcttcacagctcactgcatcctcaaccttgggggctcacgcagtcctcccgcctcagcctcccaagtagctgggcatgcgccaccaagcccagctaatttttgtatctttagtagagatggggtttcgccatgttgcccaggttggtgtggaattcctgggctccagttatatgcccacctcagcctcccaaagtgctgggattacagacgtgacccaccgcgcctggcgcaaatatgtattcttttaaaatttcctctgatactataagctttttgcatttatctgaagcagtatacatgcctttggtatcagcaattttaacagtttggatatacttatcagctatcttattccaaaactacatctacttcttccagtatagaatctggtgcttcctgaccaaaaagatgagaaaaacaatgttaaaaatatagatgctttccattgaaatggagtgaaaacattggttctatatgttttcttttaaaataattttcttattaaaaacttgctgtctttattatacttaccctttttatgcatatcaatagtatttataagatgtgttctataattatgtaattgtagatactgttatgcattgtccagtgacatcataaggcaggccctactgctgtatcttttctaccttcttatttgtaatagaaactatagaatgtatgactaaaaagtcactttgagattgacttttttaaaaagttattaccttctgctgttgcaaagtgcaaaactgtgagtggaattgttttattctgacttaatgtgttagaaattagagaatacagtgggaggatttttagacattgctgctgctgttacccaaggtattttagataaaaaatttttaataaacatccctttggtatttaaagtggaacatttagcctgttcattttaatctaaagcaaaaagtaatttgggtcaaaatattggtatatttgtaaagcgccttaatatatccctttgtggaaggcactacacagtttacttttatattgtattgtgtatataagtattttgtattaaaattgaatcagtggcaacattaaagttttataaaatcatgctttgttagaaaaagaattacagctttgcaatataactaattgtttcgcataattctgaatgtaatagatatgaataatcagcctgtgtttttaatgaacttatttgtattttcccaatcattttctctagtgtaatgtttgctgggataataaaaaaaattcaaatctttcaa

SEQ ID NO: 147483 - DNA, 602 bp, Homo sapiens
  Payload ID: 9171
  Gene Symbol: LATS1
  Gene Name: large tumor suppressor kinase 1
  ENST ID: ENST00000458696
  CDS Start-End: 1-602
gttaaggggagagccaggtcctcacgacccctgggacgggccgcgctggcccgcggcagcccccccgttcgtctccccgctctgccccaccagggatacttggggttgctgggacggactctggccgcctcagcgtccgccctcaggcccgtggccgctgtccaggagctctgctctcccctccaggatatggttatacaagctcttcagaaaactaacaacagaagtatagaagcagcaattgaattcattagtaaaatgagttaccaagatcctcgacgagagcagatggctgcagcagctgccagacctattaatgccagcatgaaaccagggaatgtgcagcaatcagttaaccgcaaacagagctggaaaggttctaaagaatccttagttcctcagaggcatggcccgccactaggagaaagtgtggcctatcattctgagagtcccaactcacagacagatgtaggaagacctttgtctggatctggtatatcagcatttgttcaagctcaccctagcaacggacagagagtgaaccccccaccaccacctcaagtaaggagtgttactcctccaccacctccaagaggccagac

SEQ ID NO: 147484 - DNA, 1096 bp, Homo sapiens
  Payload ID: 9171
  Gene Symbol: LATS1
  Gene Name: large tumor suppressor kinase 1
  ENST ID: ENST00000542720
  CDS Start-End: 317-724
gagccaggtcctcacgacccctgggacgggccgcgctggcccgcggcagcccccccgttcgtctccccgctctgccccaccagggatacttggggttgctgggacggactctggccgcctcagcgtccgccctcaggcccgtggccgctgtccaggagctctgctctcccctccagagttaattatttatattgtaaagaattttaacagtcctggggacttccttgaaggatcattttcacttttgctcagaagaaagctctggatctatcaaataaagaagtccttcgtgtgggctacatatatagatgttttcatgaagaggagtgaaaagccagaaggatatagacaaatgaggcctaagacctttcctgccagtaactatactgtcagtagccggcaaatgttacaagaaattcgggaatcccttaggaatttatctaaaccatctgatgctgctaaggctgagcataacatgagtaaaatgtcaaccgaagatcctcgacaagtcagaaatccacccaaatttgggacgcatcataaagccttgcaggaaattcgaaactctctgcttccatttgcaaatgaaacaaattcttctcggagtacttcagaagttaatccacaaatgcttcaagacttgcaagctgctggatttgatgaggaggatcatctgtcagtagcctgttcacccattagtcttactaagccatttctcatttaaaaatgtcgtttgaaatactgaatcctctaggacaagatatggttatacaagctcttcagaaaactaacaacagaagtatagaagcagcaattgaattcattagtaaaatgagttaccaagatcctcgacgagagcagatggctgcagcagctgccagacctattaatgccagcatgaaaccagggaatgtgcagcaatcagttaaccgcaaacagagctggaaaggttctaaagaatccttagttcctcagaggcatggcccgccactaggagaaagtgtggcctatcattctgagagtcccaactcacagacagatgtaggaagacctttgtctggatctggtatatcagcatttgttcaagctcacccta

SEQ ID NO: 147485 - DNA, 2567 bp, Homo sapiens
  Payload ID: 9171
  Gene Symbol: LATS1
  Gene Name: large tumor suppressor kinase 1
  Uniprot ID: O95835
  ENST ID: ENST00000392273
  CDS Start-End: 398-2470
ctgcagcggagtgcggcggcggcgacactgagtggaaggcaaaatggcggcggcggcggcggtggcctggtgttaaggggagagccaggtcctcacgacccctgggacgggccgcgctggcccgcggcagcccccccgttcgtctccccgctctgccccaccagggatacttggggttgctgggacggactctggccgcctcagcgtccgccctcaggcccgtggccgctgtccaggagctctgctctcccctccagagttaattatttatattgtaaagaattttaacagtcctggggacttccttgaaggatcattttcacttttgctcagaagaaagctctggatctatcaaataaagaagtccttcgtgtgggctacatatatagatgttttcatgaagaggagtgaaaagccagaaggatatagacaaatgaggcctaagacctttcctgccagtaactatactgtcagtagccggcaaatgttacaagaaattcgggaatcccttaggaatttatctaaaccatctgatgctgctaaggctgagcataacatgagtaaaatgtcaaccgaagatcctcgacaagtcagaaatccacccaaatttgggacgcatcataaagccttgcaggaaattcgaaactctctgcttccatttgcaaatgaaacaaattcttctcggagtacttcagaagttaatccacaaatgcttcaagacttgcaagctgctggatttgatgaggatatggttatacaagctcttcagaaaactaacaacagaagtatagaagcagcaattgaattcattagtaaaatgagttaccaagatcctcgacgagagcagatggctgcagcagctgccagacctattaatgccagcatgaaaccagggaatgtgcagcaatcagttaaccgcaaacagagctggaaaggttctaaagaatccttagttcctcagaggcatggcccgccactaggagaaagtgtggcctatcattctgagagtcccaactcacagacagatgtaggaagacctttgtctggatctggtatatcagcatttgttcaagctcaccctagcaacggacagagagtgaaccccccaccaccacctcaagtaaggagtgttactcctccaccacctccaagaggccagactccccctccaagaggtacaactccacctcccccttcatgggaaccaaactctcaaacaaagcgctattctggaaacatggaatacgtaatctcccgaatctctcctgtcccacctggggcatggcaagagggctatcctccaccacctctcaacacttcccccatgaatcctcctaatcaaggacagagaggcattagttctgttcctgttggcagacaaccaatcatcatgcagagttctagcaaatttaactttccatcagggagacctggaatgcagaatggtactggacaaactgatttcatgatacaccaaaatgttgtccctgctggcactgtgaatcggcagccaccacctccatatcctctgacagcagctaatggacaaagcccttctgctttacaaacagggggatctgctgctccttcgtcatatacaaatggaagtattcctcagtctatgatggtgccaaacagaaatagtcataacatggaactatataacattagtgtacctggactgcaaacaaattggcctcagtcatcttctgctccagcccagtcatccccgagcagtgggcatgaaatccctacatggcaacctaacataccagtgaggtcaaattcttttaataacccattaggaaatagagcaagtcactctgctaattctcagccttctgctacaacagtcactgcaattacaccagctcctattcaacagcctgtgaaaagtatgcgtgtattaaaaccagagctacagactgctttagcacctacacacccttcttggataccacagccaattcaaactgttcaacccagtccttttcctgagggaaccgcttcaaatgtgactgtgatgccacctgttgctgaagctccaaactatcaaggaccaccaccaccctacccaaaacatctgctgcaccaaaacccatctgttcctccatacgagtcaatcagtaagcctagcaaagaggatcagccaagcttgcccaaggaagatgagagtgaaaagagttatgaaaatgttgatagtggggataaagaaaagaaacagattacaacttcacctattactgttaggaaaaacaagaaagatgaagagcgaagggaatctcgtattcaaagttattctcctcaagcatttaaattctttatggagcaacatgtagaaaatgtactcaaatctcatcagcagcgtctacatcgtaaaaaacaattagagaatgaaatgatgcgggtaaaaccttttaaaatgtccatttttatacttaatcatctgtttgcttggtgtttattttaaaatattgtgtccagtatttttctttctttttatagctaaataaaatatattatcagttatggaatttaaaagtgaataaatattaaagtacttttga

SEQ ID NO: 147486 - DNA, 5511 bp, Homo sapiens
  Payload ID: 9172
  Gene Symbol: LATS2
  Gene Name: large tumor suppressor kinase 2
  Uniprot ID: Q9NRM7
  ENST ID: ENST00000382592
  CDS Start-End: 407-3673
ttgggtctgcgctttggaaccgcggcgtgagcgccccgggaagatggagcagtcgccgtccacgccaccgccgccgcccggggctcccccgtccctgcggggccagcagcagctccagccaccagtgcccggtctcccggcgcgagaggcccgggagccgccggccaggacgcccccgagggtgtagaccgcgcccctggagagagtgataatcttcaaaatgaagactttggaaaattttaggttctctataggaactacaaaaatggaaggaaagaacattttcaaaaggaaattattttgaaagtatgtttacaacaaactgatactattgacagtttttttttttaaataataaaacactttaagaagattgtatttatggtaaaaggaaactggactaacaatgaggccaaagacttttcctgccacgacttattctggaaatagccggcagcgactgcaagagattcgtgaggggttaaaacagccatccaagtcttcggttcaggggctacccgcaggaccaaacagtgacacttccctggatgccaaagtcctggggagcaaagatgccaccaggcagcagcagcagatgagagccaccccaaagttcggaccttatcagaaagccttgagggaaatcagatattccttgttgccttttgctaatgaatcgggcacctctgcagctgcagaagtgaaccggcaaatgctgcaggaactggtgaacgcaggatgcgaccaggagatggctggccgagctctcaagcagactggcagcaggagcatcgaggccgccctggagtacatcagcaagatgggctacctggacccgaggaatgagcagattgtgcgggtcattaagcagacctccccaggaaaggggctcatgccaaccccagtgacgcggaggcccagcttcgaaggaaccggcgattcgtttgcgtcctaccaccagctgagcggtaccccctacgagggcccaagcttcggcgctgacggccccacggcgctggaggagatgccgcggccgtacgtggactaccttttccccggagtcggcccccacgggcccggccaccagcaccagcacccacccaagggctacggtgccagcgtagaggcagcaggggcacacttcccgctgcagggcgcgcactacgggcggccgcacctgctggtgcctggggaacccctgggctacggagtgcagcgcagcccctccttccagagcaagacgccgccggagaccgggggttacgccagcctgcccacgaagggccagggaggaccgccaggcgccggcctcgctttcccaccccctgccgccgggctctacgtgccgcacccacaccacaagcaggccggtcccgcggcccaccagctgcatgtgctgggctcccgcagccaggtgttcgccagcgacagccccccgcagagcctgctcactccctcgcggaacagcctcaacgtggacctgtatgaattgggcagcacctccgtccagcagtggccggctgccaccctggcccgccgggactccctgcagaagccgggcctggaggcgccgccgcgcgcgcacgtggccttccggcctgactgcccagtgcccagcaggaccaactccttcaacagccaccagccgcggcccggtccgcctggcaaggccgagccctccctgcccgcccccaacaccgtgacggctgtcacggccgcgcacatcttgcacccggtgaagagcgtgcgtgtgctgaggccggagccgcagacggctgtggggccctcgcaccccgcctgggtgcccgcgcctgccccggcccccgcccccgcccccgccccggctgcggagggcttggacgccaaggaggagcatgccctggcgctgggcggcgcaggcgccttcccgctggacgtggagtacggaggcccagaccggaggtgcccgcctccgccctacccgaagcacctgctgctgcgcagcaagtcggagcagtacgacctggacagcctgtgcgcaggcatggagcagagcctccgtgcgggccccaacgagcccgagggcggcgacaagagccgcaaaagcgccaagggggacaaaggcggaaaggataaaaagcagattcagacctctcccgttcccgtccgcaaaaacagcagagacgaagagaagagagagtcacgcatcaagagctactcgccatacgcctttaagttcttcatggagcagcacgtggagaatgtcatcaaaacctaccagcagaaggttaaccggaggctgcagctggagcaagaaatggccaaagctggactctgtgaagctgagcaggagcagatgcggaagatcctctaccagaaagagtctaattacaacaggttaaagagggccaagatggacaagtctatgtttgtcaagatcaaaaccctggggatcggtgcctttggagaagtgtgccttgcttgtaaggtggacactcacgccctgtacgccatgaagaccctaaggaaaaaggatgtcctgaaccggaatcaggtggcccacgtcaaggccgagagggacatcctggccgaggcagacaatgagtgggtggtcaaactctactactccttccaagacaaagacagcctgtactttgtgatggactacatccctggtggggacatgatgagcctgctgatccggatggaggtcttccctgagcacctggcccggttctacatcgcagagctgactttggccattgagagtgtccacaagatgggcttcatccaccgagacatcaagcctgataacattttgatagatctggatggtcacattaaactcacagatttcggcctctgcactgggttcaggtggactcacaattccaaatattaccagaaagggagccatgtcagacaggacagcatggagcccagcgacctctgggatgatgtgtctaactgtcggtgtggggacaggctgaagaccctagagcagagggcgcggaagcagcaccagaggtgcctggcacattcactggtggggactccaaactacatcgcacccgaggtgctcctccgcaaagggtacactcaactctgtgactggtggagtgttggagtgattctcttcgagatgctggtggggcagccgccctttttggcacctactcccacagaaacccagctgaaggtgatcaactgggagaacacgctccacattccagcccaggtgaagctgagccctgaggccagggacctcatcaccaagctgtgctgctccgcagaccaccgcctggggcggaatggggccgatgacctgaaggcccaccccttcttcagcgccattgacttctccagtgacatccggaagcagccagccccctacgttcccaccatcagccaccccatggacacctcgaatttcgaccccgtagatgaagaaagcccttggaacgatgccagcgaaggtagcaccaaggcctgggacacactcacctcgcccaataacaagcatcctgagcacgcattttacgaattcaccttccgaaggttctttgatgacaatggctacccctttcgatgcccaaagccttcaggagcagaagcttcacaggctgagagctcagatttagaaagctctgatctggtggatcagactgaaggctgccagcctgtgtacgtgtagatgggggccaggcacccccaccactcgctgcctcccaggtcagggtcccggagccggtgccctcacaggccaatagggaagccgagggctgttttgttttaaattagtccgtcgattacttcacttgaaattctgctcttcaccaagaaaacccaaacaggacacttttgaaaacaggactcagcatcgctttcaataggcttttcaggaccttcactgcattaaaacaatatttttgaaaatttagtacagtttagaaagagcacttattttgtttatatccattttttcttactaaattatagggattaactttgacaaatcatgctgctgttattttctacatttgtattttatccatagcacttattcacatttaggaaaagacataaaaactgaagaacattgatgagaaatctctgtgcaataatgtaaaaaaaaaaaaagataacactctgctcaatgtcacggagaccattttatccacacaatggtttttgttttttattttttcccatgtttcaaaattgtgatataatgatataatgttaaaagctgctttttttggctttttgcatatctagtataataggaagtgtgagcaaggtgatgatgtggctgtgatttccgacgtctggtgtgtggagagtactgcatgagcagagttcttctattataaaattaccatatcttgccattcacagcaggtcctgtgaatacgtttttactgagtgtctttaaatgaggtgttctagacagtgtgctgataatgtattgtgcgggtgacctcttcgctatgattgtatctcttactgttttgttaaagaaatgcagatgtgtaactgagaagtgatttgtgtgtgtgtcttggttgtgattggattctttggggggggggaactgaaacatttgtcatatactgaacttatatacatcaaaagggattaatacagcgatgccaaaaagtttaatcacggacacatgtccgtttctgtagtccgtatgctctttcattcttggtagagctggtatgtggaatgccatacctctgaccctactacttacctttttactgacagactgcccacactgaaagcttcagtgaatgttcttagtcctgttttcttctgttactgtcaggaaactgagtgatctaatggttctctcactttttttttgttcttttagtgtactttgaagtatcaaatcttaacttggtttaaacaatacatattcctaacctttgtaaaaaagcaaagattcttcaaaatgacattgaaataaaaagtaagccatacgtattttcttagaagtatagatgtatgtgcgtgtatacacacacacacacacacacagagataaacacaatattccttatttcaaattagtatgattcctatttaaagtgatttatatttgagtaaaaagttcaattcttttttgctttttaaaaaatctgatgcttcataattttcattatattattccacatatttttccttgaagttcttagcataatgtatccattacttagtatatatctaggcaacaacacttagaagtttatcagtgtttaaactaaaaaaataaagattcctgtgtactggtttacatttgtgtgagtggcatactcaagtctgctgtgcctgtcgtcgtgactgtcagtattctcgctattttatagtcgtgccatgttgttactcacagcgctctgacatactttcatgtggtaggttctttctcaggaactcagtttaactattatttattgatatatcattacctttgaaaagcttctactggcacaatttattattaaaattttgaatccaaatccc

SEQ ID NO: 147487 - DNA, 2261 bp, Homo sapiens
  Payload ID: 9173
  Gene Symbol: LAS1L
  Gene Name: LAS1-like, ribosome biogenesis factor
  Uniprot ID: Q9Y4W2
  ENST ID: ENST00000374804
  CDS Start-End: 42-2069
gtgcggagcggcgcggcacagagcctgttgttgagctcagtatgtcgtgggaatccggggccgggccaggtctaggttcccaggggatggatctcgtgtggagtgcgtggtacggaaagtgcgttaaagggaaagggtcgttgccactctcggcccacggcatcgtggtcgcctggctcagcagggccgagtgggaccaggtgacggtttatctgttctgtgacgaccataagttgcagcggtacgcgcttaaccgcatcacggtgtggaggagcaggtttgtgaatcttatctcagagaggaagacaaagtttgccaaggtccccctcaagtgtctggctcaagaggtaaatattccggattggattgttgaccttcgccatgagttgacccacaagaaaatgccccatataaatgactgccgcagaggctgctactttgtcctggattggctccagaagacctattggtgccgccaactggagaacagcctgagagagacctgggagttggaggagttcagggaagggatagaggaagaggatcaagaggaagataagaacattgttgttgatgacatcacagaacagaaaccagagcctcaggatgatgggaaaagtacggagtcagatgtaaaggccgatggagacagcaaaggcagcgaagaggtggattctcattgcaaaaaggccctgagtcataaagagctatatgaaagagcccgagaactgctggtatcatacgaagaggagcagtttacggtgctggagaaatttaggtatttacctaaggccattaaggcgtggaataacccgtccccacgtgtagaatgtgtcctggcagagctcaagggcgttacatgcgagaacagggaggctgtgctggatgcttttctggatgatggcttccttgtccccacatttgaacagttggcagctttgcagatagaatatgaagaaaacgtggacttgaatgacgtcctggtgccaaagccgttctctcagttctggcagcccctgctcaggggcctgcactcccagaacttcacgcaggccctattggagaggatgctctctgaactgccagccttggggatcagcgggatccggcctacctacatcctcagatggaccgttgaactgatcgtggccaacaccaagactggacggaatgctcgccgattttctgcaggccagtgggaagcaagaaggggctggaggctgttcaactgctccgcctcccttgactggccccggatggttgagtcctgcttgggctcaccttgctgggccagcccccaactccttcggatcatcttcaaagccatggggcagggcctgccagacgaggagcaggagaagctgctgcgcatctgttccatttatacccagagtggagaaaacagcctggtgcaggagggctctgaggcctcccccattgggaagtctccatatacactagacagcctgtattggagcgtcaagccagccagctccagcttcgggtctgaagcaaaggcccagcaacaggaggagcagggcagtgttaatgatgtcaaggaagaggagaaggaggagaaagaggtcttgccagaccaggtagaggaggaggaagaaaatgatgaccaagaggaggaagaggaggatgaagatgatgaagatgatgaagaggaagacagaatggaggtggggcctttctctacagggcaagagtcccccactgccgagaatgctaggcttctggcccagaaaagaggagctttgcagggctctgcatggcaggttagctcagaagacgtgcgatgggacacatttcccctaggccgaatgccaggtcagaccgaggacccagcagagctcatgctggagaattatgacaccatgtatcttttggaccagcctgtgctagagcagcggctggaaccctcaacatgcaagactgacaccttgggcctgagctgtggtgtcggcagtggcaactgcagcaacagcagcagcagcaacttcgagggccttctctggagccaggggcagctgcatgggctcaaaactggcctgcagctcttctgatggccatccctggtgcaagtgttcatccagccgtgccagggcaacagcccaccccctagtacaactgatgctccctgagacaacctgggagacagcctggatcagccacatcaactcagttgtccaccacaggggaattttgaatgtcttttgtttttgttttgttttgaaaaataataaacaggcaactgt

SEQ ID NO: 147488 - DNA, 2386 bp, Homo sapiens
  Payload ID: 9173
  Gene Symbol: LAS1L
  Gene Name: LAS1-like, ribosome biogenesis factor
  Uniprot ID: Q9Y4W2
  ENST ID: ENST00000374807
  CDS Start-End: 40-2193
gcggagcggcgcggcacagagcctgttgttgagctcagtatgtcgtgggaatccggggccgggccaggtctaggttcccaggggatggatctcgtgtggagtgcgtggtacggaaagtgcgttaaagggaaagggtcgttgccactctcggcccacggcatcgtggtcgcctggctcagcagggccgagtgggaccaggtgacggtttatctgttctgtgacgaccataagttgcagcggtacgcgcttaaccgcatcacggtgtggaggagcaggtcaggcaacgaactccctctggcagtggcttctactgctgacctgatacgctgtaagctcttggatgtaactggtggcttgggcactgatgaacttagactgctctatggcatggcattggtcaggtttgtgaatcttatctcagagaggaagacaaagtttgccaaggtccccctcaagtgtctggctcaagaggtaaatattccggattggattgttgaccttcgccatgagttgacccacaagaaaatgccccatataaatgactgccgcagaggctgctactttgtcctggattggctccagaagacctattggtgccgccaactggagaacagcctgagagagacctgggagttggaggagttcagggaagggatagaggaagaggatcaagaggaagataagaacattgttgttgatgacatcacagaacagaaaccagagcctcaggatgatgggaaaagtacggagtcagatgtaaaggccgatggagacagcaaaggcagcgaagaggtggattctcattgcaaaaaggccctgagtcataaagagctatatgaaagagcccgagaactgctggtatcatacgaagaggagcagtttacggtgctggagaaatttaggtatttacctaaggccattaaggcgtggaataacccgtccccacgtgtagaatgtgtcctggcagagctcaagggcgttacatgcgagaacagggaggctgtgctggatgcttttctggatgatggcttccttgtccccacatttgaacagttggcagctttgcagatagaatatgaagaaaacgtggacttgaatgacgtcctggtgccaaagccgttctctcagttctggcagcccctgctcaggggcctgcactcccagaacttcacgcaggccctattggagaggatgctctctgaactgccagccttggggatcagcgggatccggcctacctacatcctcagatggaccgttgaactgatcgtggccaacaccaagactggacggaatgctcgccgattttctgcaggccagtgggaagcaagaaggggctggaggctgttcaactgctccgcctcccttgactggccccggatggttgagtcctgcttgggctcaccttgctgggccagcccccaactccttcggatcatcttcaaagccatggggcagggcctgccagacgaggagcaggagaagctgctgcgcatctgttccatttatacccagagtggagaaaacagcctggtgcaggagggctctgaggcctcccccattgggaagtctccatatacactagacagcctgtattggagcgtcaagccagccagctccagcttcgggtctgaagcaaaggcccagcaacaggaggagcagggcagtgttaatgatgtcaaggaagaggagaaggaggagaaagaggtcttgccagaccaggtagaggaggaggaagaaaatgatgaccaagaggaggaagaggaggatgaagatgatgaagatgatgaagaggaagacagaatggaggtggggcctttctctacagggcaagagtcccccactgccgagaatgctaggcttctggcccagaaaagaggagctttgcagggctctgcatggcaggttagctcagaagacgtgcgatgggacacatttcccctaggccgaatgccaggtcagaccgaggacccagcagagctcatgctggagaattatgacaccatgtatcttttggaccagcctgtgctagagcagcggctggaaccctcaacatgcaagactgacaccttgggcctgagctgtggtgtcggcagtggcaactgcagcaacagcagcagcagcaacttcgagggccttctctggagccaggggcagctgcatgggctcaaaactggcctgcagctcttctgatggccatccctggtgcaagtgttcatccagccgtgccagggcaacagcccaccccctagtacaactgatgctccctgagacaacctgggagacagcctggatcagccacatcaactcagttgtccaccacaggggaattttgaatgtcttttgtttttgttttgttttgaaaaataataaacaggcaactgta

SEQ ID NO: 147489 - DNA, 2439 bp, Homo sapiens
  Payload ID: 9173
  Gene Symbol: LAS1L
  Gene Name: LAS1-like, ribosome biogenesis factor
  Uniprot ID: Q9Y4W2
  ENST ID: ENST00000374811
  CDS Start-End: 42-2246
gtgcggagcggcgcggcacagagcctgttgttgagctcagtatgtcgtgggaatccggggccgggccaggtctaggttcccaggggatggatctcgtgtggagtgcgtggtacggaaagtgcgttaaagggaaagggtcgttgccactctcggcccacggcatcgtggtcgcctggctcagcagggccgagtgggaccaggtgacggtttatctgttctgtgacgaccataagttgcagcggtacgcgcttaaccgcatcacggtgtggaggagcaggtcaggcaacgaactccctctggcagtggcttctactgctgacctgatacgctgtaagctcttggatgtaactggtggcttgggcactgatgaacttagactgctctatggcatggcattggtcaggtttgtgaatcttatctcagagaggaagacaaagtttgccaaggtccccctcaagtgtctggctcaagaggtaaatattccggattggattgttgaccttcgccatgagttgacccacaagaaaatgccccatataaatgactgccgcagaggctgctactttgtcctggattggctccagaagacctattggtgccgccaactggagaacagcctgagagagacctgggagttggaggagttcagggaagggatagaggaagaggatcaagaggaagataagaacattgttgttgatgacatcacagaacagaaaccagagcctcaggatgatgggaaaagtacggagtcagatgtaaaggccgatggagacagcaaaggcagcgaagaggtggattctcattgcaaaaaggccctgagtcataaagagctatatgaaagagcccgagaactgctggtatcatacgaagaggagcagtttacggtgctggagaaatttaggtatttacctaaggccattaaggcgtggaataacccgtccccacgtgtagaatgtgtcctggcagagctcaagggcgttacatgcgagaacagggaggctgtgctggatgcttttctggatgatggcttccttgtccccacatttgaacagttggcagctttgcagatagaatatgaagatggtcagactgaggtccagagaggggaaggtactgacccaaagtcacacaaaaacgtggacttgaatgacgtcctggtgccaaagccgttctctcagttctggcagcccctgctcaggggcctgcactcccagaacttcacgcaggccctattggagaggatgctctctgaactgccagccttggggatcagcgggatccggcctacctacatcctcagatggaccgttgaactgatcgtggccaacaccaagactggacggaatgctcgccgattttctgcaggccagtgggaagcaagaaggggctggaggctgttcaactgctccgcctcccttgactggccccggatggttgagtcctgcttgggctcaccttgctgggccagcccccaactccttcggatcatcttcaaagccatggggcagggcctgccagacgaggagcaggagaagctgctgcgcatctgttccatttatacccagagtggagaaaacagcctggtgcaggagggctctgaggcctcccccattgggaagtctccatatacactagacagcctgtattggagcgtcaagccagccagctccagcttcgggtctgaagcaaaggcccagcaacaggaggagcagggcagtgttaatgatgtcaaggaagaggagaaggaggagaaagaggtcttgccagaccaggtagaggaggaggaagaaaatgatgaccaagaggaggaagaggaggatgaagatgatgaagatgatgaagaggaagacagaatggaggtggggcctttctctacagggcaagagtcccccactgccgagaatgctaggcttctggcccagaaaagaggagctttgcagggctctgcatggcaggttagctcagaagacgtgcgatgggacacatttcccctaggccgaatgccaggtcagaccgaggacccagcagagctcatgctggagaattatgacaccatgtatcttttggaccagcctgtgctagagcagcggctggaaccctcaacatgcaagactgacaccttgggcctgagctgtggtgtcggcagtggcaactgcagcaacagcagcagcagcaacttcgagggccttctctggagccaggggcagctgcatgggctcaaaactggcctgcagctcttctgatggccatccctggtgcaagtgttcatccagccgtgccagggcaacagcccaccccctagtacaactgatgctccctgagacaacctgggagacagcctggatcagccacatcaactcagttgtccaccacaggggaattttgaatgtcttttgtttttgttttgttttgaaaaataataaacaggcaactgta

SEQ ID NO: 147490 - DNA, 5205 bp, Homo sapiens
  Payload ID: 9173
  Gene Symbol: LAS1L
  Gene Name: LAS1-like, ribosome biogenesis factor
  Uniprot ID: Q9Y4W2
  ENST ID: ENST00000484069
  CDS Start-End: 61-936
gcacgctgagctgaaggctgtgcggagcggcgcggcacagagcctgttgttgagctcagtatgtcgtgggaatccggggccgggccaggtctaggttcccaggggatggatctcgtgtggagtgcgtggtacggaaagtgcgttaaagggaaagggtcgttgccactctcggcccacggcatcgtggtcgcctggctcagcagggccgagtgggaccaggtgacggtttatctgttctgtgacgaccataagttgcagcggtacgcgcttaaccgcatcacggtgtggaggagcaggtcaggcaacgaactccctctggcagtggcttctactgctgacctgatacgctgtaagctcttggatgtaactggtggcttgggcactgatgaacttagactgctctatggcatggcattggtcaggtttgtgaatcttatctcagagaggaagacaaagtttgccaaggtccccctcaagtgtctggctcaagaggtaaatattccggattggattgttgaccttcgccatgagttgacccacaagaaaatgccccatataaatgactgccgcagaggctgctactttgtcctggattggctccagaagacctattggtgccgccaactggagaacagcctgagagagacctgggagttggaggagttcagggaagggatagaggaagaggatcaagaggaagataagaacattgttgttgatgacatcacagaacagaaaccagagcctcaggatgatgggaaaagtacggagtcagatgtaaaggccgatggagacagcaaaggcagcgaagaggtggattctcattgcaaaaaggccctgagtcataaagagctatatgaaagagcccgagaactgctggtatcatacgaagaggagcagtttacgggaggctgtgctggatgcttttctggatgatggcttccttgtccccacatttgaacagttggcagctttgcagatagaatatgaagatggtcagactgaggtccagagaggggaaggtactgacccaaagtcacacaaaaacgtggacttgaatgacgtcctggtgccaaagccgttctctcagttctggcagcccctgctcaggggcctgcactcccagaacttcacgcaggccctattggagaggatgctctctgaactgccagccttggggatcagcgggatccggcctacctacatcctcagatggaccgttgaactgatcgtggccaacaccaagactggacggaatgctcgccgattttctgcaggccagtgggaagcaagaaggggctggaggctgttcaactgctccgcctcccttgactggccccggatggttgagtcctgcttgggctcaccttgctgggccagcccccaactccttcggatgtaagtctcttgaattccatccggtaagagggtgaggcccttcaagcctcagggccacactgccctagaatgactgagttagaagggccctttggggacagtctagcccagtctcactcccactgacagatgggacaactgagtccagagaggggaggggtagggttttcttacctaagatcatacagcttaagacctgactgaactgagtccagtgtgggaatggataagacaatccccctagagtgcttagcacagtggcctgcacagagtaagtgcacaataaatggtagctgctgtttattattgaacccaggtcttctgactccaagcccagtgctgtttcctctattatctttccaaagtatacctctgatagttgcttagcaaccttcagttgctccctattgccttcctgttaagtctaggcttcttagcctgacattcaaagatctttctgattctggcccaacttaccatggtagccatacctcctgtgagtctcctttaccctatccaccctgggttctatggtcaaactgaatattgcactggtaaatacctgtggttgtctccctttccttttctctgtcatttcctgaccctgagccacttccctcataatcatggaagcctttagcgcctgattcccttcttgctttcttgagcaatatctgtttcatttggatgactcatctgacactctacagctcctcaactccagtgactttcattctccactacactcagcaacccatttccatcattcggagctattccacctctgaaagctcacatcccagcatcccactcggtgaccaccacttctcgtccttctagttctcacccttgcatcccatgacatctgctctttgcctgcatccagatctccatccctccatttcctgcatcccttgaccttgcttcctctctatcctgtctgtggttgctcagttcggccactcatcatcagcaccttcagctttgcccatcctttggccatatctgacttgcaaacccctgagctggaattgatcctccccattctgcttcccctgctcctcagcccgggtagctgagctctgctggagaaaaccacatagccctgcggattgctgccactgcagaggtatgatttttaatctcgggcgaggcctcagttctgcttgtctgaacttttacttgttttctgaccactttctctcccatttcctcactattctaaacccttaccgctcacctcaagcccctccccctctcccatttcaccctagcttcctcgagcacatggaggcatccggcagggccccctcgacctgaggtccagccctcgtgaactgatctgcggctgcactcaaccttctcgccagtctcaggatgaggtggccttgccccacctcaaagcctgctcctccacctgtgctctggagccacctctgccagcatcgctggggcctcaccccagcctctaccttgctctgctggctcttgctcttcaacctaggaacgtgcctgagcttttctcatcttaaacaaaacaacaataacagcaacacaagcaaaatctcctttgaccctgcatccctctgttgggttatcatcagcttatcattcccacccttcccatcaaaacatctcaaaagagtagtctacactcaacactctccatttcctcactaccctcttactcctcaacctgctgcaatttgacattcacccccagagttgctttgacctcctaattaccaaatcagtgggcccttgtcagtctctgtgtctgctgcattgatgctgtttaccaccccctcctcaaaaaatgcctgtgcttattactagttcctataaagtgctgaaacccaaatctgtctagccctggcccctcccccaagattcagcctcctgtactcgactacatgtcagacatctccccttggatggcccacaggcaccttactgtgaccaaaagagaattggtcgtctcagtccccatctcaactctaaagtgatcttcctcctctgttccctatctcacttggtggcggcaccatctaccctgtcctgttgactctcgaatacttcccaaatctgaggttttgtgttgccgtgtctacttcccttagtgtctccttccctctatcagactaagcttttcaagggcaaggactctacatcagctgtccgtgccctagcacaccacacaagtctaggcaccaaacaggcctcagtaaatgtcgttgaattgaaccgtgctctgctctctcattcccagcagtgctgtccttggtgggagctgacccagtgcctggggaatgaatgaagtgggagtctggatgccaagaccctcttagtccctgatccccctattgagtccaaaagtctttctttaaccctgatggcatttgggacacagaggtatttgtaaggttttaaaagtggctttgtagacaaagtcagtcaaggcaagacttccaggagttggaactgaacagccacattgccagatgtgtgctccagactagaagtgatgtggatgggtgggcaattgggaggagaaccaaaagggcctggatgagtcagagtttcaagaggaggcatttgaacaattcaagcaggagaaagaataaagcaagtttcaaagtccagaaggaacatggcatgtgtatataatgggagggagggagtgacaagagcagcatggagaggtttggataggtggccttcaaggtactttccaatcctaagtgcctgcagagtggaagctgctggtctcggagaagtctggaccacagagatcttctcccaacccaagcataccagagggatgcgacacatgccggcagtaacagcggctcacttggcatcttcaaagccatggggcagggcctgccagacgaggagcaggagaagctgctgcgcatctgttccatttatacccagagtggagaaaacagcctggtgcaggagggctctgaggcctcccccattgggaagtctccatatacactagacagcctgtattggagcgtcaagccagccagctccagcttcgggtctgaagcaaaggcccagcaacaggaggagcagggcagtgttaatgatgtcaaggaagaggagaaggaggagaaagaggtcttgccagaccaggtagaggaggaggaagaaaatgatgaccaagaggaggaagaggaggatgaagatgatgaagatgatgaagaggaagacagaatggaggtggggcctttctctacagggcaagagtcccccactgccgagaatgctaggcttctggcccagaaaagaggagctttgcagggctctgcatggcaggttagctcagaagacgtgcgatgggacacatttcccctaggccgaatgccaggtcagaccgaggacccagcagagctcatgctggagaattatgacaccatgtatcttttggaccagcctgtgctagagcagcggctggaaccctcaacatgcaagactgacaccttgggcctgagctgtggtgtcggcagtggcaactgcagcaacagcagcagcagcaacttcgagggccttctctggagccaggggcagctgcatgggctcaaaactggcctgcagctcttctgatggccatccctggtgcaagtgttcatccagccgtgccagggcaacagcccaccccctagtacaactgatgctccctgagacaacctgggagacagcctggatcagccacatcaactcagttgtccaccacaggggaattttgaatgtcttttgtttttgttttgttttgaaaaataataaacaggcaactgt

SEQ ID NO: 147491 - DNA, 447 bp, Homo sapiens
  Payload ID: 9173
  Gene Symbol: LAS1L
  Gene Name: LAS1-like, ribosome biogenesis factor
  ENST ID: ENST00000469091
  CDS Start-End: 1-221
ggatggttgagtcctgcttgggctcaccttgctgggccagcccccaactccttcggattgcctgcagagtggaagctgctggtctcggagaagtctggaccacagagatcttctcccaacccaagcataccagagggatgcgacacatgccggcagtaacagcggctcacttgggtacgatttcttgtgcacagatcctgcctttcccagataagcagtgaatctagtcctaatcaccccgttacacagagtggagaacagagggggtttgcccaggtattatgctgcaagtcagagctggggccagaatccagatagcctgtccttagtcccatgctcttctgtaatactccactagattgtattattgcagaaagcatctgttaaacacagaacttggcttttgttttccccagagaaaaaataaaagatactattggaaattaa

SEQ ID NO: 147492 - DNA, 422 bp, Homo sapiens
  Payload ID: 9174
  Gene Symbol: LCE1A
  Gene Name: late cornified envelope 1A
  Uniprot ID: Q5T7P2
  ENST ID: ENST00000335123
  CDS Start-End: 1-333
atgtcctgccagcagagccagcagcagtgccagccccctcccaagtgcacccccaagtgccctcccaagtgccccactcctaagtgccccccaaagtgtccccctaagtgccctccagtctcttcctgctgcagtgtcagctccggaggctgctgtggctccagctctgggggcggctgcagctctgggggaggtggctgctgcctgagccaccacaggcgccacaggtcccaccgtcacagactccagagctctggctgctgcagccagccctcgggaggctccagctgctgtggaggggacagcggccagcactctggaggctgctgctgaagcggactctgcacctagaagagcagactcgggtgaaatgagtgatcaaacatttcctcctcacctgtctcctcctgggcctgcaagag

SEQ ID NO: 147493 - DNA, 1139 bp, Homo sapiens
  Payload ID: 9175
  Gene Symbol: LCE1B
  Gene Name: late cornified envelope 1B
  Uniprot ID: Q5T7P3
  ENST ID: ENST00000360090
  CDS Start-End: 477-833
gttctgaacttctatgtccttacaacaaggtaatctagaaaattcttccaagagagaatgactgtttccccttgagaaacaattttatttccaaacccctttctagattgttttcatgattcaggtgtgtagttgaagcagaatgtctcctctacatactacatgcttgattttgagaatactttcttaatatcttttggcttcggttttctaattataaaatagttgaaaatgctttatgattttataagtatataaaaagcattaggttcaaaacagaggctataagtgtgtttagccaactattagacacaatgaaacttcccgtgattaattagctacaactacactaagcagttcatcaaaatgtagggattagaaatgatgctgaaagggcaagaataggccggggtggcctctacctgggtctaacttgctgtctgactctctctcagctcctgaacacccgcaccaagatgtcctgccagcagaaccagcagcagtgccagccccctcccaagtgcatccccaagtgccctcccaagtgcctcacccctagatgccccccaaagtgtccccctaagtgtcctccagtctcttcctgctgcagtgtcagctccggaggctgctgtggctccagctctgggggaagctgtggctccagctctgggggttgctgcagttctgggggaggtggctgctgcctgagccaccacaggcgccgtaggtcccactgccacagaccccagagctctggctgctgcagccagccctccgggggctccagctgctgtggaggagggagtggccagcactctggaggctgctgctaaagtggatcctgagcctagaagaacacaaatggccaaatatttcccttccgtcttccttctccttctgggcctgcccatgttgttgagaggtcttggtgagggctcaactcaagcatagaggattcttctgtcttggagttcagaggcccaaaacttctcccccaaagccaagccatttaatgacctcagtttgcgtatgtgtggttgctctgggaagcccaaagcacagacctatatccctttgcagcttgtctttttgcatagctcagcctgatgtgaaacaataaaaccagaaatatgcattcc

SEQ ID NO: 147494 - DNA, 644 bp, Homo sapiens
  Payload ID: 9176
  Gene Symbol: LCE1C
  Gene Name: late cornified envelope 1C
  Uniprot ID: Q5T751
  ENST ID: ENST00000607093
  CDS Start-End: 1-357
atgtcctgccagcagagccagcagcagtgccagccccctcccaagtgcacccccaagtgccctcccaagtgccccaccccaaagtgtcccccaaagtgtccccctaagtgccctcctgtctcttcctgctgcagtgtcagctccggaggctgctgtggctccagctctgggggcagctgtggctccagctctgggggatgctgcagttctgggggaggtggctgctgcctgagccaccacaggcgccgtaggtcccactgccacagaccccagagctctggctgctgcagccagccctcggggggctccagctgctgtggcggggggagtggccagcactctggaggctgctgctgaagtggaccctgagcctagaagagcagaatccaggaccgcaaactgccaaggacatcccccttctcctactaggcctgcctgagaggctcacaggtccaagggaaagctctgaacttgccaagagcatatcttttccctggagtccagaaactcagatcctctcctggatctccattcactggccttggacctcacctttgtggctaccctcccacgctctgtctaagcccctagcttactcaatgtcatttgcagcgtgcatctgctgattaaaggactaaaacaag

SEQ ID NO: 147495 - DNA, 211 bp, Homo sapiens
  Payload ID: 9176
  Gene Symbol: LCE1C
  Gene Name: late cornified envelope 1C
  ENST ID: ENST00000606576
  CDS Start-End: 49-211
gaaggaccctgtgctgcctgtgaccccgctcctgaatccgccaccaagatgtcctgccagcagagccagcagcagtgccagccccctcccaatgtcagctccggaggctgctgtggctccagctctgggggcagctgtggctccagctctgggggatgctgcagttctgggggaggtggctgctgcctgagccaccacaggcgccgtaggt

SEQ ID NO: 147496 - DNA, 430 bp, Homo sapiens
  Payload ID: 9177
  Gene Symbol: LCE1D
  Gene Name: late cornified envelope 1D
  Uniprot ID: Q5T752
  ENST ID: ENST00000326233
  CDS Start-End: 44-388
cctgtgctgcctgtgactccgctcctgaacacccaccaccgagatgtcctgccagcagagccagcagcagtgccagccccctcccaagtgcactcccaagtgcactcccaagtgccccgcccctaaatgtccccctaagtgccctccagtctcttcctgctgcagtgtcagctccggaggctgctgtggctccagctctgggggcggctgtggctccaactctgggggctgctgcagctctgggggtggtggctgctgcctgagccaccacaggcgccacaggtcccaccgtcgcagaccccagagctctgactgctgcagccagccctcggggggctccagctgctgcggtgggggcagcagccagcactctggaggctgctgctgaagtggaccttgacttcctcttccttctgattctgcctgaata

SEQ ID NO: 147497 - DNA, 1180 bp, Homo sapiens
  Payload ID: 9178
  Gene Symbol: LCE1E
  Gene Name: late cornified envelope 1E
  Uniprot ID: Q5T753
  ENST ID: ENST00000368770
  CDS Start-End: 54-410
gccgaaggaccctgtgctgcctgtgactttgctcctaagtacctactgccgagatgtcctgccagcagagccagcagcagtgccagccccctcccaagtgcactcccaagtgccctcccaagtgtcccacccccaaatgccctccaaagtgtccccctaagtgccctccagtctcttcctgctgcagtgtcagctccggaggctgctgtggctccagctctgggggcagctgtggctccagctctgggggctgctgcagctctgggggaggtggctgctgcctgagccaccacaggcaccacaggtcccaccgtcacagaccccagagctctgactgctgcagccagccctcagggggctccagctgctgtggagggggcagcggccagcactctggaggctgctgctgaagtggaccttgacttcctcttccttctgattctgcctgaatagctgagaggttccagcaaaagcttgaagtcttgcctggagaatccctctgctctggtgtcaggaaacccaaaatctttctccttaatggcatttagagactttcttctgcagatccatggctgccctgggaactccaaagcacacacctacttcctccccagctcacgctgctgtattctgtgctgcctgaactgaagaaataaaatccagaatctgccccccaacttgctaccagcctgcttgattttcctgtttgtgtcatccttgttctgctcccctgtgtctgctggtggctgctgaggccttggtggacagaggatggggaaaggggtcaggaggaaaaagcttgcatttctgtgtgttttgtgttttttcttctttcggtgttttccttttaaaccaagggactgaaatagcattgagaaatatttttctttcaaattctggttcctttcacctatgtaaccgcatccctcaggcatggccaggaggccgacttcatcctccttcccactatcacctcttcattcttgtgttcctcgttccccactccttccactaacaatctccctggactcctcctccatactgtatgtgcatgcattcacacacacatatgtacatgcacatagatgagatgaatctgcattgtaaaaaaattaaatcacatttagtgctgtataatttgcatgcaataaaattcaataaaattaaatgtaaaattaaa

SEQ ID NO: 147498 - DNA, 575 bp, Homo sapiens
  Payload ID: 9178
  Gene Symbol: LCE1E
  Gene Name: late cornified envelope 1E
  Uniprot ID: Q5T753
  ENST ID: ENST00000368771
  CDS Start-End: 173-529
gaaacccaggctgggataaaagggctcagggccagagcaccccattcactcacttcctgaggtgccgaaggaccctgtgctgcctgtgactttggtatgtgtcctctgggaacagaagcaggggattccacagagggatgctcagatcagctcctaagtacctactgccgagatgtcctgccagcagagccagcagcagtgccagccccctcccaagtgcactcccaagtgccctcccaagtgtcccacccccaaatgccctccaaagtgtccccctaagtgccctccagtctcttcctgctgcagtgtcagctccggaggctgctgtggctccagctctgggggcagctgtggctccagctctgggggctgctgcagctctgggggaggtggctgctgcctgagccaccacaggcaccacaggtcccaccgtcacagaccccagagctctgactgctgcagccagccctcagggggctccagctgctgtggagggggcagcggccagcactctggaggctgctgctgaagtggaccttgacttcctcttccttctgattctgcctgaatagctg

SEQ ID NO: 147499 - DNA, 267 bp, Homo sapiens
  Payload ID: 9178
  Gene Symbol: LCE1E
  Gene Name: late cornified envelope 1E
  ENST ID: ENST00000619588
  CDS Start-End: 1-267
atgtcctgccagcagagccagcagcagtgccagccccctcccaatgtcagctccggaggctgctgtggctccagctctgggggcagctgtggctccagctctgggggctgctgcagctctgggggaggtggctgctgcctgagccaccacaggcaccacaggtcccaccgtcacagaccccagagctctgactgctgcagccagccctcagggggctccagctgctgtggagggggcagcggccagcactctggaggctgctgctga

SEQ ID NO: 147500 - DNA, 357 bp, Homo sapiens
  Payload ID: 9179
  Gene Symbol: LCE1F
  Gene Name: late cornified envelope 1F
  Uniprot ID: Q5T754
  ENST ID: ENST00000334371
  CDS Start-End: 1-357
atgtcttgccagcagagccagcagcagtgccagccccctcccaagtgcactcccaagtgccctcccaagtgccccacaccgaagtgccccccaaagtgtccccctaagtgccctcctgtctcttcctgctgcagcgtcagctccggaggctgctgtggctccagctctgggggctgctgcagctctgggggtggtggctgctgcagctctgggggaggcggctgttgcctgagccaccacagacggcgtaggtcccaccgccacagaccccagagctctgactgctgcagccagccctcagcgggctccagctgctgcggagggggcagtggccagcactctggaggctgctgctga

SEQ ID NO: 147501 - DNA, 592 bp, Homo sapiens
  Payload ID: 9180
  Gene Symbol: LCE2A
  Gene Name: late cornified envelope 2A
  Uniprot ID: Q5TA79
  ENST ID: ENST00000368779
  CDS Start-End: 52-372
ggacgtgtctgtgctcctgtgtgtgaccagggttgaaaaagtcgcactgagatgtcctgccagcaaaaccagcagcagtgccagccccctcccaagtgccccccaaaatgcccacccaagtgtcctccaaagtgccgacctcagtgcccagccccatgcccacctccagtctcttcctgctgtggtcccagctctgggggctgctgcggctccagctctgggggctgctgcagctctgggggtggcggctgctgcctgagccaccacaggccccgtctcttccaccggcaccggcaccagagccccgattgttgtgagtgtgaaccttctgggggctctggctgctgccacagctctggggactgctgctgaccagacctcgaacatcacagagcaacccttatggagaaacttgcaaccaggacctgtcccagagtgatgcttctcctgcccctttttctcctttccttgggctgacacaccttgtgaggtgttttgtctgttgtcatggcccaagagcccatcctggatcctgatcttaccttcccactttacctcatacaacaataaagctcttttgcctcttcgtgaa

SEQ ID NO: 147502 - DNA, 612 bp, Homo sapiens
  Payload ID: 9181
  Gene Symbol: LCE2B
  Gene Name: late cornified envelope 2B
  Uniprot ID: O14633
  ENST ID: ENST00000368780
  CDS Start-End: 55-387
cagggacgtgtctgtgctcctgcgtgtgaccagggttgactaaactctgccaggatgtcttgccagcaaaaccagcagcagtgccagccccctcccaagtgtcctcccaagtgtaccccaaaatgtccacctaagtgtccccctaaatgcctgccccagtgcccagctccatgttcccctgcagtctcttcttgctgtggtcccatctctgggggctgctgtggtcccagctctgggggctgctgcaactctggggctggtggctgctgcctgagccaccacaggccccgtctcttccaccggcgccggcaccagagccccgactgctgtgagagtgaaccttctgggggctctggctgctgccacagctctgggggctgctgctgacctgggctaagaagaactctttggacagaatgtttaagaacctcctacagcctgatgcttaaccctttccatttcctctcattccattcatgggtggacagcgaccacaaagactcatggggcttccctgggagaactttgcacttgatggagcacctcaattgcaggttttgttttcctcctttacctcatgttataataaagctctgatttctgactcacaaa

SEQ ID NO: 147503 - DNA, 614 bp, Homo sapiens
  Payload ID: 9182
  Gene Symbol: LCE2C
  Gene Name: late cornified envelope 2C
  Uniprot ID: Q5TA81
  ENST ID: ENST00000368783
  CDS Start-End: 56-388
cagggacgtgtctgtgctcctgcgtgtgaccagggttgactaaactcctgccagcatgtcttgccagcaaaaccagcagcagtgccagccccctcccaagtgtcctcccaagtgtaccccaaaatgtccacctaagtgtccccccaaatgcccaccacagtgcccagctccatgtttccctgcagtctcttcttgctgtggtcccagctctgggagctgctgtggtcccagctctgggggctgctgcagctctggggctggtggctgctccctgagccaccacaggccccgtctcttccaccggcgccggcaccagagccccgactgctgtgagagtgaaccttctgggggctctggctgctgccacagctctgggggctgctgctgacctgggctacagaagagctcttgggactgaatggccaagaacctgctacggcctgatggatactctttccacttcctctcattccattcattggttggcagagaccacaaagactcatggggctttcctggaagaacttcgtgcttgatgtaacaccccaattgcaagtcttcttttcctcctttacctcatgttataataaagctctgatctctgactcactaaa

SEQ ID NO: 147504 - DNA, 609 bp, Homo sapiens
  Payload ID: 9183
  Gene Symbol: LCE2D
  Gene Name: late cornified envelope 2D
  Uniprot ID: Q5TA82
  ENST ID: ENST00000368784
  CDS Start-End: 56-388
cagggacgtgtctgtgcttttgcatgtgaccagggttgactaaactcctgccaggatgtcttgccagcaaaaccagcagcagtgccagccccctcccaaatgtcctcccaagtgtaccccaaaatgtccacctaagtgtccccccaaatgcccaccacagtgcccagctccatgttcccctgcagtctcttcctgctgtggtcccagctctgggagctgctgtggtcccagctctgggggctgctgcagctctgggggtggtggctgctgcctgagccaccacaggccccgtctcttccaccggcgccggcaccagagccccgattgctgtgagagtgaaccttctggggcctctggctgctgccacagctctgggggctgctgctgacctgggctgcagaagagctctggtactgaatggtcaaaaacctgctacagcctgatgcttaactatttccccttcctttcattccactcatgggtggacagggaccacaaagactcatggggcttccccagaactttgtgcttgatggagcaccccagatggaagccttctttttctcctttacctcatattgtaataaagctctgatttctgactcttta

SEQ ID NO: 147505 - DNA, 270 bp, Homo sapiens
  Payload ID: 9184
  Gene Symbol: LCE3A
  Gene Name: late cornified envelope 3A
  Uniprot ID: Q5TA76
  ENST ID: ENST00000335674
  CDS Start-End: 1-270
atgtcctgccagcagaaccagcagcagtgccagcctccgcccaagtgccctgcaaagagcccagcacagtgtctgcctccagcttcctccagctgtgccccaagctctgggggctgtgggcccagctccgagcgcagctgctgcctgagtcaccacagatgccgcaggtctcaccgttgccgttgccagagctccaactcctgtgacaggggaagtggtcagcaaggcgggagctccagctgtggccacagttctgcgggctgctgctga

SEQ ID NO: 147506 - DNA, 288 bp, Homo sapiens
  Payload ID: 9185
  Gene Symbol: LCE3B
  Gene Name: late cornified envelope 3B
  Uniprot ID: Q5TA77
  ENST ID: ENST00000335633
  CDS Start-End: 1-288
atgtcctgccagcagaaccagcagcagtgccagcctctgcccaagtgcccctcacccaagtgccccccaaagagctcagcacagtgtctgcctccagcctcctcctgctgtgctccaagacctgggtgctgtggtggccccagctctgagggcggctgctgcctgagccaccacaggtgctgcaggtcccaccgatgccggcgccagagctccaactcctgtgacagaggcagtggtcagcaagatggtgcctccgactgtggctatggctctggaggctgctgctga

SEQ ID NO: 147507 - DNA, 425 bp, Homo sapiens
  Payload ID: 9186
  Gene Symbol: LCE3C
  Gene Name: late cornified envelope 3C
  Uniprot ID: Q5T5A8
  ENST ID: ENST00000333881
  CDS Start-End: 71-355
ggtctgagggttctgtgctcaaatgtttctattattctgttcaaggtaaaattcctgcattcctgcaaagatgtcctgccagcaaaaccagcagcagtgccagccccctcccagttgtccctcacccaagtgtcccccaaagagcccagcacagtgtctgcctccaccctcttctgactgtgctctaagctccgggggctgtggccccagttctgaaagtggctgctgcctgagccaccacaggcacttcaggtcccatcaatgccggcgccagagatccaactcctgtgacaggggcagtggtcagcaaggcgggggctcctgccgtggccatggctctgggggctgctgctgacctggatcctgatgatgagacaagtgatctttggaggaaacaaggatcccaaaggcccaggaaaagctcc

SEQ ID NO: 147508 - DNA, 270 bp, Homo sapiens
  Payload ID: 9186
  Gene Symbol: LCE3C
  Gene Name: late cornified envelope 3C
  ENST ID: ENST00000617545
  CDS Start-End: 1-270
atgtcctgccagcagagccagcagcagtgccagcctcctcccaagtgtcccccaaagagcccagcacagtgtctgcctccaccctcttctgactgtgctctaagctccgggggctgtggccccagttctgaaagtggctgctgcctgagccaccacaggcacttcaggtcccatcaatgccggcgccagagatccaactcctgtgacaggggcagtggtcagcaaggcgggggctcctgccgtggccatggctctgggggctgctgctga

SEQ ID NO: 147509 - DNA, 613 bp, Homo sapiens
  Payload ID: 9187
  Gene Symbol: LCE3D
  Gene Name: late cornified envelope 3D
  Uniprot ID: Q9BYE3
  ENST ID: ENST00000368787
  CDS Start-End: 58-336
ctcaggaacagccttctcctgcctcctctgcacctggacaactcaactcctgccaagatgtcctgccagcagaaccagcagcagtgccaacccccacccaagtgtccctcacccaagtgtcccccaaagagcccagtacagtgtctgcctccagcttcctctggctgtgccccaagctctgggggctgtggccctagctccgagggcggctgcttcctgaaccaccacaggcgccaccaccgatgccggcgccagaggcccaactcctgtgacaggggcagtggtcagcaaggcgggggctctggctgcggccatggctctggaggctgctgctgacctggatcctgatgctgagacaagcgattttggaggaaacaagaatcccaagggcccaggaaaaccccatcttgatgcatgagttcccagataccctcttctggctttcacaggctgagctaggggttttcctgtggaaggtctgagctctccccagaaggcacttcctgtctgatgtccaggatgtcacatgttcccttacccctgtacctgtgaaggattggcagtgcttgtgcctgacctcatcaaaaaataaagctccttgtcctcattacca

SEQ ID NO: 147510 - DNA, 611 bp, Homo sapiens
  Payload ID: 9188
  Gene Symbol: LCE3E
  Gene Name: late cornified envelope 3E
  Uniprot ID: Q5T5B0
  ENST ID: ENST00000368789
  CDS Start-End: 57-335
ctcaggaacagccttctcctgcctctctgcacctggacatctcaactcctgccaagatgtcctgccagcagaaccagaagcagtgccaacccccacccaagtgcccctcacccaagtgtcccccaaagaacccagtacagtgtctgcctccagcttcctctggctgtgccccaagctctgggggctgtggccctagctccgagggcggctgcttcctgaaccaccacaggcgccaccaccgatgccggcgccagaggtccaactcctgtgacaggggcagtggtcagcaaggcgggggctctggctgctgccacggttctgggggctgctgctgatccagatcctgatgctgagacaagcgatctttggaggaaacaagaatcccaagaggccaagaacagccccatctgacgcatgccttcccatataccctcttctgactttcacaggctgagctggaggttttcctgtgggggatctgagctctccccagaaggcacttcttgttttatgtacaggatgtcatatgtccccctacccctgtacctgccaaggattggcagtgcttgtgcccaacctcgtaaaaaagataaagttccttgtcctcatta

SEQ ID NO: 147511 - DNA, 388 bp, Homo sapiens
  Payload ID: 9189
  Gene Symbol: LCE4A
  Gene Name: late cornified envelope 4A
  Uniprot ID: Q5TA78
  ENST ID: ENST00000335535
  CDS Start-End: 30-329
tcattcaggtttatcgaaatcccaccaagatgtcctgccagcagaaccaacagcagtgccagccccctcccaagtgtcctatccccaagtatcccccaaaatgtccctcaaagtgtgcatcctcatgcccacctccaatctcttcctgctgtggctccagctctgggggctgtggttgctgcagctctgagggaggtggctgctgcctgagccaccacagacaccataggtcccactgccacagacccaagagctccaattgctatggcagtggcagtggccagcagtctgggggttctggctgctgctctggagggggctgttgctgacctggaccaggagcagcaccaaaggaattagtgggcgaaggacccattgcagcctggtg

SEQ ID NO: 147512 - DNA, 672 bp, Homo sapiens
  Payload ID: 9189
  Gene Symbol: LCE4A
  Gene Name: late cornified envelope 4A
  Uniprot ID: Q5TA78
  ENST ID: ENST00000368777
  CDS Start-End: 257-556
tgccgaagaggctatctgggaagctcatcatccagctcaggaagagatgaaaccaggaggcaggagaatgtcaggcatgaccccacacttgtgcaacagccacgtcctgctcctgccattagcatggctcatccgaggcccagccccaggatccatacaaagtgtgttcctgctgctggcttctcatctgctctgcttcctaagggacgtatctgttgctgcgtctgaacccacggtttatcgaaatcccaccaagatgtcctgccagcagaaccaacagcagtgccagccccctcccaagtgtcctatccccaagtatcccccaaaatgtccctcaaagtgtgcatcctcatgcccacctccaatctcttcctgctgtggctccagctctgggggctgtggttgctgcagctctgagggaggtggctgctgcctgagccaccacagacaccataggtcccactgccacagacccaagagctccaattgctatggcagtggcagtggccagcagtctgggggttctggctgctgctctggagggggctgttgctgacctggaccaggagcagcaccaaaggaattagtgggcgaaggacccattgcagcctggtgttttacctccttcactctcttgcctttcctttctgtagccccatcaattgaataaac

SEQ ID NO: 147513 - DNA, 819 bp, Homo sapiens
  Payload ID: 9190
  Gene Symbol: LCE5A
  Gene Name: late cornified envelope 5A
  Uniprot ID: Q5TCM9
  ENST ID: ENST00000334269
  CDS Start-End: 177-533
caggtagagtgcttctcaggaccaggatgaactcttggtgctggtgttttgggcagaaagagcccctgggtggaggttgaggccattcttgaagaaagacaaggataaagaaggattttggaggggaaggttcttctggaaggggagggtggaagctttattcagcttctacagagatgtcctgccagcagagccagcagcagtgccagcctcctcccaaatgtacccctaaatgccctcccaagtgtactcctaagtgtcctcccaagtgtcccccaaaatgccctccccagtgttcagccccatgcccacctccagtctcttcctgctgtggttccagctctgggggctgctgcagctctgagggtggtggctgctgcctgagccaccacaggccccgccagtccctccgacgccgacctcagagttccagctgctgtggcagtggcagtggccagcagtctgggggctccagctgctgccacagctctgggggctctggctgctgccacagctctggaggctgctgctgacctgggccatgaggagcacggaggagaaggactggcagatcccaggtgctgaagatgtgtgtcagcctgaggcttcttttctctcatttcccatggaaggacttcggaaatgccttaagttcccctctttatcctgcccatgttcactccattgtagggttgaagtctagcttgtgatattttctggcctggctttccctctcagacatagctctttggagaactaggtgttgtaattcagttatgaagctattttctctgtaacaataaagctttttattcctga

SEQ ID NO: 147514 - DNA, 628 bp, Homo sapiens
  Payload ID: 9191
  Gene Symbol: LCE6A
  Gene Name: late cornified envelope 6A
  Uniprot ID: A0A183
  ENST ID: ENST00000431011
  CDS Start-End: 166-408
gactcctcctgggataacttgtccacacatcttccactagggtaaggctacttctggctgaggagacacttggatgtagctcaagtgctgcttaggcagtcctgatctctcctctcgtctcttcccagggagctgaaaagccagattcgacctggtagccaagcaatgtcacagcagaagcagcaatcttggaagcctccaaatgttcccaaatgctcccctccccaaagatcaaacccctgcctagctccctactcgactccttgtggtgctccccattcagaaggttgtcattccagttcccaaaggcctgaggttcagaagcctaggagggctcgtcaaaagctgcgctgcctaagtaggggcacaacctaccactgcaaagaggaagagtgtgaaggcgactgagcccagaagagttgaggcacaggtgcagttactctctccctgccccacctttgggtactaattcccccttggaaagccaggccctcaacctctcatttggactgagaaacacttcctgatccccagctctagagaagcgagaactaggctgagccacgctgctactgctctcttccattcaccccttcagctcagcaacaataaagctgctttacttgga

SEQ ID NO: 147515 - DNA, 523 bp, Homo sapiens
  Payload ID: 9192
  Gene Symbol: LELP1
  Gene Name: late cornified envelope-like proline-rich 1
  Uniprot ID: Q5T871
  ENST ID: ENST00000368747
  CDS Start-End: 111-407
ggaaccaaagggaaaagccaccttcccaggcacagccataacatccacctcactcaactgcttgtcaagttcaccaccaacacagagggggctcagataatcaagaaacaatgtcgagtgatgataaaagtaaatcaaatgaccccaagactgagcccaagaactgcgatcccaagtgtgaacaaaagtgtgagtccaaatgccagcccagctgtttaaagaagctgctgcaacgctgtttcgaaaagtgcccatgggaaaagtgtccagcaccacccaagtgcctgccctgcccctcgcagtctccttcatcctgccctccccagccctgcaccaagccctgtcctcctaaatgcccttcatcctgcccacatgcttgcccacctccctgccctcccccagagtgaggcactgtgggcactacccaaccccaccaccactgccacctccaccatgtacaacgctgtggggctggagactgaaaccatgaactgacaagtaaacgtgttcctctgctgtgcaa

SEQ ID NO: 147516 - DNA, 1179 bp, Homo sapiens
  Payload ID: 9193
  Gene Symbol: LAMTOR1
  Gene Name: late endosomal/lysosomal adaptor, MAPK and MTOR activator 1
  Uniprot ID: Q6IAA8
  ENST ID: ENST00000278671
  CDS Start-End: 164-649
ggggtattgactgaggcggccaagcggctccgggacagggggtacggggggtgggggcgggtggttgcctgcgggaggccgccgcgggtcatgtgaccggaagggctcctcacggacgccgtccctcctcggcgcggcctgagcgcccggcccgaccccggccatggggtgctgctacagcagcgagaacgaggactcggaccaggaccgagaggagcggaagctgctgctggaccctagcagcccccctaccaaagctctcaatggagccgagcccaactaccacagcctgccttccgctcgcactgatgagcaggccctgctctcttccatccttgccaagacagccagcaacatcattgatgtgtctgctgcagactcacagggcatggagcagcatgagtacatggaccgtgccaggcagtacagcacccgcttggctgtgctgagcagcagcctgacccattggaagaagctgccaccgctgccgtctcttaccagccagccccaccaagtgctggccagtgagcccatcccgttctctgatttgcagcaggtctccaggatagctgcttatgcctacagtgcactttctcagatccgtgtggacgcaaaagaggagctggttgtacagtttgggatcccatgaagagaggggtccttggacagctcttctcctctcttcatcccatctctaccccacccccttggcccccagcctcactgcggcttatacagtaccctaacctgctactaatcacagagaaaaatgtgaagaaggaggagaagaggaaggctagaagcctgagcaagtgagggtagaaccttttgggactggcctttgaagctctggccagggatggggtgggggccaaaaggacagagcctggtatgtcttcatagtcattgagaatgtggagataccagtttgggtggggggtgatcaccaggggacctagggagatccccttcccaccctctctgttggcctcagagtcactcctgccccctctccctgacttggtgctcacatgcacctcactagggtttgtgaccagggtctggatgagcttgaatttgaatgaattgagtttgtatttctagaaccctgggtttttacatgtttggtctttttttgttttggtttgtcaccctcgataaaggaagtatattcatcca

SEQ ID NO: 147517 - DNA, 849 bp, Homo sapiens
  Payload ID: 9193
  Gene Symbol: LAMTOR1
  Gene Name: late endosomal/lysosomal adaptor, MAPK and MTOR activator 1
  ENST ID: ENST00000544594
  CDS Start-End: 1-239
aggaccgagaggagcggaagctgctgctggaccctagcagcccccctaccaaagctctcaatggagccgagcccaactaccacagcctgccttccgctcgcactgatgagcaggccctgctctcttccatccttgccaagacagccagcaacatcattgatgtgtctgctgcagactcacagggcatggagcagcatgagtacatggaccgtgccaggcagtacaggtctccaggatagctgcttatgcctacagtgcactttctcagatccgtgtggacgcaaaagaggagctggttgtacagtttgggatcccatgaagagaggggtccttggacagctcttctcctctcttcatcccatctctaccccacccccttggcccccagcctcactgcggcttatacagtaccctaacctgctactaatcacagagaaaaatgtgaagaaggaggagaagaggaaggctagaagcctgagcaagtgagggtagaaccttttgggactggcctttgaagctctggccagggatggggtgggggccaaaaggacagagcctggtatgtcttcatagtcattgagaatgtggagataccagtttgggtggggggtgatcaccaggggacctagggagatccccttcccaccctctctgttggcctcagagtcactcctgccccctctccctgacttggtgctcacatgcacctcactagggtttgtgaccagggtctggatgagcttgaatttgaatgaattgagtttgtatttctagaaccctgggtttttacatgtttggtctttttttgttttggtttgtcaccctcgataaaggaagtatattcatcca

SEQ ID NO: 147518 - DNA, 1346 bp, Homo sapiens
  Payload ID: 9193
  Gene Symbol: LAMTOR1
  Gene Name: late endosomal/lysosomal adaptor, MAPK and MTOR activator 1
  ENST ID: ENST00000538404
  CDS Start-End: 13-495
ccgaccccggccatggggtgctgctacagcagcgagaacgaggactcggaccaggaccgagaggagcggaagctgctgctggaccctagcagcccccctaccaaagctctcaatggagccgagcccaactaccacagcctgccttccgctcgcactgatgagcaggccctgctctcttccatccttgccaagacagccagcaacatcattgatgtgtctgctgcagactcacagggcatggagcagcatgagtacatggaccgtgccaggcagtacagcacccgcttggctgtgctgagcagcagcctgacccattggaagaagctgccaccgctgccgtctcttaccagccagccccaccaagtgctggccagtgagcccatcccgttctctgatttgcagcaggtgagacacccctcacctgcccctgcccacccttctcacactgcccagggtatggcagagggttcacccactctgcctcagaggaggtagggaaggtggagttagggagcctggtagccttgtaggccccagctccctcccacctcgttctcttaactttttatgtctttcctatctccttcctgcaacctttattgtttcactcccctttgttcttttccttctgtctctcccatccctgtctttctctttgccttcctgttccccttcattccctccttctccatcaccatctaatctcccctccccatttttcctgattgccctcctcacctgtctctgttcctctcctccccggcccctctctgtctcaggtctccaggatagctgcttatgcctacagtgcactttctcagatccgtgtggacgcaaaagaggagctggttgtacagtttgggatcccatgaagagaggggtccttggacagctcttctcctctcttcatcccatctctaccccacccccttggcccccagcctcactgcggcttatacagtaccctaacctgctactaatcacagagaaaaatgtgaagaaggaggagaagaggaaggctagaagcctgagcaagtgagggtagaaccttttgggactggcctttgaagctctggccagggatggggtgggggccaaaaggacagagcctggtatgtcttcatagtcattgagaatgtggagataccagtttgggtggggggtgatcaccaggggacctagggagatccccttcccaccctctctgttggcctcagagtcactcctgccccctctccctgacttggtgctcacatgcacctcactagggtttgtgaccagggtctggatgagcttgaatttgaatgaattgagtttgtatttctagaaccctgggtttttacatg

SEQ ID NO: 147519 - DNA, 899 bp, Homo sapiens
  Payload ID: 9193
  Gene Symbol: LAMTOR1
  Gene Name: late endosomal/lysosomal adaptor, MAPK and MTOR activator 1
  ENST ID: ENST00000535872
  CDS Start-End: 74-304
atgtgaccggaagggctcctcacggacgccgtccctcctcggcgcggcctgagcgcccggcccgaccccggccatgggctgctgctggaccctagcagcccccctaccaaagctctcaatggagccgagcccaactaccacagcctgccttccgctcgcactgatgagcaggccctgctctcttccatccttgccaagacagccagcaacatcattgatgtgtctgctgcagactcacagggcatggagcagcatgagtacatggaccgtgccaggcagtacagcacccgcttggctgtgctgagcagcagcctgacccattggaagaagctgccaccgctgccgtctcttaccagccagccccaccaagtgctggccagtgagcccatcccgttctctgatttgcagcaggtctccaggatagctgcttatgcctacagtgcactttctcagatccgtgtggacgcaaaagaggagctggttgtacagtttgggatcccatgaagagaggggtccttggacagctcttctcctctcttcatcccatctctaccccacccccttggcccccagcctcactgcggcttatacagtaccctaacctgctactaatcacagagaaaaatgtgaagaaggaggagaagaggaaggctagaagcctgagcaagtgagggtagaaccttttgggactggcctttgaagctctggccagggatggggtgggggccaaaaggacagagcctggtatgtcttcatagtcattgagaatgtggagataccagtttgggtggggggtgatcaccaggggacctagggagatccccttcccaccctctctgttggcctcagagtcactcctgccccctctccctgacttggtgctcacatgcacctcacta

SEQ ID NO: 147520 - DNA, 965 bp, Homo sapiens
  Payload ID: 9193
  Gene Symbol: LAMTOR1
  Gene Name: late endosomal/lysosomal adaptor, MAPK and MTOR activator 1
  ENST ID: ENST00000545249
  CDS Start-End: 23-451
agcgcccggcccgaccccggccatggggtgctgctacagcagcgagaacgaggactcggaccaggaccgagaggagcggaagctgctgctggaccctagcagcccccctaccaaagctctcaatggagccgagcccaactaccacagcctgccttccgctcgcactgatgagcaggccctgctctcttccatccttgccaagacagccagcaacatcattgatgtgtctgctgcagactcacagggcatggagcagcatgagtacatggaccgtgccaggcagtacagcacccgcttggctgtgctgagcagcagcctgacccattggaagaagctgccaccgctgccgtctcttaccagccagccccaccaagtgctggccagtgagcccatcccgttctctgatttgcagcaggttcagctgtttcagtccacaccttgttcacagtaagatattcaattcaattcagcaaacatttgttgagtgcttgctgctctgtgcctgaccagaagaaatgaagccaagatacaaataatagaaccctgtcatgagcacagaaagacctgctgagtttctattgattgtggtaaaccagcctgcatccagttccaagtaacagctgcccacttagtgaatactctctcatgtttcaacactcagttctagtgtagcctcttctataaagcctttcttttccagataaaattggttaatgtgtcctgtgttaggctgattgttttgatgatccctattcatggtctcccctgtatccatctctttttgcctataacattgtagtcccatctcactctgatgctgggaccagacatgtgacttgttttagccaatgagatgtcgataaacatgaagcaaacagaagctttaaaggaggcctgccctcttgctctttgccagtgccatgagaacatggctgatcagctggagggttatgagatgtgtaggt

SEQ ID NO: 147521 - DNA, 619 bp, Homo sapiens
  Payload ID: 9193
  Gene Symbol: LAMTOR1
  Gene Name: late endosomal/lysosomal adaptor, MAPK and MTOR activator 1
  ENST ID: ENST00000535107
  CDS Start-End: 14-313
cccgaccccggccatggggtgctgctacagcagcgagaacgaggactcggaccaggaccgagaggagcggaagctgctgctggaccctagcagcccccctaccaaagctctcaatggagccgagcccaactaccacagcctgccttccgctcgcactgatgagcaggccctgctctcttccatccttgccaagacagccagcaacatcattgatgtgtctgctgcagactcacagggcatggagcagcatgagtacatggaccgtgccaggcagtacagacatacagggcatcacactgaaaaggagctgtgatctgagggtcaggagtgtgggcctgggtaccagcactgccactgacttgcctctctcagccttagttgccccttcactgaagacctttccagctttggtgatctacgattctatcacagcaagcaacaggaagacagagcatcatgctaggcacataagaagcttttaaaatactggttaaattgagatcaccacaccaggggaatagtgtccaagtcatgctccagctcctttcccctcttagggatcttggactagaaaaggccaaactttatttcttaaaacttgaatctgagttcacagaaa

SEQ ID NO: 147522 - DNA, 587 bp, Homo sapiens
  Payload ID: 9194
  Gene Symbol: LAMTOR2
  Gene Name: late endosomal/lysosomal adaptor, MAPK and MTOR activator 2
  Uniprot ID: Q9Y2Q5
  ENST ID: ENST00000368302
  CDS Start-End: 41-493
gagatctgggtgcaaaagcccagggttaggaaccgtaggcatgctgcgccccaaggctttgacccaggtgctaagccaagccaacactggaggcgtccagagcaccctgctgctgaataacgagggatcactgctggcctactctggttacggggacactgacgcccgggtcaccgctgccatagccagtaacatctgggccgcctacgaccggaacgggaaccaagcgtttaatgaagacaatctcaaattcatcctcatggactgcatggagggccgtgtagccatcacccgagtggccaaccttctgctgtgtatgtatgccaaggagaccgtgggctttggaatgctcaaggccaaggctgtgtgcgggactgatctctgttctccctctgcaggcccaggctttggtgcagtacctggaggagcccctcacccaagtggcggcatcttaacggcattggtggaagctggggtcagaaaagagaaatgaccatttggaggggcggggcctcctagaagaaccttcttagacaatggggggaggatgggactttgttttttccaagaataaacttcaactcctg

SEQ ID NO: 147523 - DNA, 521 bp, Homo sapiens
  Payload ID: 9194
  Gene Symbol: LAMTOR2
  Gene Name: late endosomal/lysosomal adaptor, MAPK and MTOR activator 2
  Uniprot ID: Q9Y2Q5
  ENST ID: ENST00000368304
  CDS Start-End: 99-386
ggagcaggccaacgggactacgggaagcagcgggcagcggcccgcgggaggcacctcggagatctgggtgcaaaagcccagggttaggaaccgtaggcatgctgcgccccaaggctttgacccaggtgctaagccaagccaacactggaggcgtccagagcaccctgctgctgaataacgagggatcactgctggcctactctggttacggggacactgacgcccgggtcaccgctgccatagccagtaacatctgggccgcctacgaccggaacgggaaccaagcgtttaatgaagacaatctcaaattcatcctcatggactgcatggcccaggctttggtgcagtacctggaggagcccctcacccaagtggcggcatcttaacggcattggtggaagctggggtcagaaaagagaaatgaccatttggaggggcggggcctcctagaagaaccttcttagacaatggggggaggatgggactttgttttttccaagaataaacttcaactcctgtca

SEQ ID NO: 147524 - DNA, 655 bp, Homo sapiens
  Payload ID: 9194
  Gene Symbol: LAMTOR2
  Gene Name: late endosomal/lysosomal adaptor, MAPK and MTOR activator 2
  Uniprot ID: Q9Y2Q5
  ENST ID: ENST00000368305
  CDS Start-End: 139-516
caatagccaggcgaagaaactacaactcccagggcgtcccggagcaggccaacgggactacgggaagcagcgggcagcggcccgcgggaggcacctcggagatctgggtgcaaaagcccagggttaggaaccgtaggcatgctgcgccccaaggctttgacccaggtgctaagccaagccaacactggaggcgtccagagcaccctgctgctgaataacgagggatcactgctggcctactctggttacggggacactgacgcccgggtcaccgctgccatagccagtaacatctgggccgcctacgaccggaacgggaaccaagcgtttaatgaagacaatctcaaattcatcctcatggactgcatggagggccgtgtagccatcacccgagtggccaaccttctgctgtgtatgtatgccaaggagaccgtgggctttggaatgctcaaggccaaggcccaggctttggtgcagtacctggaggagcccctcacccaagtggcggcatcttaacggcattggtggaagctggggtcagaaaagagaaatgaccatttggaggggcggggcctcctagaagaaccttcttagacaatggggggaggatgggactttgttttttccaagaataaacttcaactcctgtcatgtg

SEQ ID NO: 147525 - DNA, 1220 bp, Homo sapiens
  Payload ID: 9195
  Gene Symbol: LAMTOR3
  Gene Name: late endosomal/lysosomal adaptor, MAPK and MTOR activator 3
  Uniprot ID: Q9UHA4
  ENST ID: ENST00000226522
  CDS Start-End: 80-433
tgaagtgacagcggagagaaccaggcagcccagaaaccccaggcgtggagattgatcctgcgagagaagggggttcatcatggcggatgacctaaagcgattcttgtataaaaagttaccaagtgttgaagggctccatgccattgttgtgtcagatagagatggagtacctgttattaaagagcatgctttgcgacctggtttcttatccacttttgcccttgcaacagaccaaggaagcaaacttggactttccaaaaataaaagtatcatctgttactataacacctaccaggtggttcaatttaatcgtttacctttggtggtgagtttcatagccagcagcagtgccaatacaggactaattgtcagcctagaaaaggaacttgctccattgtttgaagaactgagacaagttgtggaagtttcttaatctgacagtggtttcagtgtgtaccttatcttcattataacaacacaatatcaatccagcaatctttagactacaataatacttttatccatgtgctcaagaaagggcccctttttccaacttatactaaagagctagcatatagatgtaatttatagatagatcagttgctatattttctggtgtagggtctttcttatttagtgagatctagggataccacagaaatggttcagtctatcacagctcccatggagttagtctggtcaccagatatggatgagagattctattcagtggatcagaatcaaactggtacattgatccacttgagccgttaagtgctgccaattgtacaatatgcccaggcttgcagaataaagccaactttttattgtgaataataataaggacatatttttcttcagattatgttttatttctttgcattgagtgaggaacataaaatggcttggtaaaagtaataaaatcagtacaatcactaactttcctttgtacatattattttgcagtatagatgaatattactaatcagtttgattattctcagagggtgctgctctttaatgaaaatgaaaattatagctaatgttttttcctcaaactctgctttctgtaaccaatcagtgttttaatgtttgtgtgttcttcataaaatttaaatacaattcgttattctgtttccaatgttagtatgtatgtaaacatgatagtacagccatttttttcatatgtgagtaaaaataaaatagtatttttaaaaata

SEQ ID NO: 147526 - DNA, 4226 bp, Homo sapiens
  Payload ID: 9195
  Gene Symbol: LAMTOR3
  Gene Name: late endosomal/lysosomal adaptor, MAPK and MTOR activator 3
  Uniprot ID: Q9UHA4
  ENST ID: ENST00000499666
  CDS Start-End: 194-568
ggaaatcccgtatcgtagggcgacggcggcttagaaagtgcttcctggagcgcagacgaggtcatgaatcatgtgacggtggcttgaggaggaacctgtctttaaagctgtccctgaagtgacagcggagagaaccaggcagcccagaaaccccaggcgtggagattgatcctgcgagagaagggggttcatcatggcggatgacctaaagcgattcttgtataaaaagttaccaagtgttgaagggctccatgccattgttgtgtcagatagagatggagtacctgttattaaagtggcaaatgacaatgctccagagcatgctttgcgacctggtttcttatccacttttgcccttgcaacagaccaaggaagcaaacttggactttccaaaaataaaagtatcatctgttactataacacctaccaggtggttcaatttaatcgtttacctttggtggtgagtttcatagccagcagcagtgccaatacaggactaattgtcagcctagaaaaggaacttgctccattgtttgaagaactgagacaagttgtggaagtttcttaatctgacagtggtttcagtgtgtaccttatcttcattataacaacacaatatcaatccagcaatctttagactacaataatacttttatccatgtgctcaagaaagggcccctttttccaacttatactaaagagctagcatatagatgtaatttatagatagatcagttgctatattttctggtgtagggtctttcttatttagtgagatctagggataccacagaaatggttcagtctatcacagctcccatggagttagtctggtcaccagatatggatgagagattctattcagtggatcagaatcaaactggtacattgatccacttgagccgttaagtgctgccaattgtacaatatgcccaggcttgcagaataaagccaactttttattgtgaataataataaggacatatttttcttcagattatgttttatttctttgcattgagtgaggaacataaaatggcttggtaaaagtaataaaatcagtacaatcactaactttcctttgtacatattattttgcagtatagatgaatattactaatcagtttgattattctcagagggtgctgctctttaatgaaaatgaaaattatagctaatgttttttcctcaaactctgctttctgtaaccaatcagtgttttaatgtttgtgtgttcttcataaaatttaaatacaattcgttattctgtttccaatgttagtatgtatgtaaacatgatagtacagccatttttttcatatgtgagtaaaaataaaatagtatttttaaaaatatagtttgagcactgtataggtcctttttttgttcagactttttccaaaaatctaaacataattaatatactctttcagccacatgaataaataatgagtgtttcttgtaggtattggtttggagattgttttacggtagtatgaactgttaactggaaaagaaacctgagattgcagtcagccaagattgtgccactgcaccccagcctgggcaacagagactccgtctcaaaaacaaaaaagaaaagaaaccaagaaacctcaggcatgaacctaatttaatctccatgaaagaggtactacagttctagaatataccctttatgttcaggaatgcagtctatcattcagagttaatttctttctaggctctttgacaatcagtttttccctggatcagttcagtacatatgcattgagcacctgtgtgccagtcagccgagctatcacattgcacaattctaagaagcaccattcatgtctcatcatatttctatgctctgggagttgcctttcacatagaatatgtgtgattgttatccctagaattgtgcagtgaggcaattggctaggtgctgtgctgctttttctttctttctttttttttttaagagacagagtcttgctgtgttgcccagtctggagtgcagtggtggcatgatcttgcctcactgtaacctctgcctcctgggttcaagctgttctcatgccccattctcccttgtagctgggattacaggcttacaccatcgcacttggcaaatttgtgtatttttagtagagacaggaattcaccatgttggccaggctggtcttgaactcctgacttaaagtgatccacctgctttggcctcccaaaatgctaggattataggtgtgagccactgcaccgggccatgtgctactttttcttccttccatccttcctcccttcttcagtgtaaatatgagattaatttgtgataccttactttaaagaacttagagttcagtaaaggaagcaggtatagaaagtgctatgataaagctatacataggatggtatagaaccacagactaggggcacttaaaatgggcaagaaaatagcctttgtaaataaaatagaggcaagagatataatgctttacctgcaaagagctataaatacagccatgtaccatataatgatgtttcagttagtgaaggaccacatacgagggtggtcagaacagcaggctataccatatagcctaggtgtgtagtaggctataccatatagcctaggtgtgtagtagtaggctataccatatagcctaggtgtgtagtagtaggcgataccatatagcctaggtgtgtagtagtaggctataccatatagcctaggtgtatagtagtaggctataccatatagcctaggtgtgtagtaggctataccatatagcctaggtatgtagtagtaggctataccatatagcctaggtgtgtagtagtaggctataccatctggggttcctgtcagtacagtatgatgttcacataatgatgaaatcacctaacaaagcatgtctcgaaatgtatccacattgttacgtaacacatgactgtagttaattgttacaattgaaatactagatgtactcattgaaatccagaattcccattatctggattatttaatatcgttcaggaaatttttgccagtgcaatggtgcatgaaacaatgtcttttagaaatgaggtggccagatttctatttgcagataataattgtatatctaaaaatcctagaaaaagaaatgataacaaatggagctacttaacctttacatgttgaatgctgccactgttaaaatttctgagggggtataatagataaactatcccatagttcatctggaaaaataaggtggtgaaaattgctaagaaatttttgaaagggtaatgtaaacctagattaactgtttttgaaaggtagtacagaactgaatgcacaactagatatcaatggtatgtactcacccagaaaaaagacttcagtacatacatgtgagggcttaaaacattgttataaagacgggatcacaatgggaaaaggattattcaataagtagggcaggcattctctatgcctgctagggaagtgtgacttgttatactctttatgtacagcaattggcagtctgtgaaacttttaaattcatatacataaccttttgccctgcaattccacttctagaaatttatcctaccaaacaaagcacatagatgtgcaaaagtatgtatttacaagtatattctttgcaacttggtaatgtcaaagaattggaagcaacctaaatatctgccataggtaggataaccatatgctttggctttttgaacactaccagtttatacctgctgttcttggataattattaatagtgctttcattctcaatgtctcactttagataataaattacagaggattggtgaaactaatttgcccaatggaaaaaggaatgaagaagtgctttaggtactgagatgaaaagatctctaaggcataataatgtttattgagaaaagcatggtgtcaaactgtatggcatgctacaattgatgtataagaagaaaaaatgtgtatgtattcctatttgtttgtatatggtagactgtctctgaagacatatatggaagaacctgatcacattggtagtctccaaggagcagaactagatacctgggggataaggatcccaggagtgagccttttcattgtaaacttcattgtactttgagtttttaactgttcaaaaataataaaattagaaataaaatatttcaacaaacaataaaatgggatatttggggaagaaagttgtctcagggctctccaaagaagcagaa

SEQ ID NO: 147527 - DNA, 605 bp, Homo sapiens
  Payload ID: 9196
  Gene Symbol: LAMTOR4
  Gene Name: late endosomal/lysosomal adaptor, MAPK and MTOR activator 4
  Uniprot ID: Q0VGL1
  ENST ID: ENST00000341942
  CDS Start-End: 67-366
gtgaccggggcctgaagccggaagctacctatctggtagggagctcccccagcaccgaagactgcgatgacttctgcgctgacccaggggctggagcgaatcccagaccagctcggctacctggtactgagtgaaggtgcagtgctggcgtcatctggggacctggagaatgatgagcaggcagccagtgccatctctgagctggtcagcacagcctgcggtttccggctgcaccgcggcatgaatgtgcccttcaagcgcctgtctgtggtctttggagaacacacactgctggtgacggtgtcaggacagagggtgtttgtggtgaagaggcagaaccgaggtcgggagcccattgatgtctgagcctgccggagggcgagggtcggagaagcggattgggtcctgggcctctgtgatgaggcaggcacacctgtcggtcttggcttgctgctagaactagggccttctgctcgcccacctcccacccctacctggacgggcccaggcttggggactctgagctgtgttaaggagaacaagggcaaggagacctccctttgtgctccctcactccctaataaacatgagtctgatgttctcca

SEQ ID NO: 147528 - DNA, 730 bp, Homo sapiens
  Payload ID: 9196
  Gene Symbol: LAMTOR4
  Gene Name: late endosomal/lysosomal adaptor, MAPK and MTOR activator 4
  ENST ID: ENST00000441173
  CDS Start-End: 36-449
tctggtagggagctcccccagcaccgaagactgcgatgacttctgcgctgacccaggggctggagcgaatcccagaccagctcggctacctggtactgagtgaaggtgcagtgctggcgtcatctggggacctggagaatgatgagcaggcagccagtgccatctctgagctggtcagcacagcctgcggtttccggctgcaccgcggcatgaatgtgcccttcaagcgcctgtctggtgagcccctgcccctgcccttggtggtggtactgggagcggggggctacttccaggggcttctcggcttctcttcttccagcctcctaccatctcctggggtctctggtctggccactttcctccctttgggactccctggtatcagaattgtgaatgagaaggcaagagaaaggagatctagcagaggccactcatcttcaaatctctgagcctggaactatagaacttctttggctttgatcccagccaatgtgcgtgtggccccgccccatggagtctgttgcacccactaactctgtgctcccttccctctcctggggcgggggaaggtgtgtctctcctccagtggtctttggagaacacacactgctggtgacggtgtcaggacagagggtgtttgtggtgaagaggcagaaccgaggtcgggagcccattgatgtctgagcctgccggagggcgagggtcggagaagcggattgggtcctgggcc

SEQ ID NO: 147529 - DNA, 519 bp, Homo sapiens
  Payload ID: 9196
  Gene Symbol: LAMTOR4
  Gene Name: late endosomal/lysosomal adaptor, MAPK and MTOR activator 4
  ENST ID: ENST00000474141
  CDS Start-End: 62-280
cggggcctgaagccggaagctacctatctggtagggagctcccccagcaccgaagactgcgatgtcatctggggacctggagaatgatgagcaggcagccagtgccatctctgagctggtcagcacagcctgcggtttccggctgcaccgcggcatgaatgtgcccttcaagcgcctgtctgtggtctttggagaacacacactgctggtgacggtgtcaggacagagggtgtttgtggtgaagaggcagaaccgaggtcgggagcccattgatgtctgagcctgccggagggcgagggtcggagaagcggattgggtcctgggcctctgtgatgaggcaggcacacctgtcggtcttggcttgctgctagaactagggccttctgctcgcccacctcccacccctacctggacgggcccaggcttggggactctgagctgtgttaaggagaacaagggcaaggagacctccctttgtgctccctcactccctaataaacatgagtctgatgttctcca

SEQ ID NO: 147530 - DNA, 621 bp, Homo sapiens
  Payload ID: 9196
  Gene Symbol: LAMTOR4
  Gene Name: late endosomal/lysosomal adaptor, MAPK and MTOR activator 4
  ENST ID: ENST00000468582
  CDS Start-End: 248-373
gagtgaggacgcatgcgcgagaggacccgccgggggttcagcgtctctgctccccagtctgtgtggtttccccctgacttctgcgctgacccaggggctggagcgaatcccagaccagctcggctacctggtactgagtgaaggtgcagtgctggcgtcatctggggacctggagaatgatgagcaggcagccagtgccatctctgagctggtcagcacagcctgcggtttccggctgcaccgcggcatgaatgtgcccttcaagcgcctgtctgtggtctttggagaacacacactgctggtgacggtgtcaggacagagggtgtttgtggtgaagaggcagaaccgaggtcgggagcccattgatgtctgagcctgccggagggcgagggtcggagaagcggattgggtcctgggcctctgtgatgaggcaggcacacctgtcggtcttggcttgctgctagaactagggccttctgctcgcccacctcccacccctacctggacgggcccaggcttggggactctgagctgtgttaaggagaacaagggcaaggagacctccctttgtgctccctcactccctaataaacatgagtctgatgttctccagcccaggga

SEQ ID NO: 147531 - DNA, 616 bp, Homo sapiens
  Payload ID: 9196
  Gene Symbol: LAMTOR4
  Gene Name: late endosomal/lysosomal adaptor, MAPK and MTOR activator 4
  ENST ID: ENST00000460732
  CDS Start-End: 61-309
ggggcctgaagccggaagctacctatctggtagggagctcccccagcaccgaagactgcgatgacttctgcgctgacccaggggctggagcgaatcccagaccagctcggctacctggtactgagtgaaggtgcagtgctggcgtcatctggggacctggagaatgatgagcaggcagccagtgccatctctgagctggtcagcacagcctgcggtttccggctgcaccgcggcatgaatgtgcccttcaagcgcctgtctggtgtgtctctcctccagtggtctttggagaacacacactgctggtgacggtgtcaggacagagggtgtttgtggtgaagaggcagaaccgaggtcgggagcccattgatgtctgagcctgccggagggcgagggtcggagaagcggattgggtcctgggcctctgtgatgaggcaggcacacctgtcggtcttggcttgctgctagaactagggccttctgctcgcccacctcccacccctacctggacgggcccaggcttggggactctgagctgtgttaaggagaacaagggcaaggagacctccctttgtgctccctcactccctaataaacatgagtctgatgttctcca

SEQ ID NO: 147532 - DNA, 613 bp, Homo sapiens
  Payload ID: 9196
  Gene Symbol: LAMTOR4
  Gene Name: late endosomal/lysosomal adaptor, MAPK and MTOR activator 4
  ENST ID: ENST00000488241
  CDS Start-End: 232-306
gcgagaggacccgccgggggttcagcgtctctgctccccagtctgtgtggtttccccctgacttctgcgctgacccaggggctggagcgaatcccagaccagctcggctacctggtactgagtgaaggtgcagtgctggcgtcatctggggacctggagaatgatgagcaggcagccagtgccatctctgagctggtcagcacagcctgcggtttccggctgcaccgcggcatgaatgtgcccttcaagcgcctgtctggtgtgtctctcctccagtggtctttggagaacacacactgctggtgacggtgtcaggacagagggtgtttgtggtgaagaggcagaaccgaggtcgggagcccattgatgtctgagcctgccggagggcgagggtcggagaagcggattgggtcctgggcctctgtgatgaggcaggcacacctgtcggtcttggcttgctgctagaactagggccttctgctcgcccacctcccacccctacctggacgggcccaggcttggggactctgagctgtgttaaggagaacaagggcaaggagacctccctttgtgctccctcactccctaataaacatgagtctgatgttctcca

SEQ ID NO: 147533 - DNA, 720 bp, Homo sapiens
  Payload ID: 9196
  Gene Symbol: LAMTOR4
  Gene Name: late endosomal/lysosomal adaptor, MAPK and MTOR activator 4
  ENST ID: ENST00000473459
  CDS Start-End: 356-481
gagggggccgggaagggacctggctggggaatgagaaaacctggggccatcgtcaacccagagacttgggtttgcaggtgaagggtatcgggccgtccatccctctagcatgcttctcacgacttgcatctttacccactagacttctgcgctgacccaggggctggagcgaatcccagaccagctcggctacctggtactgagtgaaggtgcagtgctggcgggcagcaagtgtgaagacagaaaaagatggagccattaacagtcatctggggacctggagaatgatgagcaggcagccagtgccatctctgagctggtcagcacagcctgcggtttccggctgcaccgcggcatgaatgtgcccttcaagcgcctgtctgtggtctttggagaacacacactgctggtgacggtgtcaggacagagggtgtttgtggtgaagaggcagaaccgaggtcgggagcccattgatgtctgagcctgccggagggcgagggtcggagaagcggattgggtcctgggcctctgtgatgaggcaggcacacctgtcggtcttggcttgctgctagaactagggccttctgctcgcccacctcccacccctacctggacgggcccaggcttggggactctgagctgtgttaaggagaacaagggcaaggagacctccctttgtgctccctcactccctaataaacatgagtctgatgttctcca

SEQ ID NO: 147534 - DNA, 371 bp, Homo sapiens
  Payload ID: 9196
  Gene Symbol: LAMTOR4
  Gene Name: late endosomal/lysosomal adaptor, MAPK and MTOR activator 4
  ENST ID: ENST00000466498
  CDS Start-End: 312-371
gggggccgggaagggacctggctggggaatgagaaaacctggggccatcgtcaacccagagacttgggtttgcaggtgaagggtatcgggccgtccatccctctagcatgcttctcacgacttgcatctttacccactagacttctgcgctgacccaggggctggagcgaatcccagaccagctcggctacctggtactgagtgaaggtgcagtgctggcgtcatctggggacctggagaatgatgagcaggcagccagtgccatctctgagctggtcagcacagcctgcggtttccggctgcaccgcggcatgaatgtgcccttcaagcgcctgtctgtggtctttggagaacacacactgctggtgacg

SEQ ID NO: 147535 - DNA, 401 bp, Homo sapiens
  Payload ID: 9196
  Gene Symbol: LAMTOR4
  Gene Name: late endosomal/lysosomal adaptor, MAPK and MTOR activator 4
  ENST ID: ENST00000490633
  CDS Start-End: 1-58
cggcatgaatgtgcccttcaagcgcctgtctgctttttatttcatccccaaaatctaagggtcctgcctccgtccaccccagcattctgcatcactcagcactcagcccagaccctccccagcccacctcgaagagccccgtcctcagagcctggaaggccacactgaaggtgagcgcgctgcccttccgggaaaagccaaggttgttgaggggcgtgtggcagacgacggagtccagggcagcctgcatggcccggcgctcctcctcacacagctgctttcctgggggcagaaacagggaccagcaaacactacagcgttcctcattcccacagggccttcgccagcacagtctcatctgattctcaaagccactctgtggagtaaactgagcaaacgtt

SEQ ID NO: 147536 - DNA, 868 bp, Homo sapiens
  Payload ID: 9197
  Gene Symbol: LAMTOR5
  Gene Name: late endosomal/lysosomal adaptor, MAPK and MTOR activator 5
  ENST ID: ENST00000256644
  CDS Start-End: 77-598
gccacgaactgaagcactgaggcccggctgcagacctctcccgagaggggaataatccgtgccggccggttccgccatggagccaggtgcaggtcacctcgacggtcaccgcgcggggagcccaagccttcgtcaggctctgtgcgacggaagcgcagtgatgttttccagtaaagaacgcggacgttgcaccgtgatcaattttgtccctttggaggcgccgttacggtccacgccccgctcgcgtcaagtgactgaggcctgtggtggagaaggacgtgccgtgccgctgggttctgagccggagtggtcggtgggtgggatggaggcgaccttggagcagcacttggaagacacaatgaagaatccctccattgttggagtcctgtgcacagattcacaaggacttaatctgggttgccgcgggaccctgtcagatgagcatgctggagtgatatctgttctagcccagcaagcagctaagctaacctctgaccccactgatattcctgtggtgtgtctagaatcagataatgggaacattatgatccagaaacacgatggcatcacggtggcagtgcacaaaatggcctcttgatgctcatatctgttcttcagcagcctgtcataggaactggatcctacctatgttaattaccttatagaactactaaagttccagtagttaggccattcatttaatgtgcattaggcacttttctgtttatttaagagtcaattgctttctaatgctctatggaccgactatcaagatattagtaagaaaggatcatgttttgaagcagcaggtccaggtcactttgtatatagaattttgctgtattcaataaatctgtttggaggaaaa

SEQ ID NO: 147537 - DNA, 1154 bp, Homo sapiens
  Payload ID: 9197
  Gene Symbol: LAMTOR5
  Gene Name: late endosomal/lysosomal adaptor, MAPK and MTOR activator 5
  ENST ID: ENST00000474861
  CDS Start-End: 608-880
gaaggacgtgccgtgccgctgggttctgagccggagtggtcggtgggtgggatggaggcgaccttggagcagcacttggaagacacgtgagtagtgcgcgcctcttcggcctgtcctgaggtcgcggcggaggaacttgagcggaacgaaaggcgcgagctgcgagtaccggccagggcgtctcggggacgtcgcgcgacccccgggacacgggatgagggggctaaactctacccaaggccgcagggcggggcgggtgacccggaattaaaatcctgccgggcaccgcacattccctcttgagcgagtctcccgggcccaggccacgggccaaaactgcctatctcgttgttgaaatcgtctttacggtcagggtggttctgcggaagttttagaaaacgggttgacttttgggaagattgtgccagttgtgcagtgtcgagccctgcagtgtaaacaaacacgtatctcctgtgtgtaacctatcagttacttggtgcttaagtagataaaaatcattctttaaatttttcgaacaagcagtatctatgtaaaattcaaaactggaaaagtgtaaagggtacagagagacacctgcctcccaccgatgtccctcagcttccacttaccctccaggagaatgaagaatccctccattgttggagtcctgtgcacagattcacaaggacttaatctgggttgccgcgggaccctgtcagatgagcatgctggagtgatatctgttctagcccagcaagcagctaagctaacctctgaccccactgatattcctgtggtgtgtctagaatcagataatgggaacattatgatccagaaacacgatggcatcacggtggcagtgcacaaaatggcctcttgatgctcatatctgttcttcagcagcctgtcataggaactggatcctacctatgttaattaccttatagaactactaaagttccagtagttaggccattcatttaatgtgcattaggcacttttctgtttatttaagagtcaattgctttctaatgctctatggaccgactatcaagatattagtaagaaaggatcatgttttgaagcagcaggtccaggtcactttgtatatagaattttgctgtattcaataaatctgtttggaggaaaatgga

SEQ ID NO: 147538 - DNA, 694 bp, Homo sapiens
  Payload ID: 9197
  Gene Symbol: LAMTOR5
  Gene Name: late endosomal/lysosomal adaptor, MAPK and MTOR activator 5
  ENST ID: ENST00000483260
  CDS Start-End: 148-420
ggacgtgccgtgccgctgggttctgagccggagtggtcggtgggtgggatggaggcgaccttggagcagcacttggaagacactatctatgtaaaattcaaaactggaaaagtgtaaagggtacagagagacacctgcctcccaccgatgtccctcagcttccacttaccctccaggagaatgaagaatccctccattgttggagtcctgtgcacagattcacaaggacttaatctgggttgccgcgggaccctgtcagatgagcatgctggagtgatatctgttctagcccagcaagcagctaagctaacctctgaccccactgatattcctgtggtgtgtctagaatcagataatgggaacattatgatccagaaacacgatggcatcacggtggcagtgcacaaaatggcctcttgatgctcatatctgttcttcagcagcctgtcataggaactggatcctacctatgttaattaccttatagaactactaaagttccagtagttaggccattcatttaatgtgcattaggcacttttctgtttatttaagagtcaattgctttctaatgctctatggaccgactatcaagatattagtaagaaaggatcatgttttgaagcagcaggtccaggtcactttgtatatagaattttgctgtattcaataaatctgtttggaggaaaatgga

SEQ ID NO: 147539 - DNA, 553 bp, Homo sapiens
  Payload ID: 9197
  Gene Symbol: LAMTOR5
  Gene Name: late endosomal/lysosomal adaptor, MAPK and MTOR activator 5
  ENST ID: ENST00000602858
  CDS Start-End: 48-287
ttttctcccattatgtacttcaactctcttgtgttcctggaattagaatgaagaatccctccattgttggagtcctgtgcacagattcacaaggacttaatctgggttgccgcgggaccctgtcagatgagcatgctggagtgatatctgttctagcccagcaagcagctaagctaacctctgaccccactgatattcctgtggtgtgtctagaatcagataatgggaacattatgatccagaaacacgatggcatcacggtggcagtgcacaaaatggcctcttgatgctcatatctgttcttcagcagcctgtcataggaactggatcctacctatgttaattaccttatagaactactaaagttccagtagttaggccattcatttaatgtgcattaggcacttttctgtttatttaagagtcaattgctttctaatgctctatggaccgactatcaagatattagtaagaaaggatcatgttttgaagcagcaggtccaggtcactttgtatatagaattttgctgtattcaataaatctgtttggagg

SEQ ID NO: 147540 - DNA, 634 bp, Homo sapiens
  Payload ID: 9197
  Gene Symbol: LAMTOR5
  Gene Name: late endosomal/lysosomal adaptor, MAPK and MTOR activator 5
  Uniprot ID: O43504
  ENST ID: ENST00000602318
  CDS Start-End: 89-364
gccccgctcgcgtcaagtgactgaggcctgtggtggagaaggacgtgccgtgccgctgggttctgagccggagtggtcggtgggtgggatggaggcgaccttggagcagcacttggaagacacaatgaagaatccctccattgttggagtcctgtgcacagattcacaaggacttaatctgggttgccgcgggaccctgtcagatgagcatgctggagtgatatctgttctagcccagcaagcagctaagctaacctctgaccccactgatattcctgtggtgtgtctagaatcagataatgggaacattatgatccagaaacacgatggcatcacggtggcagtgcacaaaatggcctcttgatgctcatatctgttcttcagcagcctgtcataggaactggatcctacctatgttaattaccttatagaactactaaagttccagtagttaggccattcatttaatgtgcattaggcacttttctgtttatttaagagtcaattgctttctaatgctctatggaccgactatcaagatattagtaagaaaggatcatgttttgaagcagcaggtccaggtcactttgtatatagaattttgctgtattcaataaatctgtttggaggaaaa

SEQ ID NO: 147541 - DNA, 846 bp, Homo sapiens
  Payload ID: 9197
  Gene Symbol: LAMTOR5
  Gene Name: late endosomal/lysosomal adaptor, MAPK and MTOR activator 5
  ENST ID: ENST00000614544
  CDS Start-End: 59-580
gaggcccggctgcagacctctcccgagaggggaataatccgtgccggccggttccgccatggagccaggtgcaggtcacctcgacggtcaccgcgcggggagcccaagccttcgtcaggctctgtgcgacggaagcgcagtgatgttttccagtaaagaacgcggacgttgcaccgtgatcaattttgtccctttggaggcgccgttacggtccacgccccgctcgcgtcaagtgactgaggcctgtggtggagaaggacgtgccgtgccgctgggttctgagccggagtggtcggtgggtgggatggaggcgaccttggagcagcacttggaagacacaatgaagaatccctccattgttggagtcctgtgcacagattcacaaggacttaatctgggttgccgcgggaccctgtcagatgagcatgctggagtgatatctgttctagcccagcaagcagctaagctaacctctgaccccactgatattcctgtggtgtgtctagaatcagataatgggaacattatgatccagaaacacgatggcatcacggtggcagtgcacaaaatggcctcttgatgctcatatctgttcttcagcagcctgtcataggaactggatcctacctatgttaattaccttatagaactactaaagttccagtagttaggccattcatttaatgtgcattaggcacttttctgtttatttaagagtcaattgctttctaatgctctatggaccgactatcaagatattagtaagaaaggatcatgttttgaagcagcaggtccaggtcactttgtatatagaattttgctgtattcaataaatctgtttggagg

SEQ ID NO: 147542 - DNA, 5087 bp, Homo sapiens
  Payload ID: 9198
  Gene Symbol: LTBP1
  Gene Name: latent transforming growth factor beta binding protein 1
  Uniprot ID: Q14766
  ENST ID: ENST00000407925
  CDS Start-End: 82-4269
cgggttgtgggctctctcttttcccctcttgctcctttcttttctttttttctgtttttttaaaccttccaaggcaagttcatggatactaagctgatgtgtttgttgttctttttctccctgcctccgctcctagtgagtaaccacactggccgcatcaaggtggtctttactccgagcatctgtaaagtgacctgcaccaagggcagctgtcagaacagctgtgagaaggggaacaccaccactctcattagtgagaatggtcatgctgccgacaccctgacggccacgaacttccgagtggtaatttgccatcttccatgtatgaatggtggccagtgcagttcaagggacaaatgtcagtgccctccaaatttcacaggaaaactttgtcagatcccagtccatggtgccagcgtgcctaaactttatcagcattcccagcagccaggcaaggcgttggggacgcatgtcatccattcaacacataccttgcctctgaccgtgactagccagcaaggagtcaaagtgaaatttcctcctaacatagtcaatatccatgtgaaacatcctcctgaagcttccgtccagatacatcaggtttcaagaattgatggcccaacaggccagaagacaaaagaagctcaaccaggccaatcccaagtctcgtaccaagggcttcctgtccagaagacccagaccatacattccacatactcccaccagcaggtcattcctcacgtctaccccgtggctgctaagacacagcttggccggtgcttccaggaaaccattgggtcacagtgtggcaaagcgctccctggcctttcaaagcaagaggactgctgtggaactgtgggtacctcctggggctttaacaaatgccagaaatgccccaagaaaccatcttatcatggatacaaccaaatgatggaatgcctaccgggttataagcgggttaacaacaccttttgccaagatattaatgaatgtcagctacaaggtgtatgccctaatggtgagtgtttgaataccatgggcagctatcgatgtacctgcaaaataggatttgggccggatcctaccttttcaagttgtgttcctgatccccctgtgatctcggaagagaaagggccctgttaccgacttgtcagttctggaagacagtgtatgcaccctctgtctgttcacctcaccaagcagctctgctgttgtagtgtgggcaaggcctggggcccacactgtgagaaatgtccccttccaggcacagctgcttttaaggaaatctgtcctggtggaatgggttatacggtttctggcgttcatagacgcaggccaatccatcaccatgtaggtaaaggacctgtatttgtcaagccaaagaacactcaacctgttgctaaaagtactcatcctccacctctcccagccaaggaagagccagtggaggccctgaccttctcccgggaacacgggccaggagtggcggagccagaagtggcaactgcaccccctgaaaaggaaataccttcattggatcaagagaaaaccaaacttgagcctggtcaaccccagctgtctccaggcatttccactattcatctgcatccacagtttccagtagtgattgaaaaaacatcacctcctgtgcctgttgaagtagctcctgaagcttctacgtctagtgccagccaagtgattgctcctactcaagtgacagaaatcaatgaatgtactgtgaaccctgatatctgtggagcaggacactgcattaacctaccagtgagatatacctgtatatgctacgagggctacaggttcagtgaacaacagaggaaatgtgtggatattgatgagtgtactcaggtccaacacctctgctcccagggccgctgtgaaaacaccgagggaagtttcttgtgcatttgcccagcaggatttatggccagtgaggagggtactaactgcatagatgttgacgaatgcctgaggccggacgtctgtggggaggggcactgtgtcaatactgtgggggccttccggtgtgaatactgtgacagcgggtaccgcatgactcagagaggccgttgtgaggatattgatgaatgtttgaatccaagcacttgtccagatgagcagtgtgtgaattctcctggatcttaccagtgcgttccctgcacagaaggattccgaggctggaatggacagtgccttgatgtggacgagtgcctggaaccaaacgtctgcgcaaatggtgattgttccaaccttgaaggctcctacatgtgttcatgccacaaaggctatacccggactccggaccacaagcactgtagagatattgatgaatgtcagcaagggaatctatgtgtaaacgggcagtgcaaaaataccgagggctccttcaggtgcacctgtggacaggggtaccagctgtcggcagctaaagaccagtgtgaagacattgatgaatgccagcaccgtcatctctgtgctcatgggcagtgcaggaacactgagggctcttttcaatgtgtgtgtgaccagggttacagagcatctgggcttggagaccactgtgaagatatcaatgaatgcttggaggacaagagtgtttgccagagaggagactgcattaatactgcagggtcctatgattgtacttgtccggatggatttcagctagatgacaataaaacatgtcaagatattaatgaatgtgaacatccagggctctgtggtccgcaaggggagtgcctaaacacagagggttctttccattgtgtctgccagcagggtttctcaatctctgcagatggccgtacgtgtgaagatattgatgaatgtgtaaacaacactgtttgtgacagtcacgggttttgtgacaatacagctggctccttccgctgcctctgttatcagggctttcaagccccacaggatgggcaagggtgtgtggatgtgaatgaatgtgaactgctcagtggggtgtgtggtgaagccttctgtgaaaacgtggaagggtccttcctgtgcgtgtgtgctgatgaaaaccaagagtacagccccatgactgggcagtgccgctcccggacctccacagatttagatgtagatgtagatcaacccaaagaagaaaagaaagaatgctactataatctcaatgacgccagtctctgtgataatgtgttggcccccaatgtcacgaaacaagaatgctgctgtacatcaggcgtgggatggggagataactgcgaaatcttcccctgcccggtcttgggaactgctgagttcactgaaatgtgtcccaaagggaaaggttttgtgcctgctggagaatcatcttctgaagctggtggtgagaactataaagatgcagatgaatgcctactttttggacaagaaatctgcaaaaatggtttctgtttgaacactcggcctgggtatgaatgctactgtaagcaagggacgtactatgatcctgtgaaactgcagtgctttgatatggatgaatgtcaagaccccagtagttgtattgatggccagtgtgttaatacagagggctcttacaactgcttctgtactcaccccatggtcctggatgcgtcagaaaaaagatgtatacgaccggctgagtcaaacgaacaaatagaagaaactgatgtctaccaagatttgtgctgggaacatctgagtgatgaatacgtgtgtagccggcctcttgtgggcaagcagacaacgtacactgagtgctgctgtctgtatggagaggcctggggcatgcagtgtgccctctgccccctgaaggattcagatgactatgctcagctgtgtaacatccccgtgacgggacgccggcagccatatggacgggacgccttggttgacttcagtgaacagtatactccagaagccgatccctacttcatccaagaccgttttctaaatagctttgaggagttacaggctgaggaatgcggcatcctcaatggatgtgaaaatggtcgctgtgtgagggtccaggaaggttacacctgcgattgctttgatgggtatcacttggatacggccaagatgacctgtgtcgatgtaaatgaatgcgatgagttgaacaaccggatgtctctctgcaagaatgccaagtgcattaacaccgatggttcctacaagtgtttgtgtctgccaggctacgtgccttctgacaagccaaactactgcactccgttgaataccgccttgaatttagagaaagacagtgacctggagtgaaacagaatctacataacctaagcccatatactctgcactgtgtaaaggaaaagggagaaatgtattatacttgagacattgcacctaccccggaaggctggaaatacagaaacagcatggaattgcaagtcctctgaagacaatgagaggatttaggatgagcccgataggtgtggcagaccaaatggacatttctctaaaaaaccagtatatatagtctgttcatatgtaaaattcaatggaagagaggtggaacagtgctgttattttaaacagaaggttgtattattatgttgttttgtttttttactattgcttgattaaatttggcatttaaatagtggtggaaatattttatataattttcattttttggttgtgcagttccttggctactgtttttcttttacttcagttttttaaaaatctcaaatgaaaaagtcttcgatacaatattgttaagctgtattataagtattgttacacagggttatgcaattcccggcctggagcatttttgaaattcaaattgtctgtcctgtggagcaggcagtgattttgttccaaaactttgtatacacatttggagaaaagtactttatattttcagtgttttgtctgattttaatgtccgttcttagccaagctgctagcaggtgttaattggatccctttccttcactgaaatggaagagtttataagcttacgttagtattgtaatatgtaaagtaagcccaacaaaaatttttaaaaatttgatgatccccaatatatctaccattgtatgttaaataaatcaccatttttgtagaaaaaa

SEQ ID NO: 147543 - DNA, 4948 bp, Homo sapiens
  Payload ID: 9198
  Gene Symbol: LTBP1
  Gene Name: latent transforming growth factor beta binding protein 1
  ENST ID: ENST00000402934
  CDS Start-End: 114-4136
cactgaaggcttccctctttccttaaacctgtcgggttgtgggctctctcttttcccctcttgctcctttcttttctttttttctgtttttttaaaccttccaaggcaagttcatggatactaagctgatgtgtttgttgttctttttctccctgcctccgctcctagtgagtaaccacactggccgcatcaaggtggtctttactccgagcatctgtaaagtgacctgcaccaagggcagctgtcagaacagctgtgagaaggggaacaccaccactctcattagtgagaatggtcatgctgccgacaccctgacggccacgaacttccgagtggtaatttgccatcttccatgtatgaatggtggccagtgcagttcaagggacaaatgtcagtgccctccaaatttcacaggaaaactttgtcagatcccagtccatggtgccagcgtgcctaaactttatcagcattcccagcagccaggcaaggcgttggggacgcatgtcatccattcaacacataccttgcctctgaccgtgactagccagcaaggagtcaaagtgaaatttcctcctaacatagtcaatatccatgtgaaacatcctcctgaagcttccgtccagatacatcaggtttcaagaattgatggcccaacaggccagaagacaaaagaagctcaaccaggccaatcccaagtctcgtaccaagggcttcctgtccagaagacccagaccatacattccacatactcccaccagcaggtcattcctcacgtctaccccgtggctgctaagacacagcttggccggtgcttccaggaaaccattgggtcacagtgtggcaaagcgctccctggcctttcaaagcaagaggactgctgtggaactgtgggtacctcctggggctttaacaaatgccagaaatgccccaagaaaccatcttatcatggatacaaccaaatgatggaatgcctaccgggttataagcgggttaacaacaccttttgccaagatattaatgaatgtcagctacaaggtgtatgccctaatggtgagtgtttgaataccatgggcagctatcgatgtacctgcaaaataggatttgggccggatcctaccttttcaagttgtgttcctgatccccctgtgatctcggaagagaaagggccctgttaccgacttgtcagttctggaagacagtgtatgcaccctctgtctgttcacctcaccaagcagctctgctgttgtagtgtgggcaaggcctggggcccacactgtgagaaatgtccccttccaggcacagccaaggaagagccagtggaggccctgaccttctcccgggaacacgggccaggagtggcggagccagaagtggcaactgcaccccctgaaaaggaaataccttcattggatcaagagaaaaccaaacttgagcctggtcaaccccagctgtctccaggcatttccactattcatctgcatccacagtttccagtagtgattgaaaaaacatcacctcctgtgcctgttgaagtagctcctgaagcttctacgtctagtgccagccaagtgattgctcctactcaagtgacagaaatcaatgaatgtactgtgaaccctgatatctgtggagcaggacactgcattaacctaccagtgagatatacctgtatatgctacgagggctacaggttcagtgaacaacagaggaaatgtgtggatattgatgagtgtactcaggtccaacacctctgctcccagggccgctgtgaaaacaccgagggaagtttcttgtgcatttgcccagcaggatttatggccagtgaggagggtactaactgcatagatgttgacgaatgcctgaggccggacgtctgtggggaggggcactgtgtcaatactgtgggggccttccggtgtgaatactgtgacagcgggtaccgcatgactcagagaggccgttgtgaggatattgatgaatgtttgaatccaagcacttgtccagatgagcagtgtgtgaattctcctggatcttaccagtgcgttccctgcacagaaggattccgaggctggaatggacagtgccttgatgtggacgagtgcctggaaccaaacgtctgcgcaaatggtgattgttccaaccttgaaggctcctacatgtgttcatgccacaaaggctatacccggactccggaccacaagcactgtagagatattgatgaatgtcagcaagggaatctatgtgtaaacgggcagtgcaaaaataccgagggctccttcaggtgcacctgtggacaggggtaccagctgtcggcagctaaagaccagtgtgaagacattgatgaatgccagcaccgtcatctctgtgctcatgggcagtgcaggaacactgagggctcttttcaatgtgtgtgtgaccagggttacagagcatctgggcttggagaccactgtgaagatatcaatgaatgcttggaggacaagagtgtttgccagagaggagactgcattaatactgcagggtcctatgattgtacttgtccggatggatttcagctagatgacaataaaacatgtcaagatattaatgaatgtgaacatccagggctctgtggtccgcaaggggagtgcctaaacacagagggttctttccattgtgtctgccagcagggtttctcaatctctgcagatggccgtacgtgtgaagatattgatgaatgtgtaaacaacactgtttgtgacagtcacgggttttgtgacaatacagctggctccttccgctgcctctgttatcagggctttcaagccccacaggatgggcaagggtgtgtggatgtgaatgaatgtgaactgctcagtggggtgtgtggtgaagccttctgtgaaaacgtggaagggtccttcctgtgcgtgtgtgctgatgaaaaccaagagtacagccccatgactgggcagtgccgctcccggacctccacagatgtagatgtagatcaacccaaagaagaaaagaaagaatgctactataatctcaatgacgccagtctctgtgataatgtgttggcccccaatgtcacgaaacaagaatgctgctgtacatcaggcgtgggatggggagataactgcgaaatcttcccctgcccggtcttgggaactgctgagttcactgaaatgtgtcccaaagggaaaggttttgtgcctgctggagaatcatcttctgaagctggtggtgagaactataaagatgcagatgaatgcctactttttggacaagaaatctgcaaaaatggtttctgtttgaacactcggcctgggtatgaatgctactgtaagcaagggacgtactatgatcctgtgaaactgcagtgctttgatatggatgaatgtcaagaccccagtagttgtattgatggccagtgtgttaatacagagggctcttacaactgcttctgtactcaccccatggtcctggatgcgtcagaaaaaagatgtatacgaccggctgagtcaaacgaacaaatagaagaaactgatgtctaccaagatttgtgctgggaacatctgagtgatgaatacgtgtgtagccggcctcttgtgggcaagcagacaacgtacactgagtgctgctgtctgtatggagaggcctggggcatgcagtgtgccctctgccccctgaaggattcagatgactatgctcagctgtgtaacatccccgtgacgggacgccggcagccatatggacgggacgccttggttgacttcagtgaacagtatactccagaagccgatccctacttcatccaagaccgttttctaaatagctttgaggagttacaggctgaggaatgcggcatcctcaatggatgtgaaaatggtcgctgtgtgagggtccaggaaggttacacctgcgattgctttgatgggtatcacttggatacggccaagatgacctgtgtcgatgtaaatgaatgcgatgagttgaacaaccggatgtctctctgcaagaatgccaagtgcattaacaccgatggttcctacaagtgtttgtgtctgccaggctacgtgccttctgacaagccaaactactgcactccgttgaataccgccttgaatttagagaaagacagtgacctggagtgaaacagaatctacataacctaagcccatatactctgcactgtgtaaaggaaaagggagaaatgtattatacttgagacattgcacctaccccggaaggctggaaatacagaaacagcatggaattgcaagtcctctgaagacaatgagaggatttaggatgagcccgataggtgtggcagaccaaatggacatttctctaaaaaaccagtatatatagtctgttcatatgtaaaattcaatggaagagaggtggaacagtgctgttattttaaacagaaggttgtattattatgttgttttgtttttttactattgcttgattaaatttggcatttaaatagtggtggaaatattttatataattttcattttttggttgtgcagttccttggctactgtttttcttttacttcagttttttaaaaatctcaaatgaaaaagtcttcgatacaatattgttaagctgtattataagtattgttacacagggttatgcaattcccggcctggagcatttttgaaattcaaattgtctgtcctgtggagcaggcagtgattttgttccaaaactttgtatacacatttggagaaaagtactttatattttcagtgttttgtctgattttaatgtccgttcttagccaagctgctagcaggtgttaattggatccctttccttcactgaaatggaagagtttataagcttacgttagtattgtaatatgtaaagtaagcccaacaaaaatttttaaaaatttgatgatccccaatatatctaccattgtatgttaaataaatcaccatttttgtag

SEQ ID NO: 147544 - DNA, 5092 bp, Homo sapiens
  Payload ID: 9198
  Gene Symbol: LTBP1
  Gene Name: latent transforming growth factor beta binding protein 1
  Uniprot ID: Q14766
  ENST ID: ENST00000404525
  CDS Start-End: 100-4128
ctctttccttaaacctgtcgggttgtgggctctctcttttcccctcttgctcctttcttttctttttttctgtttttttaaaccttccaaggcaagttcatggatactaagctgatgtgtttgttgttctttttctccctgcctccgctcctagtgagtaaccacactggccgcatcaaggtggtctttactccgagcatctgtaaagtgacctgcaccaagggcagctgtcagaacagctgtgagaaggggaacaccaccactctcattagtgagaatggtcatgctgccgacaccctgacggccacgaacttccgagtggtaatttgccatcttccatgtatgaatggtggccagtgcagttcaagggacaaatgtcagtgccctccaaatttcacaggaaaactttgtcagatcccagtccatggtgccagcgtgcctaaactttatcagcattcccagcagccaggcaaggcgttggggacgcatgtcatccattcaacacataccttgcctctgaccgtgactagccagcaaggagtcaaagtgaaatttcctcctaacatagtcaatatccatgtgaaacatcctcctgaagcttccgtccagatacatcaggtttcaagaattgatggcccaacaggccagaagacaaaagaagctcaaccaggccaatcccaagtctcgtaccaagggcttcctgtccagaagacccagaccatacattccacatactcccaccagcaggtcattcctcacgtctaccccgtggctgctaagacacagcttggccggtgcttccaggaaaccattgggtcacagtgtggcaaagcgctccctggcctttcaaagcaagaggactgctgtggaactgtgggtacctcctggggctttaacaaatgccagaaatgccccaagaaaccatcttatcatggatacaaccaaatgatggaatgcctaccgggttataagcgggttaacaacaccttttgccaagatattaatgaatgtcagctacaaggtgtatgccctaatggtgagtgtttgaataccatgggcagctatcgatgtacctgcaaaataggatttgggccggatcctaccttttcaagttgtgttcctgatccccctgtgatctcggaagagaaagggccctgttaccgacttgtcagttctggaagacagtgtatgcaccctctgtctgttcacctcaccaagcagctctgctgttgtagtgtgggcaaggcctggggcccacactgtgagaaatgtccccttccaggcacagccaaggaagagccagtggaggccctgaccttctcccgggaacacgggccaggagtggcggagccagaagtggcaactgcaccccctgaaaaggaaataccttcattggatcaagagaaaaccaaacttgagcctggtcaaccccagctgtctccaggcatttccactattcatctgcatccacagtttccagtagtgattgaaaaaacatcacctcctgtgcctgttgaagtagctcctgaagcttctacgtctagtgccagccaagtgattgctcctactcaagtgacagaaatcaatgaatgtactgtgaaccctgatatctgtggagcaggacactgcattaacctaccagtgagatatacctgtatatgctacgagggctacaggttcagtgaacaacagaggaaatgtgtggatattgatgagtgtactcaggtccaacacctctgctcccagggccgctgtgaaaacaccgagggaagtttcttgtgcatttgcccagcaggatttatggccagtgaggagggtactaactgcatagatgttgacgaatgcctgaggccggacgtctgtggggaggggcactgtgtcaatactgtgggggccttccggtgtgaatactgtgacagcgggtaccgcatgactcagagaggccgttgtgaggatattgatgaatgtttgaatccaagcacttgtccagatgagcagtgtgtgaattctcctggatcttaccagtgcgttccctgcacagaaggattccgaggctggaatggacagtgccttgatgtggacgagtgcctggaaccaaacgtctgcgcaaatggtgattgttccaaccttgaaggctcctacatgtgttcatgccacaaaggctatacccggactccggaccacaagcactgtagagatattgatgaatgtcagcaagggaatctatgtgtaaacgggcagtgcaaaaataccgagggctccttcaggtgcacctgtggacaggggtaccagctgtcggcagctaaagaccagtgtgaagacattgatgaatgccagcaccgtcatctctgtgctcatgggcagtgcaggaacactgagggctcttttcaatgtgtgtgtgaccagggttacagagcatctgggcttggagaccactgtgaagatatcaatgaatgcttggaggacaagagtgtttgccagagaggagactgcattaatactgcagggtcctatgattgtacttgtccggatggatttcagctagatgacaataaaacatgtcaagatattaatgaatgtgaacatccagggctctgtggtccgcaaggggagtgcctaaacacagagggttctttccattgtgtctgccagcagggtttctcaatctctgcagatggccgtacgtgtgaagatattgatgaatgtgtaaacaacactgtttgtgacagtcacgggttttgtgacaatacagctggctccttccgctgcctctgttatcagggctttcaagccccacaggatgggcaagggtgtgtggatgtgaatgaatgtgaactgctcagtggggtgtgtggtgaagccttctgtgaaaacgtggaagggtccttcctgtgcgtgtgtgctgatgaaaaccaagagtacagccccatgactgggcagtgccgctcccggacctccacagatttagatgtagatgtagatcaacccaaagaagaaaagaaagaatgctactataatctcaatgacgccagtctctgtgataatgtgttggcccccaatgtcacgaaacaagaatgctgctgtacatcaggcgtgggatggggagataactgcgaaatcttcccctgcccggtcttgggaactgctgagttcactgaaatgtgtcccaaagggaaaggttttgtgcctgctggagaatcatcttctgaagctggtggtgagaactataaagatgcagatgaatgcctactttttggacaagaaatctgcaaaaatggtttctgtttgaacactcggcctgggtatgaatgctactgtaagcaagggacgtactatgatcctgtgaaactgcagtgctttgatatggatgaatgtcaagaccccagtagttgtattgatggccagtgtgttaatacagagggctcttacaactgcttctgtactcaccccatggtcctggatgcgtcagaaaaaagatgtatacgaccggctgagtcaaacgaacaaatagaagaaactgatgtctaccaagatttgtgctgggaacatctgagtgatgaatacgtgtgtagccggcctcttgtgggcaagcagacaacgtacactgagtgctgctgtctgtatggagaggcctggggcatgcagtgtgccctctgccccctgaaggattcagatgactatgctcagctgtgtaacatccccgtgacgggacgccggcagccatatggacgggacgccttggttgacttcagtgaacagtatactccagaagccgatccctacttcatccaagaccgttttctaaatagctttgaggagttacaggctgaggaatgcggcatcctcaatggatgtgaaaatggtcgctgtgtgagggtccaggaaggttacacctgcgattgctttgatgggtatcacttggatacggccaagatgacctgtgtcgatgtaaatgaatgcgatgagttgaacaaccggatgtctctctgcaagaatgccaagtgcattaacaccgatggttcctacaagtgtttgtgtctgccaggctacgtgccttctgacaagccaaactactgcactccgttgaataccgccttgaatttagagaaagacagtgacctggagtgaaacagaatctacataacctaagcccatatactctgcactgtgtaaaggaaaagggagaaatgtattatacttgagacattgcacctaccccggaaggctggaaatacagaaacagcatggaattgcaagtcctctgaagacaatgagaggatttaggatgagcccgataggtgtggcagaccaaatggacatttctctaaaaaaccagtatatatagtctgttcatatgtaaaattcaatggaagagaggtggaacagtgctgttattttaaacagaaggttgtattattatgttgttttgtttttttactattgcttgattaaatttggcatttaaatagtggtggaaatattttatataattttcattttttggttgtgcagttccttggctactgtttttcttttacttcagttttttaaaaatctcaaatgaaaaagtcttcgatacaatattgttaagctgtattataagtattgttacacagggttatgcaattcccggcctggagcatttttgaaattcaaattgtctgtcctgtggagcaggcagtgattttgttccaaaactttgtatacacatttggagaaaagtactttatattttcagtgttttgtctgattttaatgtccgttcttagccaagctgctagcaggtgttaattggatccctttccttcactgaaatggaagagtttataagcttacgttagtattgtaatatgtaaagtaagcccaacaaaaatttttaaaaatttgatgatccccaatatatctaccattgtatgttaaataaatcaccatttttgtagaaaaaattctacctgagagtaattgtcaatgagtacatgtgtataagttgtatcccactctccccacttttatcttttccagtggtcttctgttaatgtagtgtcttttacaagttaatcattaaatttgttagatcttgttatgggctaaa

SEQ ID NO: 147545 - DNA, 6333 bp, Homo sapiens
  Payload ID: 9198
  Gene Symbol: LTBP1
  Gene Name: latent transforming growth factor beta binding protein 1
  Uniprot ID: Q14766
  ENST ID: ENST00000404816
  CDS Start-End: 354-5519
cgctcgctctcggccaccctcgccgggccccgctgcggcgcgcgctgcaacccccggccggacgcgcggaccctcaccttgcgcggcccgctcccctcgcccctccccgctccccgggctccgcgctccccacccccacgccctcctcctgctcccagccacaatcggccggggtctggggccgctcagctgcccgcagagcctcctccctcgccaccgacttggtctcctcccgcctttcccgggctctcggcagctctcgggggagcccgaacgcgcggggaaaggcgagccgcacggccgggggagggggccggaccgcgcgcgaccggtcgcgcccgctggggcccgcgatggcgggggcctggctcaggtgggggctcctgctctgggcagggctcctcgcgtcctcggcgcacggccggctgcggaggatcacctacgtggtgcacccgggccccggcctggcagccggcgccttgcccctgagcgggcccccgcgttcgcggacattcaacgtcgcgctcaacgccaggtacagccgcagctcggcggctgccggcgcccccagccgtgcctcccccggggtcccctcggagaggacccggcgcacgagcaagccgggcggcgcggccctgcaggggctcagaccgccgccgccgccgccgccggagcctgcgcgtcccgcggtccccggcgggcagctccaccccaatcccggcggccacccggcagccgccccgttcaccaaacaaggcaggcaagttgtgcgctccaaggtgccgcaggagacccagagcggcggaggctctaggctgcaggttcaccagaagcagcagctgcagggggtcaatgtctgtggagggcggtgctgtcatggctggagtaaggcccctggctcccagaggtgcaccaaacctagctgtgttccgccatgtcagaatggagggatgtgtctccggccacaactctgtgtgtgtaaaccagggaccaagggcaaagcctgtgaaacaatagctgcccaggacacctcgtcaccagtctttggagggcagagtcctggggctgcttcctcgtggggccctcctgagcaagcagcaaagcatacttcatctaagaaggcagacactctaccaagagtcagccctgtggcccagatgaccttaaccctcaagccgaagccttcagtgggactcccccagcagatacattctcaagtgactcctctttcttcccagagtgtggtgattcaccatggccagacccaggaatacgtgctcaagcccaagtactttccagcccagaaggggatttcaggagagcagtccactgaaggttctttccctttaagatatgtgcaggatcaagttgcggcaccttttcagctgagtaaccacactggccgcatcaaggtggtctttactccgagcatctgtaaagtgacctgcaccaagggcagctgtcagaacagctgtgagaaggggaacaccaccactctcattagtgagaatggtcatgctgccgacaccctgacggccacgaacttccgagtggtaatttgccatcttccatgtatgaatggtggccagtgcagttcaagggacaaatgtcagtgccctccaaatttcacaggaaaactttgtcagatcccagtccatggtgccagcgtgcctaaactttatcagcattcccagcagccaggcaaggcgttggggacgcatgtcatccattcaacacataccttgcctctgaccgtgactagccagcaaggagtcaaagtgaaatttcctcctaacatagtcaatatccatgtgaaacatcctcctgaagcttccgtccagatacatcaggtttcaagaattgatggcccaacaggccagaagacaaaagaagctcaaccaggccaatcccaagtctcgtaccaagggcttcctgtccagaagacccagaccatacattccacatactcccaccagcaggtcattcctcacgtctaccccgtggctgctaagacacagcttggccggtgcttccaggaaaccattgggtcacagtgtggcaaagcgctccctggcctttcaaagcaagaggactgctgtggaactgtgggtacctcctggggctttaacaaatgccagaaatgccccaagaaaccatcttatcatggatacaaccaaatgatggaatgcctaccgggttataagcgggttaacaacaccttttgccaagatattaatgaatgtcagctacaaggtgtatgccctaatggtgagtgtttgaataccatgggcagctatcgatgtacctgcaaaataggatttgggccggatcctaccttttcaagttgtgttcctgatccccctgtgatctcggaagagaaagggccctgttaccgacttgtcagttctggaagacagtgtatgcaccctctgtctgttcacctcaccaagcagctctgctgttgtagtgtgggcaaggcctggggcccacactgtgagaaatgtccccttccaggcacagctgcttttaaggaaatctgtcctggtggaatgggttatacggtttctggcgttcatagacgcaggccaatccatcaccatgtaggtaaaggacctgtatttgtcaagccaaagaacactcaacctgttgctaaaagtactcatcctccacctctcccagccaaggaagagccagtggaggccctgaccttctcccgggaacacgggccaggagtggcggagccagaagtggcaactgcaccccctgaaaaggaaataccttcattggatcaagagaaaaccaaacttgagcctggtcaaccccagctgtctccaggcatttccactattcatctgcatccacagtttccagtagtgattgaaaaaacatcacctcctgtgcctgttgaagtagctcctgaagcttctacgtctagtgccagccaagtgattgctcctactcaagtgacagaaatcaatgaatgtactgtgaaccctgatatctgtggagcaggacactgcattaacctaccagtgagatatacctgtatatgctacgagggctacaggttcagtgaacaacagaggaaatgtgtggatattgatgagtgtactcaggtccaacacctctgctcccagggccgctgtgaaaacaccgagggaagtttcttgtgcatttgcccagcaggatttatggccagtgaggagggtactaactgcatagatgttgacgaatgcctgaggccggacgtctgtggggaggggcactgtgtcaatactgtgggggccttccggtgtgaatactgtgacagcgggtaccgcatgactcagagaggccgttgtgaggatattgatgaatgtttgaatccaagcacttgtccagatgagcagtgtgtgaattctcctggatcttaccagtgcgttccctgcacagaaggattccgaggctggaatggacagtgccttgatgtggacgagtgcctggaaccaaacgtctgcgcaaatggtgattgttccaaccttgaaggctcctacatgtgttcatgccacaaaggctatacccggactccggaccacaagcactgtagagatattgatgaatgtcagcaagggaatctatgtgtaaacgggcagtgcaaaaataccgagggctccttcaggtgcacctgtggacaggggtaccagctgtcggcagctaaagaccagtgtgaagacattgatgaatgccagcaccgtcatctctgtgctcatgggcagtgcaggaacactgagggctcttttcaatgtgtgtgtgaccagggttacagagcatctgggcttggagaccactgtgaagatatcaatgaatgcttggaggacaagagtgtttgccagagaggagactgcattaatactgcagggtcctatgattgtacttgtccggatggatttcagctagatgacaataaaacatgtcaagatattaatgaatgtgaacatccagggctctgtggtccgcaaggggagtgcctaaacacagagggttctttccattgtgtctgccagcagggtttctcaatctctgcagatggccgtacgtgtgaagatattgatgaatgtgtaaacaacactgtttgtgacagtcacgggttttgtgacaatacagctggctccttccgctgcctctgttatcagggctttcaagccccacaggatgggcaagggtgtgtggatgtgaatgaatgtgaactgctcagtggggtgtgtggtgaagccttctgtgaaaacgtggaagggtccttcctgtgcgtgtgtgctgatgaaaaccaagagtacagccccatgactgggcagtgccgctcccggacctccacagatttagatgtagatgtagatcaacccaaagaagaaaagaaagaatgctactataatctcaatgacgccagtctctgtgataatgtgttggcccccaatgtcacgaaacaagaatgctgctgtacatcaggcgtgggatggggagataactgcgaaatcttcccctgcccggtcttgggaactgctgagttcactgaaatgtgtcccaaagggaaaggttttgtgcctgctggagaatcatcttctgaagctggtggtgagaactataaagatgcagatgaatgcctactttttggacaagaaatctgcaaaaatggtttctgtttgaacactcggcctgggtatgaatgctactgtaagcaagggacgtactatgatcctgtgaaactgcagtgctttgatatggatgaatgtcaagaccccagtagttgtattgatggccagtgtgttaatacagagggctcttacaactgcttctgtactcaccccatggtcctggatgcgtcagaaaaaagatgtatacgaccggctgagtcaaacgaacaaatagaagaaactgatgtctaccaagatttgtgctgggaacatctgagtgatgaatacgtgtgtagccggcctcttgtgggcaagcagacaacgtacactgagtgctgctgtctgtatggagaggcctggggcatgcagtgtgccctctgccccctgaaggattcagatgactatgctcagctgtgtaacatccccgtgacgggacgccggcagccatatggacgggacgccttggttgacttcagtgaacagtatactccagaagccgatccctacttcatccaagaccgttttctaaatagctttgaggagttacaggctgaggaatgcggcatcctcaatggatgtgaaaatggtcgctgtgtgagggtccaggaaggttacacctgcgattgctttgatgggtatcacttggatacggccaagatgacctgtgtcgatgtaaatgaatgcgatgagttgaacaaccggatgtctctctgcaagaatgccaagtgcattaacaccgatggttcctacaagtgtttgtgtctgccaggctacgtgccttctgacaagccaaactactgcactccgttgaataccgccttgaatttagagaaagacagtgacctggagtgaaacagaatctacataacctaagcccatatactctgcactgtgtaaaggaaaagggagaaatgtattatacttgagacattgcacctaccccggaaggctggaaatacagaaacagcatggaattgcaagtcctctgaagacaatgagaggatttaggatgagcccgataggtgtggcagaccaaatggacatttctctaaaaaaccagtatatatagtctgttcatatgtaaaattcaatggaagagaggtggaacagtgctgttattttaaacagaaggttgtattattatgttgttttgtttttttactattgcttgattaaatttggcatttaaatagtggtggaaatattttatataattttcattttttggttgtgcagttccttggctactgtttttcttttacttcagttttttaaaaatctcaaatgaaaaagtcttcgatacaatattgttaagctgtattataagtattgttacacagggttatgcaattcccggcctggagcatttttgaaattcaaattgtctgtcctgtggagcaggcagtgattttgttccaaaactttgtatacacatttggagaaaagtactttatattttcagtgttttgtctgattttaatgtccgttcttagccaagctgctagcaggtgttaattggatccctttccttcactgaaatggaagagtttataagcttacgttagtattgtaatatgtaaagtaagcccaacaaaaatttttaaaaatttgatgatccccaatatatctaccattgtatgttaaataaatcaccatttttgtagaa

SEQ ID NO: 147546 - DNA, 799 bp, Homo sapiens
  Payload ID: 9198
  Gene Symbol: LTBP1
  Gene Name: latent transforming growth factor beta binding protein 1
  ENST ID: ENST00000415140
  CDS Start-End: 1-799
gaggccgttgtgaggatattgatgaatgtttgaatccaagcacttgtccagatgagcagtgtgtgaattctcctggatcttaccagtgcgttccctgcacagaaggattccgaggctggaatggacagtgccttgatattgatgaatgtcagcaagggaatctatgtgtaaacgggcagtgcaaaaataccgagggctccttcaggtgcacctgtggacaggggtaccagctgtcggcagctaaagaccagtgtgaagacattgatgaatgccagcaccgtcatctctgtgctcatgggcagtgcaggaacactgagggctcttttcaatgtgtgtgtgaccagggttacagagcatctgggcttggagaccactgtgaagatatcaatgaatgcttggaggacaagagtgtttgccagagaggagactgcattaatactgcagggtcctatgattgtacttgtccggatggatttcagctagatgacaataaaacatgtcaagatattaatgaatgtgaacatccagggctctgtggtccgcaaggggagtgcctaaacacagagggttctttccattgtgtctgccagcagggtttctcaatctctgcagatggccgtacgtgtgaagatattgatgaatgtgtaaacaacactgtttgtgacagtcacgggttttgtgacaatacagctggctccttccgctgcctctgttatcagggctttcaagccccacaggatgggcaagggtgtgtggatgtgaatgaatgtgaactgctcagtggggtgtgtggtgaagc

SEQ ID NO: 147547 - DNA, 5164 bp, Homo sapiens
  Payload ID: 9198
  Gene Symbol: LTBP1
  Gene Name: latent transforming growth factor beta binding protein 1
  ENST ID: ENST00000418533
  CDS Start-End: 142-4203
gagacaccactgaatacagagcagcgagcactgaaggcttccctctttccttaaacctgtcgggttgtgggctctctcttttcccctcttgctcctttcttttctttttttctgtttttttaaaccttccaaggcaagttcatggatactaagctgatgtgtttgttgttctttttctccctgcctccgctcctagtgagtaaccacactggccgcatcaaggtggtctttactccgagcatctgtaaagtgacctgcaccaagggcagctgtcagaacagctgtgagaaggggaacaccaccactctcattagtgagaatggtcatgctgccgacaccctgacggccacgaacttccgagtggtaatttgccatcttccatgtatgaatggtggccagtgcagttcaagggacaaatgtcagtgccctccaaatttcacaggaaaactttgtcagatcccagtccatggtgccagcgtgcctaaactttatcagcattcccagcagccaggcaaggcgttggggacgcatgtcatccattcaacacataccttgcctctgaccgtgactagccagcaaggagtcaaagtgaaatttcctcctaacatagtcaatatccatgtgaaacatcctcctgaagcttccgtccagatacatcaggtttcaagaattgatggcccaacaggccagaagacaaaagaagctcaaccaggccaatcccaagtctcgtaccaagggcttcctgtccagaagacccagaccatacattccacatactcccaccagcaggtcattcctcacgtctaccccgtggctgctaagacacagcttggccggtgcttccaggaaaccattgggtcacagtgtggcaaagcgctccctggcctttcaaagcaagaggactgctgtggaactgtgggtacctcctggggctttaacaaatgccagaaatgccccaagaaaccatcttatcatggatacaaccaaatgatggaatgcctaccgggttataagcgggttaacaacaccttttgccaagatattaatgaatgtcagctacaaggtgtatgccctaatggtgagtgtttgaataccatgggcagctatcgatgtacctgcaaaataggatttgggccggatcctaccttttcaagttgtgttcctgatccccctgtgatctcggaagagaaagggccctgttaccgacttgtcagttctggaagacagtgtatgcaccctctgtctgttcacctcaccaagcagctctgctgttgtagtgtgggcaaggcctggggcccacactgtgagaaatgtccccttccaggcacagctgcttttaaggaaatctgtcctggtggaatgggttatacggtttctggcgttcatagacgcaggccaatccatcaccatgtaggtaaaggacctgtatttgtcaagccaaagaacactcaacctgttgctaaaagtactcatcctccacctctcccagccaaggaagagccagtggaggccctgaccttctcccgggaacacgggccaggagtggcggagccagaagtggcaactgcaccccctgaaaaggaaataccttcattggatcaagagaaaaccaaacttgagcctggtcaaccccagctgtctccaggcatttccactattcatctgcatccacagtttccagtagtgattgaaaaaacatcacctcctgtgcctgttgaagtagctcctgaagcttctacgtctagtgccagccaagtgattgctcctactcaagtgacagaaatcaatgaatgtactgtgaaccctgatatctgtggagcaggacactgcattaacctaccagtgagatatacctgtatatgctacgagggctacaggttcagtgaacaacagaggaaatgtgtggatattgatgagtgtactcaggtccaacacctctgctcccagggccgctgtgaaaacaccgagggaagtttcttgtgcatttgcccagcaggatttatggccagtgaggagggtactaactgcatagatgttgacgaatgcctgaggccggacgtctgtggggaggggcactgtgtcaatactgtgggggccttccggtgtgaatactgtgacagcgggtaccgcatgactcagagaggccgttgtgaggatattgatgaatgtttgaatccaagcacttgtccagatgagcagtgtgtgaattctcctggatcttaccagtgcgttccctgcacagaaggattccgaggctggaatggacagtgccttgatgtggacgagtgcctggaaccaaacgtctgcgcaaatggtgattgttccaaccttgaaggctcctacatgtgttcatgccacaaaggctatacccggactccggaccacaagcactgtagagatattgatgaatgtcagcaagggaatctatgtgtaaacgggcagtgcaaaaataccgagggctccttcaggtgcacctgtggacaggggtaccagctgtcggcagctaaagaccagtgtgaagacattgatgaatgccagcaccgtcatctctgtgctcatgggcagtgcaggaacactgagggctcttttcaatgtgtgtgtgaccagggttacagagcatctgggcttggagaccactgtgaagatatcaatgaatgcttggaggacaagagtgtttgccagagaggagactgcattaatactgcagggtcctatgattgtacttgtccggatggatttcagctagatgacaataaaacatgtcaagatattaatgaatgtgaacatccagggctctgtggtccgcaaggggagtgcctaaacacagagggttctttccattgtgtctgccagcagggtttctcaatctctgcagatggccgtacgtgtgaagatgtgaatgaatgtgaactgctcagtggggtgtgtggtgaagccttctgtgaaaacgtggaagggtccttcctgtgcgtgtgtgctgatgaaaaccaagagtacagccccatgactgggcagtgccgctcccggacctccacagatttagatgtagatgtagatcaacccaaagaagaaaagaaagaatgctactataatctcaatgacgccagtctctgtgataatgtgttggcccccaatgtcacgaaacaagaatgctgctgtacatcaggcgtgggatggggagataactgcgaaatcttcccctgcccggtcttgggaactgctgagttcactgaaatgtgtcccaaagggaaaggttttgtgcctgctggagaatcatcttctgaagctggtggtgagaactataaagatgcagatgaatgcctactttttggacaagaaatctgcaaaaatggtttctgtttgaacactcggcctgggtatgaatgctactgtaagcaagggacgtactatgatcctgtgaaactgcagtgctttgatatggatgaatgtcaagaccccagtagttgtattgatggccagtgtgttaatacagagggctcttacaactgcttctgtactcaccccatggtcctggatgcgtcagaaaaaagatgtatacgaccggctgagtcaaacgaacaaatagaagaaactgatgtctaccaagatttgtgctgggaacatctgagtgatgaatacgtgtgtagccggcctcttgtgggcaagcagacaacgtacactgagtgctgctgtctgtatggagaggcctggggcatgcagtgtgccctctgccccctgaaggattcagatgactatgctcagctgtgtaacatccccgtgacgggacgccggcagccatatggacgggacgccttggttgacttcagtgaacagtatactccagaagccgatccctacttcatccaagaccgttttctaaatagctttgaggagttacaggctgaggaatgcggcatcctcaatggatgtgaaaatggtcgctgtgtgagggtccaggaaggttacacctgcgattgctttgatgggtatcacttggatacggccaagatgacctgtgtcgatgtaaatgaatgcgatgagttgaacaaccggatgtctctctgcaagaatgccaagtgcattaacaccgatggttcctacaagtgtttgtgtctgccaggctacgtgccttctgacaagccaaactactgcactccgttgaataccgccttgaatttagagaaagacagtgacctggagtgaaacagaatctacataacctaagcccatatactctgcactgtgtaaaggaaaagggagaaatgtattatacttgagacattgcacctaccccggaaggctggaaatacagaaacagcatggaattgcaagtcctctgaagacaatgagaggatttaggatgagcccgataggtgtggcagaccaaatggacatttctctaaaaaaccagtatatatagtctgttcatatgtaaaattcaatggaagagaggtggaacagtgctgttattttaaacagaaggttgtattattatgttgttttgtttttttactattgcttgattaaatttggcatttaaatagtggtggaaatattttatataattttcattttttggttgtgcagttccttggctactgtttttcttttacttcagttttttaaaaatctcaaatgaaaaagtcttcgatacaatattgttaagctgtattataagtattgttacacagggttatgcaattcccggcctggagcatttttgaaattcaaattgtctgtcctgtggagcaggcagtgattttgttccaaaactttgtatacacatttggagaaaagtactttatattttcagtgttttgtctgattttaatgtccgttcttagccaagctgctagcaggtgttaattggatccctttccttcactgaaatggaagagtttataagcttacgttagtattgtaatatgtaaagtaagcccaacaaaaatttttaaaaatttgatgatccccaatatatctaccattgtatgttaaataaatcaccatttttgtagaaaaaattctacctgagagtaattgtcaatgagtacatgtgtataagttgtatcccactctccccacttttatcttttccagtggtcttctgttaatgtagtgtcttttacaagttaatcattaaatttgttagatcttgttatgggct

SEQ ID NO: 147548 - DNA, 810 bp, Homo sapiens
  Payload ID: 9198
  Gene Symbol: LTBP1
  Gene Name: latent transforming growth factor beta binding protein 1
  ENST ID: ENST00000422669
  CDS Start-End: 1-810
gaatgccagcaccgtcatctctgtgctcatgggcagtgcaggaacactgagggctcttttcaatgtgtgtgtgaccagggttacagagcatctgggcttggagaccactgtgaagatatcaatgaatgcttggaggacaagagtgtttgccagagaggagactgcattaatactgcagggtcctatgattgtacttgtccggatggatttcagctagatgacaataaaacatgtcaagatattaatgaatgtgaacatccagggctctgtggtccgcaaggggagtgcctaaacacagagggttctttccattgtgtctgccagcagggtttctcaatctctgcagatggccgtacgtgtgaagatgtgaatgaatgtgaactgctcagtggggtgtgtggtgaagccttctgtgaaaacgtggaagggtccttcctgtgcgtgtgtgctgatgaaaaccaagagtacagccccatgactgggcagtgccgctcccggacctccacagatttagatgtagatgtagatcaacccaaagaagaaaagaaagaatgctactataatctcaatgacgccagtctctgtgataatgtgttggcccccaatgtcacgaaacaagaatgctgctgtacatcaggcgtgggatggggagataactgcgaaatcttcccctgcccggtcttgggaactgctgagttcactgaaatgtgtcccaaagggaaaggttttgtgcctgctggagaatcatcttctgaagctggtggtgagaactataaagatgcagatgaatgcctactttttggacaagaa

SEQ ID NO: 147549 - DNA, 593 bp, Homo sapiens
  Payload ID: 9198
  Gene Symbol: LTBP1
  Gene Name: latent transforming growth factor beta binding protein 1
  ENST ID: ENST00000432635
  CDS Start-End: 289-593
aacccctttgcattacatctgcctgtcagggttggctctttaatctgtcgtgccctcggtattgctctttgtctgcccgtgaataaagtgcagcattgtgtgagtaaccacactggccgcatcaaggtggtctttactccgagcatctgtaaagtgacctgcaccaagggcagctgtcagaacagctgtgagaaggggaacaccaccactctcattagtgagaatggtcatgctgccgacaccctgacggccacgaacttccgagtggtaatttgccatcttccatgtatgaatggtggccagtgcagttcaagggacaaatgtcagtgccctccaaatttcacaggaaaactttgtcagatcccagtccatggtgccagcgtgcctaaactttatcagcattcccagcagccaggcaaggcgttggggacgcatgtcatccattcaacacataccttgcctctgaccgtgactagccagcaaggagtcaaagtgaaatttcctcctaacatagtcaatatccatgtgaaacatcctcctgaagcttccgtccagatacatcaggtttcaagaattgatggcccaacaggcca

SEQ ID NO: 147550 - DNA, 713 bp, Homo sapiens
  Payload ID: 9198
  Gene Symbol: LTBP1
  Gene Name: latent transforming growth factor beta binding protein 1
  ENST ID: ENST00000413303
  CDS Start-End: 57-713
atattaatgaatgtcagctacaaggtgtatgccctaatggtgagtgtttgaataccatgggcagctatcgatgtacctgcaaaataggatttgggccggatcctaccttttcaagttgtgttcctgatccccctgtgatctcggaagagaaagggccctgttaccgacttgtcagttctggaagacagtgtatgcaccctctgtctgttcacctcaccaagcagctctgctgttgtagtgtgggcaaggcctggggcccacactgtgagaaatgtccccttccaggcacaggtaaaggacctgtatttgtcaagccaaagaacactcaacctgttgctaaaagtactcatcctccacctctcccagccaaggaagagccagtggaggccctgaccttctcccgggaacacgggccaggagtggcggagccagaagtggcaactgcaccccctgaaaaggaaataccttcattggatcaagagaaaaccaaacttgagcctggtcaaccccagctgtctccaggcatttccactattcatctgcatccacagtttccagtagtgattgaaaaaacatcacctcctgtgcctgttgaagtagctcctgaagcttctacgtctagtgccagccaagtgattgctcctactcaagtgacagaaatcaatgaatgtactgtgaaccctgatatctgtggagcaggacactgcattaac

SEQ ID NO: 147551 - DNA, 662 bp, Homo sapiens
  Payload ID: 9198
  Gene Symbol: LTBP1
  Gene Name: latent transforming growth factor beta binding protein 1
  ENST ID: ENST00000468091
  CDS Start-End: 1-662
agttctggaagacagtgtatgcaccctctgtctgttcacctcaccaagcagctctgctgttgtagtgtgggcaaggcctggggcccacactgtgagaaatgtccccttccaggcacagctgcttttaaggaaatctgtcctggtggaatgggttatacggtttctggcgttcatagacgcaggccaatccatcaccatgtaggtaaaggacctgtatttgtcaagccaaagaacactcaacctgttgctaaaagtactcatcctccacctctcccagccaaggaagagccagtggaggccctgaccttctcccgggaacacgggccaggagtggcggagccagaagtggcaactgcaccccctgaaaaggaaataccttcattggatcaagagaaaaccaaacttgagcctggtcaaccccagctgtctccaggcatttccactattcatctgcatccacagtttccaggtatagtgattgaaaaaacatcacctcctgtgcctgttgaagtagctcctgaagcttctacgtctagtgccagccaagtgattgctcctactcaagtgacagaaatcaatgaatgtactgtgaaccctgatatctgtggagcaggacactgcattaacctaccagtgagatatacctgtatatgctacgaggg

SEQ ID NO: 147552 - DNA, 8567 bp, Homo sapiens
  Payload ID: 9199
  Gene Symbol: LTBP2
  Gene Name: latent transforming growth factor beta binding protein 2
  Uniprot ID: Q14767
  ENST ID: ENST00000261978
  CDS Start-End: 388-5853
cctcgctccctctccggtaatgagggggctgagctgtccctccgaggagggggcctggtgtggataaaagagacgaaaaagccgggggaggtttccaaaaataaaaccgtccgggtccccttcagacggctgcaggcacagggaggaggcgcgaaggtgcagcagccgtgcgagcccagctggagtaggagcgcggactcgaggctcggggcgcgcagccctcgttccgccgagagccgggcccccagtcggccgcttcagggccccctagactcagagaagctggccgccgggcggggccgggagaacagcccgcgggcgtccagcgtgccgaccacaaagctcttcgcggtgcccgcgcgcaccactctccagccgccccgcgccatgaggccgcggaccaaagcccgcagcccggggcgcgccctgcggaacccctggagaggcttcctgccgctcaccctggctctcttcgtgggcgcgggtcatgcccaaagggaccccgtagggagatacgagccggctggtggagacgcgaatcgactgcggcgccctgggggcagctacccggcagcggctgcagccaaggtgtacagtctgttccgggagcaggacgcgcctgtcgcgggcttgcagcccgtggagcgggcccagccgggctgggggagccccaggaggcccaccgaggcggaggccaggaggccgtcccgcgcgcagcagtcgcggcgtgtccagccacctgcgcagacccggagaagcactcccctgggccagcagcaaccagcaccccggacccgggccgcgccggctctcccacgcctggggaccccacagcggtctggggctgcgcccccaaccccgccgcgagggcggctcacggggaggaacgtctgcgggggacagtgctgcccaggatggacaacagcaaacagcaccaaccactgtatcaaacccgtttgcgagccgccgtgccagaaccggggctcctgcagccgcccgcagctctgtgtctgccgctctggtttccgtggagcccgctgcgaggaggtcattcccgatgaggaatttgacccccagaactccaggctggcacctcgacgctgggccgagcgttcacccaacctgcgcaggagcagtgcggctggagagggcaccttggccagagcacagccgccagcaccacagtcgccgcccgcaccacagtcgccaccagctgggaccctgagtggcctcagccagacccacccttcccagcagcacgtggggttgtcccgcactgtccgacttcacccgactgccacggccagtagccagctctcttccaacgccctgcccccgggaccaggccttgagcagagagatggcacccaacaggcggtacctctggagcacccctcatccccctgggggctgaacctcacggagaaaatcaagaagatcaagatcgtcttcactcccaccatctgcaagcagacctgtgcccgtggacactgtgccaacagctgtgagaggggcgacaccaccaccctgtacagccagggcggccatgggcacgatcccaagtctggcttccgcatctatttctgccagatcccctgcctgaacggaggccgctgcatcggcagggacgaatgctggtgccccgccaactccaccgggaagttctgccacctgcctatcccgcagccggacagggagcctccagggagggggtcccgccccagggccttgctggaagccccactgaagcagtccactttcacactgccgctctccaaccagctggcctccgtgaacccctccctggtgaaggtgcacattcaccacccacccgaggcctcagtgcagatccaccaggtggcccaggtgcggggcggggtggaggaggccctagtggagaacagcgtggagaccagacccccgccctggctgcctgccagccctggccacagcctctgggacagcaacaacatccctgctcggtctggagagccccctcggccactgcccccagcagcacccaggcctcgaggactgctgggccggtgttacctgaacactgtgaacggacagtgtgccaaccctctgctggagctgactacccaggaggactgctgtggcagtgtgggagccttctggggggtgactttgtgtgccccatgcccacccagaccagcctccccggtgattgagaatggccagctggagtgtcctcaggggtacaagagactgaacctcactcactgccaagatatcaacgagtgcttgaccctgggcctgtgcaaggacgcggagtgtgtgaataccaggggcagctacctgtgcacatgcagacctggcctcatgctggatccatcgcggagccgctgtgtgtcggacaaggcaatctccatgctgcagggactgtgctaccggtcgctggggcccggcacctgcaccctgcctttggcccagcggatcaccaagcagatatgctgctgcagccgcgtgggcaaagcatggggcagcgagtgtgagaaatgccctctgcctggcacagaggccttcagagagatctgccctgccggccacggctacacctacgcgagctccgacatccgcctgtccatgaggaaagccgaggaggaggaactggcaaggcccccaagggagcaagggcagaggagcagcggggcactgcccgggccagcagagaggcagcccctccgggtcgtcacggacacctggcttgaggccgggaccatccctgacaagggtgactctcaggctggccaggtcacgaccagtgtcactcatgcacctgcctgggtcacagggaatgccacaaccccaccaatgcctgaacaggggattgcagagatacaggaagaacaagtgaccccctccactgatgtgctggtgaccctgagcaccccaggcattgacagatgcgctgctggagccaccaacgtctgtggccctggaacctgcgtgaacctccccgatggatacagatgtgtctgcagccctggctaccagctgcaccccagccaggcctactgcacagatgacaacgagtgtctgagggacccctgcaagggaaaagggcgctgcatcaaccgcgtggggtcctactcctgcttctgctaccctggctacactctggccacctcaggggcgacacaggagtgtcaagatatcaatgagtgtgagcagccaggggtgtgcagcggggggcagtgcaccaacaccgagggctcgtaccactgcgagtgtgatcagggctacatcatggtcaggaaaggacactgccaagatatcaacgaatgccgtcaccccggtacctgccctgatgggagatgcgtcaattcccctggctcctacacttgtctggcctgtgaggagggctaccggggccagagtgggagctgtgtagatgtgaatgagtgtctgactcccggggtctgtgcccatggaaagtgcaccaacctagaaggctccttcagatgctcttgtgagcagggctatgaggtcacctcagatgagaagggctgccaagatgtggatgagtgtgccagccgggcctcatgccccacaggcctctgcctcaacacggagggctccttcgcctgctctgcctgtgagaacgggtactgggtgaatgaagacggcactgcctgtgaagacctagatgagtgtgccttcccgggagtctgcccctccggagtctgcaccaacacggctggctccttctcctgcaaggactgcgatgggggctaccggcccagccccctgggtgactcctgtgaagatgtggatgaatgtgaagacccccagagcagctgcctgggaggcgagtgcaagaacactgtgggctcctaccagtgcctctgtccccagggcttccagctggccaatggcaccgtgtgtgaggatgtgaatgagtgcatgggggaggagcactgcgcaccccacggcgagtgcctcaacagccacgggtctttcttctgtctgtgcgcgcctggcttcgtcagcgcagaggggggcaccagctgccaggatgtggacgagtgtgccaccacagacccgtgtgtgggagggcactgtgtcaacaccgagggctccttcaactgtctatgtgagactggcttccagccctccccagagagtggagagtgtgtggatattgacgagtgtgaggactatggagacccggtgtgtggcacctggaagtgtgaaaacagccctggctcctaccgctgtgttctgggctgccagcctggcttccacatggccccgaacggagactgcattgacatagacgagtgcgccaacgacaccatgtgtggcagccacggcttctgtgacaacactgatggctccttccgctgcctctgtgaccagggcttcgagatctctccctcaggctgggactgtgtggatgtgaacgagtgtgagcttatgctggcggtatgtggggccgcgctctgtgagaacgtggagggctccttcctgtgcctctgtgccagtgacctggaggagtacgatgcccaggaggggcactgccgcccacggggggctggaggtcagagtatgtctgaggccccaacgggggaccatgccccggcccccacccgcatggactgctactccgggcagaagggccatgcgccctgctccagtgtcctgggccggaacaccacacaggctgaatgctgctgcacccagggcgctagctggggagatgcctgtgacctctgcccgtctgaggactcagctgaattcagcgagatctgccctagtggaaaaggctacattcctgtggaaggagcctggacgtttggacagaccatgtacacagatgcggatgagtgtgtgatattcgggcctggtctctgcccgaacggccggtgcctcaacaccgtgcctggttatgtctgcctgtgcaatcccggcttccactacgatgcttcccacaagaagtgtgaggatcacgatgagtgccaggacctggcctgtgagaatggcgagtgcgtcaacacggagggctccttccactgcttctgcagccccccgctcaccctggacctcagccagcagcgctgcatgaacagcaccagcagcacggaggacctccctgaccacgacatccacatggacatctgctggaaaaaagtcaccaatgatgtgtgcagcgaacccctgcgtgggcaccgcaccacctacacggaatgctgctgccaggacggcgaggcctggagccagcagtgtgctctgtgtcccccgaggagctctgaggtctatgctcagctgtgcaacgtggctcgcattgaggcagagcgggaggccggggtccacttccggccaggctatgagtatggccccgggcccgatgacctgcactacagcatctatggcccagatggggcccccttctacaactacctgggccccgaggacaccgtccctgagcctgccttccccaacacagccggtcactcagcggaccgcacacccatccttgagtctcctttgcagccctcagaactccagccccactacgtggccagccatccagagcccccagccggcttcgaagggcttcaggcggaggagtgcggcatcctgaacggctgtgagaatggccgctgtgtgcgcgtgcgggagggctacacctgtgactgttttgagggcttccagctggatgcggcccacatggcctgcgtagatgtgaatgagtgtgatgacttgaacgggcctgctgtgctctgtgtccatggttactgcgagaacacagagggctcctaccgctgccactgctccccgggatatgtggctgaggcagggcccccccactgcactgccaaggagtagcagtcaggggtcagtgtggcaactacctggaaatggcctccagtcacaggcaggggccttgaggatgatttcctagctgggaagacaccgtgacatcaggccagaggtttccaatcagccttgcctgctttcatctctcccagcttagcctctggctgtaagcttcggtcattgcctccatgcccttgcttggctcaagcaccaccaatcgctttaatgcttcagccaccgcatgaggccctgtccaccacctttcctggccttgctatgggatgcttaccaaaggatggccctcatccaccctcccaagctgtgcgagcatgcaaggccccatggcctcacactgcagacacccctttccagccacaatccaccatcatcctgacgatcccacaactgggacagaggctacatctgccctagggaggtccttcagaatctgtggagcaagaaaggatttggggaagcttggggactgactccagagccccctcctaagaaccatcaccaccactcagccaatctgttctgggccctgattttgccacacctccatcctgtagcccattctctgaccccaaggagtggcagaagatcccttcactcagagaagcaaggctgatattagcttgttgaatgtaagagacacaaatgaagaagaacaaagagcctgagaaagcagcaagaggacatgatgaaaaatacgtggagttgatgagaaaggggagccaaggctttatacgtctaaagaaaatattcagtagctgaatccgcccagtgatagcctgtgggcaccagcagcaagggctgccatgggatacagcacccatctacaaagacctctattacataaacactgcttcttacaggaaacaaacctcttctgggatctccttttgtgaaaaccagtttgatgtgctaaaagtaaaaagtctattttccagtgtggtcttgttcagaagcagccagatttccaatgttgtttttcccctccactcagaaacccctgccctttcccttcagaaaacgatggcaggcattcctctgagtttacaagcagagactcactccaacccaaactagctgggagttcagaaccatggtggaataaagaaatgtgcatctggtctcttctgttgtttttatttcatatcagattaaatttctttaccatgttggctaagtctaaatattagagatgaggctgtgcctactccctggccagctctgctgatagcctatgatgggttccaatgggaaatgactctttactattaaaagacaaggaaagctctgacttcgtacttctctgatgaatggcaatgtaaatgaacaaggctccatgtgactggagcatggaagtgaatgctactttcttaatttaatctgccctgtcctacctgctcctctgattgttagccatcacataacttattgaatgcttgccatgtgccaggcactgtgctgagtgccatacatacatttcatttaattatccaataatcctacttactattgtttattctcaatttacaggtgaggaaactgagacatagaaagcttaaataatttgctctaggtccctatactaattgagatgttttcagcagacaaaaataagtcactcttacgcatgtaaaaatattctttcactcataataaaagaaatgcaacttaaaaccatactgagatcctttttaaaactgtcagattggcaaagatcaaaaagcttgttaagactcctagctggcaagcatgtgggaaataggtactctcataacagctgacagaagtacatattgaagaggacaatatggcaatgtccttcaaaattataaaagcactaactctttgatccagtagtttccacttctaggaacttaaccttcagatatattttcaccagatataaaatgacatacgtaagaagttattactgcatcatttgtaatagctaaagattagaaacaattaattgctatggaacccttaaaaaaggtggctctaaattccttaagaaagatatccaaaacaaattaaggggaaaagggagggttgcataacagcatgtaacataacactatttgtctaaagaatggggaaagagaagcggttgtctgttcacctcatccttgccactccgccttatacctcaccatcggagaacttaccatcccccaaatatatcctgctggcactacaccttcgtaactgctgttcccactgcccccacaacactccaatctccaccttcctgccaaccttgagatattgtatgcatatatacatatttcctttgtttaaaatacaaatagcatactatgcatgctgttctgcactttgctttttttttatacttgcaattagagctgcctcatttcattttacagctgtatactattccattgaatggataaaccataatttatttaatcagtccctcactgacagacgtttccattgtttcctgtcttttgctataaataatgctgtaatgaatattcttgtgcatatttcacattaatttatgggattacatctgcaggataaattcttagaaccaatggtggtttgtggggagggtgacagggtggataggtacaggattgggagacttttcactgtatctccttttgtatttttttgaattttgtaccatatgtatcacctattcaaaaaaaataaaatatttttaaatacagttgctggccaaa

SEQ ID NO: 147553 - DNA, 699 bp, Homo sapiens
  Payload ID: 9199
  Gene Symbol: LTBP2
  Gene Name: latent transforming growth factor beta binding protein 2
  ENST ID: ENST00000556206
  CDS Start-End: 1-699
cacggagggctccttcgcctgctctgcctgtgagaacgggtactgggtgaatgaagacggcactgcctgtgaagacctagatgagtgtgccttcccgggagtctgcccctccggagtctgcaccaacacggctggctccttctcctgcaaggactgcgatgggggctaccggcccagccccctgggtgactcctgtgaagatgtggatgaatgtgaagacccccagagcagctgcctgggaggcgagtgcaagaacactgtgggctcctaccagtgcctctgtccccagggcttccagctggccaatggcaccgtgtgtgaggatgtgaatgagtgcatgggggaggagcactgcgcaccccacggcgagtgcctcaacagccacgggtctttcttctgtctgtgcgcgcctggcttcgtcagcgcagaggggggcaccagctgccaggatattgacgagtgtgaggactatggagacccggtgtgtggcacctggaagtgtgaaaacagccctggctcctaccgctgtgttctgggctgccagcctggcttccacatggccccgaacggagactgcattgacatagacgagtgcgccaacgacaccatgtgtggcagccacggcttctgtgacaacactgatggctccttccgctgcctctgtgaccagggcttcgagatctctccctcaggctggga

SEQ ID NO: 147554 - DNA, 5614 bp, Homo sapiens
  Payload ID: 9199
  Gene Symbol: LTBP2
  Gene Name: latent transforming growth factor beta binding protein 2
  ENST ID: ENST00000556690
  CDS Start-End: 129-5462
agggccccctagactcagagaagctggccgccgggcggggccgggagaacagcccgcgggcgtccagcgtgccgaccacaaagctcttcgcggtgcccgcgcgcaccactctccagccgccccgcgccatgaggccgcggaccaaagcccgcagcccggggcgcgccctgcggaacccctggagaggcttcctgccgctcaccctggctctcttcgtgggcgcgggtcatgcccaaagggaccccgtagggagatacgagccggctggtggagacgcgaatcgactgcggcgccctgggggcagctacccggcagcggctgcagccaaggtgtacagtctgttccgggagcaggacgcgcctgtcgcgggcttgcagcccgtggagcgggcccagccgggctgggggagccccaggaggcccaccgaggcggaggccaggaggccgtcccgcgcgcagcagtcgcggcgtgtccagccacctgcgcagacccggagaagcactcccctgggccagcagcaaccagcaccccggacccgggccgcgccggctctcccacgcctggggaccccacagcggtctggggctgcgcccccaaccccgccgcgagggcggctcacggggaggaacgtctgcgggggacagtgctgcccaggatggacaacagcaaacagcaccaaccactgtatcaaacccgtttgcgagccgccgtgccagaaccggggctcctgcagccgcccgcagctctgtgtctgccgctctggtttccgtggagcccgctgcgaggaggtcattcccgatgaggaatttgacccccagaactccaggctggcacctcgacgctgggccgagcgttcacccaacctgcgcaggagcagtgcggctggagagggcaccttggccagagcacagccgccagcaccacagtcgccgcccgcaccacagtcgccaccagctgggaccctgagtggcctcagccagacccacccttcccagcagcacgtggggttgtcccgcactgtccgacttcacccgactgccacggccagtagccagctctcttccaacgccctgcccccgggaccaggccttgagcagagagatggcacccaacaggcggtacctctggagcacccctcatccccctgggggctgaacctcacggagaaaatcaagaagatcaagatcgtcttcactcccaccatctgcaagcagacctgtgcccgtggacactgtgccaacagctgtgagaggggcgacaccaccaccctgtacagccagggcggccatgggcacgatcccaagtctggcttccgcatctatttctgccagatcccctgcctgaacggaggccgctgcatcggcagggacgaatgctggtgccccgccaactccaccgggaagttctgccacctgcctatcccgcagccggacagggagcctccagggagggggtcccgccccagggccttgctggaagccccactgaagcagtccactttcacactgccgctctccaaccagctggcctccgtgaacccctccctggtgaaggtgcacattcaccacccacccgaggcctcagtgcagatccaccaggtggcccaggtgcggggcggggtggaggaggccctagtggagaacagcgtggagaccagacccccgccctggctgcctgccagccctggccacagcctctgggacagcaacaacatccctgctcggtctggagagccccctcggccactgcccccagcagcacccaggcctcgaggactgctgggccggtgttacctgaacactgtgaacggacagtgtgccaaccctctgctggagctgactacccaggaggactgctgtggcagtgtgggagccttctggggggtgactttgtgtgccccatgcccacccagaccagcctccccggtgattgagaatggccagctggagtgtcctcaggggtacaagagactgaacctcactcactgccaagatatcaacgagtgcttgaccctgggcctgtgcaaggacgcggagtgtgtgaataccaggggcagctacctgtgcacatgcagacctggcctcatgctggatccatcgcggagccgctgtgtgtcggacaaggcaatctccatgctgcagggactgtgctaccggtcgctggggcccggcacctgcaccctgcctttggcccagcggatcaccaagcagatatgctgctgcagccgcgtgggcaaagcatggggcagcgagtgtgagaaatgccctctgcctggcacagaggccttcagagagatctgccctgccggccacggctacacctacgcgagctccgacatccgcctgtccatgaggaaagccgaggaggaggaactggcaaggcccccaagggagcaagggcagaggagcagcggggcactgcccgggccagcagagaggcagcccctccgggtcgtcacggacacctggcttgaggccgggaccatccctgacaagggtgactctcaggctggccaggtcacgaccagtgtcactcatgcacctgcctgggtcacagggaatgccacaaccccaccaatgcctgaacaggggattgcagagatacaggaagaacaagtgaccccctccactgatgtgctggtgaccctgagcaccccaggcattgacagatgcgctgctggagccaccaacgtctgtggccctggaacctgcgtgaacctccccgatggatacagatgtgtctgcagccctggctaccagctgcaccccagccaggcctactgcacagatgacaacgagtgtctgagggacccctgcaagggaaaagggcgctgcatcaaccgcgtggggtcctactcctgcttctgctaccctggctacactctggccacctcaggggcgacacaggagtgtcaagatatcaatgagtgtgagcagccaggggtgtgcagcggggggcagtgcaccaacaccgagggctcgtaccactgcgagtgtgatcagggctacatcatggtcaggaaaggacactgccaagatatcaacgaatgccgtcaccccggtacctgccctgatgggagatgcgtcaattcccctggctcctacacttgtctggcctgtgaggagggctaccggggccagagtgggagctgtgtagatgtgaatgagtgtctgactcccggggtctgtgcccatggaaagtgcaccaacctagaaggctccttcagatgctcttgtgagcagggctatgaggtcacctcagatgagaagggctgccaagatgtggatgagtgtgccagccgggcctcatgccccacaggcctctgcctcaacacggagggctccttcgcctgctctgcctgtgagaacgggtactgggtgaatgaagacggcactgcctgtgaagacctagatgagtgtgccttcccgggagtctgcccctccggagtctgcaccaacacggctggctccttctcctgcaaggactgcgatgggggctaccggcccagccccctgggtgactcctgtgaagatgtggatgaatgtgaagacccccagagcagctgcctgggaggcgagtgcaagaacactgtgggctcctaccagtgcctctgtccccagggcttccagctggccaatggcaccgtgtgtgaggatgtgaatgagtgcatgggggaggagcactgcgcaccccacggcgagtgcctcaacagccacgggtctttcttctgtctgtgcgcgcctggcttcgtcagcgcagaggggggcaccagctgccaggatgtggacgagtgtgccaccacagacccgtgtgtgggagggcactgtgtcaacaccgagggctccttcaactgtctatgtgagactggcttccagccctccccagagagtggagagtgtgtggacatagacgagtgcgccaacgacaccatgtgtggcagccacggcttctgtgacaacactgatggctccttccgctgcctctgtgaccagggcttcgagatctctccctcaggctgggactgtgtggatgtgaacgagtgtgagcttatgctggcggtatgtggggccgcgctctgtgagaacgtggagggctccttcctgtgcctctgtgccagtgacctggaggagtacgatgcccaggaggggcactgccgcccacggggggctggaggtcagagtatgtctgaggccccaacgggggaccatgccccggcccccacccgcatggactgctactccgggcagaagggccatgcgccctgctccagtgtcctgggccggaacaccacacaggctgaatgctgctgcacccagggcgctagctggggagatgcctgtgacctctgcccgtctgaggactcagctgaattcagcgagatctgccctagtggaaaaggctacattcctgtggaaggagcctggacgtttggacagaccatgtacacagatgcggatgagtgtgtgatattcgggcctggtctctgcccgaacggccggtgcctcaacaccgtgcctggttatgtctgcctgtgcaatcccggcttccactacgatgcttcccacaagaagtgtgaggatcacgatgagtgccaggacctggcctgtgagaatggcgagtgcgtcaacacggagggctccttccactgcttctgcagccccccgctcaccctggacctcagccagcagcgctgcatgaacagcaccagcagcacggaggacctccctgaccacgacatccacatggacatctgctggaaaaaagtcaccaatgatgtgtgcagcgaacccctgcgtgggcaccgcaccacctacacggaatgctgctgccaggacggcgaggcctggagccagcagtgtgctctgtgtcccccgaggagctctgaggtctatgctcagctgtgcaacgtggctcgcattgaggcagagcgggaggccggggtccacttccggccaggctatgagtatggccccgggcccgatgacctgcactacagcatctatggcccagatggggcccccttctacaactacctgggccccgaggacaccgtccctgagcctgccttccccaacacagccggtcactcagcggaccgcacacccatccttgagtctcctttgcagccctcagaactccagccccactacgtggccagccatccagagcccccagccggcttcgaagggcttcaggcggaggagtgcggcatcctgaacggctgtgagaatggccgctgtgtgcgcgtgcgggagggctacacctgtgactgttttgagggcttccagctggatgcggcccacatggcctgcgtagatgtgaatgagtgtgatgacttgaacgggcctgctgtgctctgtgtccatggttactgcgagaacacagagggctcctaccgctgccactgctccccgggatatgtggctgaggcagggcccccccactgcactgccaaggagtagcagtcaggggtcagtgtggcaactacctggaaatggcctccagtcacaggcaggggccttgaggatgatttcctagctgggaagacaccgtgacatcaggccagaggtttccaatcagccttgcctgctttcatctctcccagcttagcctc

SEQ ID NO: 147555 - DNA, 6462 bp, Homo sapiens
  Payload ID: 9199
  Gene Symbol: LTBP2
  Gene Name: latent transforming growth factor beta binding protein 2
  ENST ID: ENST00000553939
  CDS Start-End: 435-5744
tcgccgcccgctggcttcccggtgccaaagtgggtgttgctggaattcctcgctccctctccggtaatgagggggctgagctgtccctccgaggagggggcctggtgtggataaaagagacgaaaaagccgggggaggtttccaaaaataaaaccgtccgggtccccttcagacggctgcaggcacagggaggaggcgcgaaggtgcagcagccgtgcgagcccagctggagtaggagcgcggactcgaggctcggggcgcgcagccctcgttccgccgagagccgggcccccagtcggccgcttcagggccccctagactcagagaagctggccgccgggcggggccgggagaacagcccgcgggcgtccagcgtgccgaccacaaagctcttcgcggtgcccgcgcgcaccactctccagccgccccgcgccatgaggccgcggaccaaagcccgcagcccggggcgcgccctgcggaacccctggagaggcttcctgccgctcaccctggctctcttcgtgggcgcgggtcatgcccaaagggaccccgtagggagatacgagccggctggtggagacgcgaatcgactgcggcgccctgggggcagctacccggcagcggctgcagccaaggtgtacagtctgttccgggagcaggacgcgcctgtcgcgggcttgcagcccgtggagcgggcccagccgggctgggggagccccaggaggcccaccgaggcggaggccaggaggccgtcccgcgcgcagcagtcgcggcgtgtccagccacctgcgcagacccggagaagcactcccctgggccagcagcaaccagcaccccggacccgggccgcgccggctctcccacgcctggggaccccacagcggtctggggctgcgcccccaaccccgccgcgagggcggctcacggggaggaacgtctgcgggggacagtgctgcccaggatggacaacagcaaacagcaccaaccactgtatcaaacccgtttgcgagccgccgtgccagaaccggggctcctgcagccgcccgcagctctgtgtctgccgctctggtttccgtggagcccgctgcgaggaggtcattcccgatgaggaatttgacccccagaactccaggctggcacctcgacgctgggccgagcgttcacccaacctgcgcaggagcagtgcggctggagagggcaccttggccagagcacagccgccagcaccacagtcgccgcccgcaccacagtcgccaccagctgggaccctgagtggcctcagccagacccacccttcccagcagcacgtggggttgtcccgcactgtccgacttcacccgactgccacggccagtagccagctctcttccaacgccctgcccccgggaccaggccttgagcagagagatggcacccaacaggcggtacctctggagcacccctcatccccctgggggctgaacctcacggagaaaatcaagaagatcaagatcgtcttcactcccaccatctgcaagcagacctgtgcccgtggacactgtgccaacagctgtgagaggggcgacaccaccaccctgtacagccagggcggccatgggcacgatcccaagtctggcttccgcatctatttctgccagatcccctgcctgaacggaggccgctgcatcggcagggacgaatgctggtgccccgccaactccaccgggaagttctgccacctgcctatcccgcagccggacagggagcctccagggagggggtcccgccccagggccttgctggaagccccactgaagcagtccactttcacactgccgctctccaaccagctggcctccgtgaacccctccctggtgaaggtgcacattcaccacccacccgaggcctcagtgcagatccaccaggtggcccaggtgcggggcggggtggaggaggccctagtggagaacagcgtggagaccagacccccgccctggctgcctgccagccctggccacagcctctgggacagcaacaacatccctgctcggtctggagagccccctcggccactgcccccagcagcacccaggcctcgaggactgctgggccggtgttacctgaacactgtgaacggacagtgtgccaaccctctgctggagctgactacccaggaggactgctgtggcagtgtgggagccttctggggggtgactttgtgtgccccatgcccacccagaccagcctccccggtgattgagaatggccagctggagtgtcctcaggggtacaagagactgaacctcactcactgccaagatatcaacgagtgcttgaccctgggcctgtgcaaggacgcggagtgtgtgaataccaggggcagctacctgtgcacatgcagacctggcctcatgctggatccatcgcggagccgctgtgtgtcggacaaggcaatctccatgctgcagggactgtgctaccggtcgctggggcccggcacctgcaccctgcctttggcccagcggatcaccaagcagatatgctgctgcagccgcgtgggcaaagcatggggcagcgagtgtgagaaatgccctctgcctggcacagaggccttcagagagatctgccctgccggccacggctacacctacgcgagctccgacatccgcctgtccatgaggaaagccgaggaggaggaactggcaaggcccccaagggagcaagggcagaggagcagcggggcactgcccgggccagcagagaggcagcccctccgggtcgtcacggacacctggcttgaggccgggaccatccctgacaagggtgactctcaggctggccaggtcacgaccagtgtcactcatgcacctgcctgggtcacagggaatgccacaaccccaccaatgcctgaacaggggattgcagagatacaggaagaacaagtgaccccctccactgatgtgctggtgaccctgagcaccccaggcattgacagatgcgctgctggagccaccaacgtctgtggccctggaacctgcgtgaacctccccgatggatacagatgtgtctgcagccctggctaccagctgcaccccagccaggcctactgcacagatgacaacgagtgtctgagggacccctgcaagggaaaagggcgctgcatcaaccgcgtggggtcctactcctgcttctgctaccctggctacactctggccacctcaggggcgacacaggagtgtcaagatatcaatgagtgtgagcagccaggggtgtgcagcggggggcagtgcaccaacaccgagggctcgtaccactgcgagtgtgatcagggctacatcatggtcaggaaaggacactgccaagatatcaacgaatgccgtcaccccggtacctgccctgatgggagatgcgtcaattcccctggctcctacacttgtctggcctgtgaggagggctaccggggccagagtgggagctgtgtagatgtgaatgagtgtctgactcccggggtctgtgcccatggaaagtgcaccaacctagaaggctccttcagatgctcttgtgagcagggctatgaggtcacctcagatgagaagggctgccaagatgtggatgagtgtgccagccgggcctcatgccccacaggcctctgcctcaacacggagggctccttcgcctgctctgcctgtgagaacgggtactgggtgaatgaagacggcactgcctgtgaagacctagatgagtgtgccttcccgggagtctgcccctccggagtctgcaccaacacggctggctccttctcctgcaaggactgcgatgggggctaccggcccagccccctgggtgactcctgtgaagatgtggatgaatgtgaagacccccagagcagctgcctgggaggcgagtgcaagaacactgtgggctcctaccagtgcctctgtccccagggcttccagctggccaatggcaccgtgtgtgaggatgtgaatgagtgcatgggggaggagcactgcgcaccccacggcgagtgcctcaacagccacgggtctttcttctgtctgtgcgcgcctggcttcgtcagcgcagaggggggcaccagctgccaggatgtggacgagtgtgccaccacagacccgtgtgtgggagggcactgtgtcaacaccgagggctccttcaactgtctatgtgagactggcttccagccctccccagagagtggagagtgtgtggatattgacgagtgtgaggactatggagacccggtgtgtggcacctggaagtgtgaaaacagccctggctcctaccgctgtgttctgggctgccagcctggcttccacatggccccgaacggagactgcattgacatagacgagtgcgccaacgacaccatgtgtggcagccacggcttctgtgacaacactgatggctccttccgctgcctctgtgaccagggcttcgagatctctccctcaggctgggactgtgtggatgtgaacgagtgtgagcttatgctggcggtatgtggggccgcgctctgtgagaacgtggagggctccttcctgtgcctctgtgccagtgacctggaggagtacgatgcccaggaggggcactgccgcccacggggggctggaggtcagagtatgtctgaggccccaacgggggaccatgccccggcccccacccgcatggactgctactccgggcagaagggccatgcgccctgctccagtgtcctgggccggaacaccacacaggctgaatgctgctgcacccagggcgctagctggggagatgcctgtgacctctgcccgtctgaggactcagctgaattcagcgagatctgccctagtggaaaaggctacattcctgtggaaggagcctggacgtttggacagaccatgtacacagatgcggatgagtgtgtgatattcgggcctggtctctgcccgaacggccggtgcctcaacaccgtgcctggttatgtctgcctgtgcaatcccggcttccactacgatgcttcccacaagaagtgtgaggatcacgatgagtgccaggacctggcctgtgagaatggcgagtgcgtcaacacggagggctccttccactgcttctgcagccccccgctcaccctggacctcagccagcagcgctgcatgaacagcaccagcagcacggaggacctccctgaccacgacatccacatggacatctgctggaaaaaagtcaccaatgatgtgtgcagcgaacccctgcgtgggcaccgcaccacctacacggaatgctgctgccaggacggcgaggcctggagccagcagtgtgctctgtgtcccccgaggagctctgaggtctatgctcagctgtgcaacgtggctcgcattgaggcagagcgggaggccggggtccacttccggccaggctatgagtatggccccgggcccgatgacctgcactacagcatctatggcccagatggggcccccttctacaactacctgggccccgaggacaccgtccctgagcctgccttccccaacacagccggtcactcagcggaccgcacacccatccttgagtctcctttgcagccctcagaactccagccccactacgtggccagccatccaggtctgtgttgctgcaaaactggggaagaggtgggcaccaaagctgtttcacttccatctcctccacctgctagtcatattgccagcaggagcccccagccggcttcgaagggcttcaggcggaggagtgcggcatcctgaacggctgtgagaatggccgctgtgtgcgcgtgcgggagggctacacctgtgactgttttgagggcttccagctggatgcggcccacatggcctgcgtagatgtgaatgagtgtgatgacttgaacgggcctgctgtgctctgtgtccatggttactgcgagaacacagagggctcctaccgctgccactgctccccgggatatgtggctgaggcagggcccccccactgcactgccaaggagtagcagtcaggggtcagtgtggcaactacctggaaatggcctccagtcacaggcaggggccttgaggatgatttcctagctgggaagacaccgtgacatcaggccagaggtttccaatcagccttgcctgctttcatctctcccagcttagcctctggctgtaagcttcggtcattgcctccatgcccttgcttggctcaagcaccaccaatcgctttaatgcttcagccaccgcatgaggccctgtccaccacctttcctggccttgctatgggatgcttaccaaaggatggccctcatccaccctcccaagctgtgcgagcatgcaaggccccatggcctcacactgcagacacccctttccagccacaatccaccatcatcctgacgatcccacaactgggacagaggctacatctgccctagggaggtccttcagaatctgtggagcaagaaaggatttggggaagcttggg

SEQ ID NO: 147556 - DNA, 4443 bp, Homo sapiens
  Payload ID: 9200
  Gene Symbol: LTBP3
  Gene Name: latent transforming growth factor beta binding protein 3
  Uniprot ID: Q9NS15
  ENST ID: ENST00000301873
  CDS Start-End: 270-4181
cttgctccggcctcctcgctcctgcctgagttcggggcctggtctgggcttcgtcctggggctgggaagtttctgcgctccccgctgtccagtctgcatctccgcgcctcccgccgggcccccgcggtcccctcccgcccgcttcccccgctgccctccctcgctgccccctaccctctcccggggctcccggccctctactcccttcgggcgcgggcccctcgccccgcccgggcgcgccccccctcccccgggtcctgcggccccggatgcccgggccccgaggggctgctggcggcctggcccctgagatgcgcggggcgggggcggcggggctgctggcgctgctgctgctgctgctgctgctgctgctgggcctgggcggcagggtcgagggggggccggccggcgagcggggcgcaggcgggggcggggcgctggcccgcgagcgcttcaaggtggtctttgcgccggtgatctgcaagcggacctgtctcaagggccagtgtcgggacagttgtcagcagggctccaacatgacgctcatcggagagaacggccacagcacagacacgctcacgggctccggcttccgcgtggtggtgtgccctctcccctgcatgaatggcggccagtgctcctcgcgaaaccagtgcctgtgtcccccggacttcactgggcgcttctgccaggtgcccgcaggaggagccggtgggggtaccggcggctcaggccccggcctgagcaggacaggggccctgtccacaggggcgctgccgcccctggctccggagggcgactctgtggccagcaagcacgccatctacgccgtccaggtgatcgctgaccctcctgggcccggggaggggcctcctgcccagcacgcagccttcctggtgcccctaggcccgggacagatctcagcagaagtgcaggccccgccccccgtggtgaatgtgcgcgtccatcacccgcccgaggcctcagtccaggtgcaccgcattgagagctcgaacgccgagagcgcagccccctcccagcacctgctgccgcaccccaagccctcgcacccccggccgcccacccagaagcccctgggccgctgctttcaggacactctgcccaagcagccgtgtggcagcaaccccctccccggcctcaccaagcaggaagactgctgcggtagcatcggcactgcctggggccagagcaagtgccacaagtgtccccagctgcagtacacaggagtgcagaagccagggcctgtacgtggggaagtgggcgctgactgtccccagggctacaagaggcttaacagcacccactgccaggacatcaacgagtgcgcaatgccgggcgtgtgtcgccatggtgactgcctcaacaaccctggctcctatcgctgtgtctgcccacctggccatagtttaggcccctcccgtacacagtgcattgcagacaaaccggaggagaagagcctgtgtttccgcctggtgagccctgagcaccagtgccagcacccactgaccacccgcctgacccgccagctctgctgctgcagtgtcggcaaggcctggggcgcgcggtgtcagcgctgcccaacagatggcaccgctgcgttcaaggagatctgcccagctgggaagggataccacattctcacctcccaccagacgctcaccattcagggcgagagtgacttttcccttttcctgcaccctgacgggccacccaagccccagcagcttccggagagccctagccaggctccaccacctgaggacacagaggaagagagaggggtgaccacggactcaccggtgagtgaggagaggtcagtgcagcagagccacccaactgccaccacgactcctgcccggccctaccccgagctgatctcccgtccctcgcccccgaccatgcgctggttcctgccggacttgcctccttcccgcagcgccgtagagatcgctcccactcaggtcacagagactgatgagtgccgactgaaccagaacatctgtggccacggagagtgcgtgccgggcccccctgactactcctgccactgcaaccccggctaccggtcacatccccagcaccgctactgcgtggatgtgaacgagtgcgaggcagagccctgtggcccggggaggggcatctgcatgaacaccggcggctcctacaattgccactgcaaccgcggctaccgcctgcacgtgggcgccggggggcgctcgtgcgtggacctgaacgaatgcgccaagccccacctgtgcggcgacggcggcttctgcatcaactttcccggtcactacaagtgcaactgctaccccggctaccggctcaaagcctcccggcctcctgtgtgcgaagacatcgacgagtgccgggacccaagctcttgcccggatggcaaatgcgagaacaagcccgggagcttcaagtgcatcgcctgtcagcctggctaccgcagccaggggggcggggcctgtcgcgacgtgaacgagtgcgccgagggcagcccctgctcgcctggctggtgcgagaacctcccgggctccttccgctgcacctgtgcccagggctacgcgcccgcgcccgacggccgcagttgcttggatgtggacgagtgtgaggctggggacgtgtgtgacaatggcatctgcagcaacacgccaggatctttccagtgtcagtgcctctctggctaccatctgtccagggaccggagccactgcgaggacattgatgagtgtgacttccctgcagcctgcattgggggtgactgcatcaataccaatggctcctacagatgtctttgcccccaggggcatcggctggtgggtggcaggaaatgccaagacatagatgagtgcagccaggacccgagcctgtgccttccccatggggcctgcaagaaccttcagggctcctatgtgtgtgtctgcgatgagggcttcactcccacccaggaccagcacggttgtgaggaggtggagcagccccaccacaagaaggagtgctacctgaacttcgatgacacagtgttctgcgacagcgtattggccaccaacgtgacccagcaggagtgctgctgctctctgggggccggctggggcgaccactgcgaaatctacccctgcccagtctacagctcagccgagttccacagcctctgcccagacggaaagggctacacccaggacaacaacatcgtcaactacggcatcccagcccaccgtgacatcgacgagtgcatgttgttcgggtcggagatttgcaaggagggcaagtgcgtgaacacgcagcctggctacgagtgctactgcaagcagggcttctactacgacgggaacctgctggaatgcgtggacgtggacgagtgcctggacgagtccaactgccggaacggagtgtgtgagaacacgcgcggcggctaccgctgtgcctgcacgccccctgccgagtacagtcccgcgcagcgccagtgcctgagcccggaagagatggacgtggacgagtgccaggacccggcagcctgccgccctggccgctgcgtcaacctgccgggctcctaccgctgcgagtgtcgcccgccctgggtgcccgggccctccggccgcgattgccagctccccgagagcccggccgagcgtgccccggagcggcgcgacgtgtgctggagccagcgcggagaggacggcatgtgcgctggccccctggccgggcctgccctcaccttcgacgactgctgctgccgccagggccgcggctggggcgcccaatgccgaccgtgcccgccgcgcggcgcggggtcccattgcccgacatcgcagagcgagagcaattccttctgggacacaagccccctgctgttggggaagcccccaagagatgaggacagttcagaggaggattcagacgagtgtcgctgcgtgagtggccgctgcgtgccgcggccgggcggcgccgtgtgcgagtgtcccggcggcttccagctcgacgcctcccgcgcccgctgcgtggatatcgacgagtgccgagagctgaaccagcgcgggctgctgtgcaagagcgagcgctgcgtgaacaccagcggctccttccgctgcgtctgcaaagccggcttcgcgcgcagccgcccgcacggggcctgcgttccccagcgccgccgctgacgccgccgacgccgccctcggcccagacctcggtgatcactgagggatttccgcgagctcggcctcacttctgccccgacttgtggctcggacccagggaccttcagggcccgcagaccctcccggcgccttgagacccgaggcgcccctaccggcccccctccccggttagcgggcggttgtaaggtctccggcgggcgctgcctgccttcctcccagagggtgtttcctagaaactgataaatcagatcgtgcctcttta

SEQ ID NO: 147557 - DNA, 4046 bp, Homo sapiens
  Payload ID: 9200
  Gene Symbol: LTBP3
  Gene Name: latent transforming growth factor beta binding protein 3
  Uniprot ID: Q9NS15
  ENST ID: ENST00000322147
  CDS Start-End: 1-3771
atgcccgggccccgaggggctgctggcggcctggcccctgagatgcgcggggcgggggcggcggggctgctggcgctgctgctgctgctgctgctgctgctgctgggcctgggcggcagggtcgagggggggccggccggcgagcggggcgcaggcgggggcggggcgctggcccgcgagcgcttcaaggtggtctttgcgccggtgatctgcaagcggacctgtctcaagggccagtgtcgggacagttgtcagcagggctccaacatgacgctcatcggagagaacggccacagcacagacacgctcacgggctccggcttccgcgtggtggtgtgccctctcccctgcatgaatggcggccagtgctcctcgcgaaaccagtgcctgtgtcccccggacttcactgggcgcttctgccaggtgcccgcaggaggagccggtgggggtaccggcggctcaggccccggcctgagcaggacaggggccctgtccacaggggcgctgccgcccctggctccggagggcgactctgtggccagcaagcacgccatctacgccgtccaggtgatcgctgaccctcctgggcccggggaggggcctcctgcccagcacgcagccttcctggtgcccctaggcccgggacagatctcagcagaagtgcaggccccgccccccgtggtgaatgtgcgcgtccatcacccgcccgaggcctcagtccaggtgcaccgcattgagagctcgaacgccgagagcgcagccccctcccagcacctgctgccgcaccccaagccctcgcacccccggccgcccacccagaagcccctgggccgctgctttcaggacactctgcccaagcagccgtgtggcagcaaccccctccccggcctcaccaagcaggaagactgctgcggtagcatcggcactgcctggggccagagcaagtgccacaagtgtccccagctgcagtacacaggagtgcagaagccagggcctgtacgtggggaagtgggcgctgactgtccccagggctacaagaggcttaacagcacccactgccaggacatcaacgagtgcgcaatgccgggcgtgtgtcgccatggtgactgcctcaacaaccctggctcctatcgctgtgtctgcccacctggccatagtttaggcccctcccgtacacagtgcattgcagacaaaccggaggagaagagcctgtgtttccgcctggtgagccctgagcaccagtgccagcacccactgaccacccgcctgacccgccagctctgctgctgcagtgtcggcaaggcctggggcgcgcggtgtcagcgctgcccaacagatggcaccgctgcgttcaaggagatctgcccagctgggaagggataccacattctcacctcccaccagacgctcaccattcagggcgagagtgacttttcccttttcctgcaccctgacgggccacccaagccccagcagcttccggagagccctagccaggctccaccacctgaggacacagaggaagagagaggggtgaccacggactcaccggtgagtgaggagaggtcagtgcagcagagccacccaactgccaccacgactcctgcccggccctaccccgagctgatctcccgtccctcgcccccgaccatgcgctggttcctgccggacttgcctccttcccgcagcgccgtagagatcgctcccactcaggtcacagagactgatgagtgccgactgaaccagaacatctgtggccacggagagtgcgtgccgggcccccctgactactcctgccactgcaaccccggctaccggtcacatccccagcaccgctactgcgtggatgtgaacgagtgcgaggcagagccctgtggcccggggaggggcatctgcatgaacaccggcggctcctacaattgccactgcaaccgcggctaccgcctgcacgtgggcgccggggggcgctcgtgcgtggacctgaacgaatgcgccaagccccacctgtgcggcgacggcggcttctgcatcaactttcccggtcactacaagtgcaactgctaccccggctaccggctcaaagcctcccggcctcctgtgtgcgaagacatcgacgagtgccgggacccaagctcttgcccggatggcaaatgcgagaacaagcccgggagcttcaagtgcatcgcctgtcagcctggctaccgcagccaggggggcggggcctgtcgcgacgtgaacgagtgcgccgagggcagcccctgctcgcctggctggtgcgagaacctcccgggctccttccgctgcacctgtgcccagggctacgcgcccgcgcccgacggccgcagttgcttggatgtggacgagtgtgaggctggggacgtgtgtgacaatggcatctgcagcaacacgccaggatctttccagtgtcagtgcctctctggctaccatctgtccagggaccggagccactgcgaggacattgatgagtgtgacttccctgcagcctgcattgggggtgactgcatcaataccaatggctcctacagatgtctttgcccccaggggcatcggctggtgggtggcaggaaatgccaagacatagatgagtgcagccaggacccgagcctgtgccttccccatggggcctgcaagaaccttcagggctcctatgtgtgtgtctgcgatgagggcttcactcccacccaggaccagcacggttgtgaggaggtggagcagccccaccacaagaaggagtgctacctgaacttcgatgacacagtgttctgcgacagcgtattggccaccaacgtgacccagcaggagtgctgctgctctctgggggccggctggggcgaccactgcgaaatctacccctgcccagtctacagctcagccgagttccacagcctctgcccagacggaaagggctacacccaggacaacaacatcgtcaactacggcatcccagcccaccgtgacatcgacgagtgcatgttgttcgggtcggagatttgcaaggagggcaagtgcgtgaacacgcagcctggctacgagtgctactgcaagcagggcttctactacgacgggaacctgctggaatgcgtggacgtggacgagtgcctggacgagtccaactgccggaacggagtgtgtgagaacacgcgcggcggctaccgctgtgcctgcacgccccctgccgagtacagtcccgcgcagcgccagtgcctgagcccggaagagatggagcgtgccccggagcggcgcgacgtgtgctggagccagcgcggagaggacggcatgtgcgctggccccctggccgggcctgccctcaccttcgacgactgctgctgccgccagggccgcggctggggcgcccaatgccgaccgtgcccgccgcgcggcgcggggtcccattgcccgacatcgcagagcgagagcaattccttctgggacacaagccccctgctgttggggaagcccccaagagatgaggacagttcagaggaggattcagacgagtgtcgctgcgtgagtggccgctgcgtgccgcggccgggcggcgccgtgtgcgagtgtcccggcggcttccagctcgacgcctcccgcgcccgctgcgtggatatcgacgagtgccgagagctgaaccagcgcgggctgctgtgcaagagcgagcgctgcgtgaacaccagcggctccttccgctgcgtctgcaaagccggcttcgcgcgcagccgcccgcacggggcctgcgttccccagcgccgccgctgacgccgccgacgccgccctcggcccagacctcggtgatcactgagggatttccgcgagctcggcctcacttctgccccgacttgtggctcggacccagggaccttcagggcccgcagaccctcccggcgccttgagacccgaggcgcccctaccggcccccctccccggttagcgggcggttgtaaggtctccggcgggcgctgcctgccttcctcccagagggtgtttcctagaaactgataaatcagatcgtgcctctttacccttggctttcg

SEQ ID NO: 147558 - DNA, 2750 bp, Homo sapiens
  Payload ID: 9200
  Gene Symbol: LTBP3
  Gene Name: latent transforming growth factor beta binding protein 3
  ENST ID: ENST00000526927
  CDS Start-End: 1-2722
ctttgcgccggtgatctgcaagcggacctgtctcaagggccagtgtcgggacagttgtcagcagggctccaacatgacgctcatcggagagaacggccacagcacagacacgctcacgggctccggcttccgcgtggcagacaaaccggaggagaagagcctgtgtttccgcctggtgagccctgagcaccagtgccagcacccactgaccacccgcctgacccgccagctctgctgctgcagtgtcggcaaggcctggggcgcgcggtgtcagcgctgcccaacagatggcaccgctgcgttcaaggagatctgcccagctgggaagggataccacattctcacctcccaccagacgctcaccattcagggcgagagtgacttttcccttttcctgcaccctgacgggccacccaagccccagcagcttccggagagccctagccaggctccaccacctgaggacacagaggaagagagaggggtgaccacggactcaccggtgagtgaggagaggtcagtgcagcagagccacccaactgccaccacgactcctgcccggccctaccccgagctgatctcccgtccctcgcccccgaccatgcgctggttcctgccggacttgcctccttcccgcagcgccgtagagatcgctcccactcaggtcacagagactgatgagtgccgactgaaccagaacatctgtggccacggagagtgcgtgccgggcccccctgactactcctgccactgcaaccccggctaccggtcacatccccagcaccgctactgcgtggatgtgaacgagtgcgaggcagagccctgtggcccggggaggggcatctgcatgaacaccggcggctcctacaattgccactgcaaccgcggctaccgcctgcacgtgggcgccggggggcgctcgtgcgtggacctgaacgaatgcgccaagccccacctgtgcggcgacggcggcttctgcatcaactttcccggtcactacaagtgcaactgctaccccggctaccggctcaaagcctcccggcctcctgtgtgcgaagacatcgacgagtgccgggacccaagctcttgcccggatggcaaatgcgagaacaagcccgggagcttcaagtgcatcgcctgtcagcctggctaccgcagccaggggggcggggcctgtcgcgacgtgaacgagtgcgccgagggcagcccctgctcgcctggctggtgcgagaacctcccgggctccttccgctgcacctgtgcccagggctacgcgcccgcgcccgacggccgcagttgcttggatgtggacgagtgtgaggctggggacgtgtgtgacaatggcatctgcagcaacacgccaggatctttccagtgtcagtgcctctctggctaccatctgtccagggaccggagccactgcgaggacattgatgagtgtgacttccctgcagcctgcattgggggtgactgcatcaataccaatggctcctacagatgtctttgcccccaggggcatcggctggtgggtggcaggaaatgccaagacatagatgagtgcagccaggacccgagcctgtgccttccccatggggcctgcaagaaccttcagggctcctatgtgtgtgtctgcgatgagggcttcactcccacccaggaccagcacggttgtgaggaggtggagcagccccaccacaagaaggagtgctacctgaacttcgatgacacagtgttctgcgacagcgtattggccaccaacgtgacccagcaggagtgctgctgctctctgggggccggctggggcgaccactgcgaaatctacccctgcccagtctacagctcagccgagttccacagcctctgcccagacggaaagggctacacccaggacaacaacatcgtcaactacggcatcccagcccaccgtgacatcgacgagtgcatgttgttcgggtcggagatttgcaaggagggcaagtgcgtgaacacgcagcctggctacgagtgctactgcaagcagggcttctactacgacgggaacctgctggaatgcgtggacgtggacgagtgcctggacgagtccaactgccggaacggagtgtgtgagaacacgcgcggcggctaccgctgtgcctgcacgccccctgccgagtacagtcccgcgcagcgccagtgcctgagcccggaagagatggagcgtgccccggagcggcgcgacgtgtgctggagccagcgcggagaggacggcatgtgcgctggccccctggccgggcctgccctcaccttcgacgactgctgctgccgccagggccgcggctggggcgcccaatgccgaccgtgcccgccgcgcggcgcggggtcccattgcccgacatcgcagagcgagagcaattccttctgggacacaagccccctgctgttggggaagcccccaagagatgaggacagttcagaggaggattcagacgagtgtcgctgcgtgagtggccgctgcgtgccgcggccgggcggcgccgtgtgcgagtgtcccggcggcttccagctcgacgcctcccgcgcccgctgcgtggatatcgacgagtgccgagagctgaaccagcgcgggctgctgtgcaagagcgagcgctgcgtgaacaccagcggctccttccgctgcgtctgcaaagccggcttcgcgcgcagccgcccgcacggggcctgcgttccccagcgccgccgctgacgccgccgacgccgccctcggcccagac

SEQ ID NO: 147559 - DNA, 619 bp, Homo sapiens
  Payload ID: 9200
  Gene Symbol: LTBP3
  Gene Name: latent transforming growth factor beta binding protein 3
  ENST ID: ENST00000527339
  CDS Start-End: 1-423
ctgaacgaatgcgccaagccccacctgtgcggcgacggcggcttctgcatcaactttcccggtcactacaagtgcaactgctaccccggctaccggctcaaagcctcccggcctcctgtgtgcgaagacatcgacgagtgccgggacccaagctcttgcccggatggcaaatgcgagaacaagcccgggagcttcaagtgcatcgcctgtcagcctggctaccgcagccaggggggcggggcctgtcgcgacgtgaacgagtgcgccgagggcagcccctgctcgcctggctggtgcgagaacctcccgggctccttccgctgcacctgtgcccagggctacgcgcccgcgcccgacggccgcagttgcttgggtgagcgccagcacccccgccccgggcctccgccgccccctacgcgctgaagccggggagcgggtcacgctgtctgtaaacagtgggtggaaggtggctcattcatccccaggtgactctgctcactcattttctcaacgaactttgccaaggaaggcaccactagaatttccacgtaggaagggtctcggggtagagctcgaagctgcgtttgcaaagcatgttacttaaatttgaaggaaaaaa

SEQ ID NO: 147560 - DNA, 3935 bp, Homo sapiens
  Payload ID: 9200
  Gene Symbol: LTBP3
  Gene Name: latent transforming growth factor beta binding protein 3
  ENST ID: ENST00000528516
  CDS Start-End: 80-430
cggccctctactcccttcgggcgcgggcccctcgccccgcccgggcgcgccccccctcccccgggtcctgcggccccggatgcccgggccccgaggggctgctggcggcctggcccctgagatgcgcggggcgggggcggcggggctgctggcgctgctgctgctgctgctgctgctgctgctgggcctgggcggcagggtcgagggggggccggccggcgagcggggcgcaggcgggggcggggcgctggcccgcgagcgcttcaaggtggtctttgcgccggtgatctgcaagcggacctgtctcaagggccagtgtcgggacagttgtcagcagggctccaacatgacgctcatcggagagaacggccacagcacagacacgctcacgggctccggcttccgctggtgtgccctctcccctgcatgaatggcggccagtgctcctcgcgaaaccagtgcctgtgtcccccggacttcactgggcgcttctgccaggtgcccgcaggaggagccggtgggggtaccggcggctcaggccccggcctgagcaggacaggggccctgtccacaggggcgctgccgcccctggctccggagggcgactctgtggccagcaagcacgccatctacgccgtccaggtgatcgctgaccctcctgggcccggggaggggcctcctgcccagcacgcagccttcctggtgcccctaggcccgggacagatctcagcagaagtgcaggccccgccccccgtggtgaatgtgcgcgtccatcacccgcccgaggcctcagtccaggtgcaccgcattgagagctcgaacgccgagagcgcagccccctcccagcacctgctgccgcaccccaagccctcgcacccccggccgcccacccagaagcccctgggccgctgctttcaggacactctgcccaagcagccgtgtggcagcaaccccctccccggcctcaccaagcaggaagactgctgcggtagcatcggcactgcctggggccagagcaagtgccacaagtgtccccagctgcagtacacaggagtgcagaagccagggcctgtacgtggggaagtgggcgctgactgtccccagggctacaagaggcttaacagcacccactgccaggacatcaacgagtgcgcaatgccgggcgtgtgtcgccatggtgactgcctcaacaaccctggctcctatcgctgtgtctgcccacctggccatagtttaggcccctcccgtacacagtgcattgcagacaaaccggaggagaagagcctgtgtttccgcctggtgagccctgagcaccagtgccagcacccactgaccacccgcctgacccgccagctctgctgctgcagtgtcggcaaggcctggggcgcgcggtgtcagcgctgcccaacagatggcaccgctgcgttcaaggagatctgcccagctgggaagggataccacattctcacctcccaccagacgctcaccattcagggcgagagtgacttttcccttttcctgcaccctgacgggccacccaagccccagcagcttccggagagccctagccaggctccaccacctgaggacacagaggaagagagaggggtgaccacggactcaccggtgagtgaggagaggtcagtgcagcagagccacccaactgccaccacgactcctgcccggccctaccccgagctgatctcccgtccctcgcccccgaccatgcgctggttcctgccggacttgcctccttcccgcagcgccgtagagatcgctcccactcaggtcacagagactgatgagtgccgactgaaccagaacatctgtggccacggagagtgcgtgccgggcccccctgactactcctgccactgcaaccccggctaccggtcacatccccagcaccgctactgcgtggatgtgaacgagtgcgaggcagagccctgtggcccggggaggggcatctgcatgaacaccggcggctcctacaattgccactgcaaccgcggctaccgcctgcacgtgggcgccggggggcgctcgtgcgtggacctgaacgaatgcgccaagccccacctgtgcggcgacggcggcttctgcatcaactttcccggtcactacaagtgcaactgctaccccggctaccggctcaaagcctcccggcctcctgtgtgcgaagacatcgacgagtgccgggacccaagctcttgcccggatggcaaatgcgagaacaagcccgggagcttcaagtgcatcgcctgtcagcctggctaccgcagccaggggggcggggcctgtcgcgacgtgaacgagtgcgccgagggcagcccctgctcgcctggctggtgcgagaacctcccgggctccttccgctgcacctgtgcccagggctacgcgcccgcgcccgacggccgcagttgcttggatgtggacgagtgtgaggctggggacgtgtgtgacaatggcatctgcagcaacacgccaggatctttccagtgtcagtgcctctctggctaccatctgtccagggaccggagccactgcgaggacattgatgagtgtgacttccctgcagcctgcattgggggtgactgcatcaataccaatggctcctacagatgtctttgcccccaggggcatcggctggtgggtggcaggaaatgccaagacatagatgagtgcagccaggacccgagcctgtgccttccccatggggcctgcaagaaccttcagggctcctatgtgtgtgtctgcgatgagggcttcactcccacccaggaccagcacggttgtgaggaggtggagcagccccaccacaagaaggagtgctacctgaacttcgatgacacagtgttctgcgacagcgtattggccaccaacgtgacccagcaggagtgctgctgctctctgggggccggctggggcgaccactgcgaaatctacccctgcccagtctacagctcagccgagttccacagcctctgcccagacggaaagggctacacccaggacaacaacatcgtcaactacggcatcccagcccaccgtgacatcgacgagtgcatgttgttcgggtcggagatttgcaaggagggcaagtgcgtgaacacgcagcctggctacgagtgctactgcaagcagggcttctactacgacgggaacctgctggaatgcgtggacgtggacgagtgcctggacgagtccaactgccggaacggagtgtgtgagaacacgcgcggcggctaccgctgtgcctgcacgccccctgccgagtacagtcccgcgcagcgccagtgcctgagcccggaagagatggagcgtgccccggagcggcgcgacgtgtgctggagccagcgcggagaggacggcatgtgcgctggccccctggccgggcctgccctcaccttcgacgactgctgctgccgccagggccgcggctggggcgcccaatgccgaccgtgcccgccgcgcggcgcggggtcccattgcccgacatcgcagagcgagagcaattccttctgggacacaagccccctgctgttggggaagcccccaagagatgaggacagttcagaggaggattcagacgagtgtcgctgcgtgagtggccgctgcgtgccgcggccgggcggcgccgtgtgcgagtgtcccggcggcttccagctcgacgcctcccgcgcccgctgcgtggatatcgacgagtgccgagagctgaaccagcgcgggctgctgtgcaagagcgagcgctgcgtgaacaccagcggctccttccgctgcgtctgcaaagccggcttcgcgcgcagccgcccgcacggggcctgcgttccccagcgccgccgctgacgccgccgacgccgccctcggcccagacctcggtgatcactgagggatttccgcgagctcggcctcacttctgccccgacttgtggctc

SEQ ID NO: 147561 - DNA, 431 bp, Homo sapiens
  Payload ID: 9200
  Gene Symbol: LTBP3
  Gene Name: latent transforming growth factor beta binding protein 3
  ENST ID: ENST00000530426
  CDS Start-End: 1-431
tttcaggacactctgcccaagcagccgtgtggcagcaaccccctccccggcctcaccaagcaggaagactgctgcggtagcatcggcactgcctggggccagagcaagtgccacaagtgtccccagctgcagtacacaggagtgcagaagccagggcctgtacgtggggaagtgggcgctgactgtccccagggctacaagaggcttaacagcacccactgccaggcagacaaaccggaggagaagagcctgtgtttccgcctggtgagccctgagcaccagtgccagcacccactgaccacccgcctgacccgccagctctgctgctgcagtgtcggcaaggcctggggcgcgcggtgtcagcgctgcccaacagatggcaccgctgcgttcaaggagatctgcccagctgggaagggataccacattct

SEQ ID NO: 147562 - DNA, 2461 bp, Homo sapiens
  Payload ID: 9200
  Gene Symbol: LTBP3
  Gene Name: latent transforming growth factor beta binding protein 3
  ENST ID: ENST00000530785
  CDS Start-End: 1280-2200
gtgaagggcctgggttgagtaggggactcaggagaacagtggcggtttggaagtatcccagggcatggggctgcctaggggctttatggaagtcaaagctttagaggagtcagagagggaggtgccagccacacgaggctctgttggactgaggctgaagcctgtgggtatgttccagcatgctcagcttggtggctgctccagtcccactccgcacccaggatccacaggccacagctctgaccagagactgggcattgccagacagtgaggaggaaggagaggtgtttatggatcagggacgggagtcctagggatgataagccctgggctccagctgggaactatcagagtctgggggtgtcaggcaagctcggaggactgagagggaggccaccaagccctgtgagagagaaggtggaggtgaggacttgagaacagtggaaagaaggcagcctctgagggccccagggtggagcagatctgagtgatgaaaatccccttgggaccctgagagtgaggggaaggtcacggaagccgagagatccaggaatgtgaggtcagaggctgacctggttgtccacgcggatgttcgaaactcccaggatggagagaaaaacagagcaggaggaatgaggaagatgtggacgagtgtgaggctggggacgtgtgtgacaatggcatctgcagcaacacgccaggatctttccagtgtcagtgcctctctggctaccatctgtccagggaccggagccactgcgaggacattgatgagtgtgacttccctgcagcctgcattgggggtgactgcatcaataccaatggctcctacagatgtctttgcccccaggggcatcggctggtgggtggcaggaaatgccaagacatagatgagtgcagccaggacccgagcctgtgccttccccatggggcctgcaagaaccttcagggctcctatgtgtgtgtctgcgatgagggcttcactcccacccaggaccagcacggttgtgaggaggtggagcagccccaccacaagaaggagtgctacctgaacttcgatgacacagtgttctgcgacagcgtattggccaccaacgtgacccagcaggagtgctgctgctctctgggggccggctggggcgaccactgcgaaatctacccctgcccagtctacagctcagccgagttccacagcctctgcccagacggaaagggctacacccaggacaacaacatcgtcaactacggcatcccagcccaccgtgacatcgacgagtgcatgttgttcgggtcggagatttgcaaggagggcaagtgcgtgaacacgcagcctggctacgagtgctactgcaagcagggcttctactacgacgggaacctgctggaatgcgtggacgtggacgagtgcctggacgagtccaactgccggaacggagtgtgtgagaacacgcgcggcggctaccgctgtgcctgcacgccccctgccgagtacagtcccgcgcagcgccagtgcctgagcccggaagagatggacgtggacgagtgccaggacccggcagcctgccgccctggccgctgcgtcaacctgccgggctcctaccgctgcgagtgtcgcccgccctgggtgcccgggccctccggccgcgattgccagctccccgagagcccggccgagcgtgccccggagcggcgcgacgtgtgctggagccagcgcggagaggacggcatgtgcgctggccccctggccgggcctgccctcaccttcgacgactgctgctgccgccagggccgcggctggggcgcccaatgccgaccgtgcccgccgcgcggcgcggggtcccattgcccgacatcgcagagcgagagcaattccttctgggacacaagccccctgctgttggggaagcccccaagagatgaggacagttcagaggaggattcagacgagtgtcgctgcgtgagtggccgctgcgtgccgcggccgggcggcgccgtgtgcgagtgtcccggcggcttccagctcgacgcctcccgcgcccgctgcgtggatatcgacgagtgccgagagctgaaccagcgcgggctgctgtgcaagagcgagcgctgcgtgaacaccagcggctccttccgctgcgtctgcaaagccggcttcgcgcgcagccgcccgcacggggcctgcgttccccagcgccgccgctgacgccgccgacgccgccctcggcccagacctcggtgatcactgagggatttccgcgagctcggcctcacttctgccccgacttgtggctcggacccagggaccttcagggcccgcagaccctcccggcgccttgagacccgaggcgcccctaccggcccccctccccggttagcgggcggttgtaaggtctccggcgggcgctgcctgccttcctcccagagggtgtttcctagaaactgataaatcagatcgtgcctcttt

SEQ ID NO: 147563 - DNA, 1997 bp, Homo sapiens
  Payload ID: 9200
  Gene Symbol: LTBP3
  Gene Name: latent transforming growth factor beta binding protein 3
  ENST ID: ENST00000529189
  CDS Start-End: 957-1736
aggtgcctcccccagtctggctccgctgggggcggggcggggtagcggtggtgattggcgtctgggggcggggccttccgggagtagaggctgccctctcaaccccgcgttccagggaagagacccacacccccgcgaggtgcgcggtccgccttccggtggggcagagtccgaggctaggtctttccgccgcagacgtgaacgagtgcgccgagggcagcccctgctcgcctggctggtgcgagaacctcccgggctccttccgctgcacctgtgcccagggctacgcgcccgcgcccgacggccgcagttgcttggatgtggacgagtgtgaggctggggacgtgtgtgacaatggcatctgcagcaacacgccaggatctttccagtgtcagtgcctctctggctaccatctgtccagggaccggagccactgcgaggacattgatgagtgtgacttccctgcagcctgcattgggggtgactgcatcaataccaatggctcctacagatgtctttgcccccaggggcatcggctggtgggtggcaggaaatgccaagacatagatgagtgcagccaggacccgagcctgtgccttccccatggggcctgcaagaaccttcagggctcctatgtgtgtgtctgcgatgagggcttcactcccacccaggaccagcacggttgtgaggaggtggagcagccccaccacaagaaggagtgctacctgaacttcgatgacacagtgttctgcgacagcgtattggccaccaacgtgacccagcaggagtgctgctgctctctgggggccggctggggcgaccactgcgaaatctacccctgcccagtctacagctcagccgagttccacagcctctgcccagacggaaagggctacacccaggacaacaacatcgtcaactacggcatcccagcccaccgtgacatcgacgagtgcatgttgttcgggtcggagatttgcaaggagggcaagtgcgtgaacacgcagcctggctacgagtgctactgcaagcagggcttctactacgacgggaacctgctggaatgcgtggacgtggacgagtgcctggacgagtccaactgccggaacggagtgtgtgagaacacgcgcggcggctaccgctgtgcctgcacgccccctgccgagtacagtcccgcgcagcgccagtgcctgagcccggaagagatggagcgtgccccggagcggcgcgacgtgtgctggagccagcgcggagaggacggcatgtgcgctggccccctggccgggcctgccctcaccttcgacgactgctgctgccgccagggccgcggctggggcgcccaatgccgaccgtgcccgccgcgcggcgcggggtcccattgcccgacatcgcagagcgagagcaattccttctgggacacaagccccctgctgttggggaagcccccaagagatgaggacagttcagaggaggattcagacgagtgtcgctgcgtgagtggccgctgcgtgccgcggccgggcggcgccgtgtgcgagtgtcccggcggcttccagctcgacgcctcccgcgcccgctgcgtggatatcgacgagtgccgagagctgaaccagcgcgggctgctgtgcaagagcgagcgctgcgtgaacaccagcggctccttccgctgcgtctgcaaagccggcttcgcgcgcagccgcccgcacggggcctgcgttccccagcgccgccgctgacgccgccgacgccgccctcggcccagacctcggtgatcactgagggatttccgcgagctcggcctcacttctgccccgacttgtggctcggacccagggaccttcagggcccgcagaccctcccggcgccttgagacccgaggcgcccctaccggcccccctccccggttagcgggcggttgtaaggtctccggcgggcgctgcctgccttcctcccagagggtgtttcctagaaactgataaatcagatcgtgcctcttt

SEQ ID NO: 147564 - DNA, 1002 bp, Homo sapiens
  Payload ID: 9200
  Gene Symbol: LTBP3
  Gene Name: latent transforming growth factor beta binding protein 3
  ENST ID: ENST00000526825
  CDS Start-End: 1-208
ctttgcgccggtgatctgcaagcggacctgtctcaagggccagtgtcgggacagttgtcagcagggctccaacatgacgctcatcggagagaacggccacagcacagacacgctcacgggctccggcttccgcgtgggccccgccccccgtggtgaatgtgcgcgtccatcacccgcccgaggcctcagtccaggtgcaccgcattgagagctcgaacgccgagagcgcagccccctcccagcacctgctgccgcaccccaagccctcgcacccccggccgcccacccagaagcccctgggccgctgctttcaggacactctgcccaagcagccgtgtggcagcaaccccctccccggcctcaccaagcaggaagactgctgcggtagcatcggcactgcctggggccagagcaagtgccacaagtgtccccagctgcagtacacaggagtgcagaagccagggcctgtacgtggggaagtgggcgctgactgtccccagggctacaagaggcttaacagcacccactgccaggacatcaacgagtgcgcaatgccgggcgtgtgtcgccatggtgactgcctcaacaaccctggctcctatcgctgtgtctgcccacctggccatagtttaggcccctcccgtacacagtgcattgcagacaaaccggaggagaagagcctgtgtttccgcctggtgagccctgagcaccagtgccagcacccactgaccacccgcctgacccgccagctctgctgctgcagtgtcggcaaggcctggggcgcgcggtgtcagcgctgcccaacagatggcaccgctgcgttcaaggagatctgcccagctgggaagggataccacattctcacctcccaccagacgctcaccattcagggcgagagtgacttttcccttttcctgcaccctgacgggccacccaagccccagcagcttccggagagccctagccaggctccaccacctgaggacacagaggaagagagag

SEQ ID NO: 147565 - DNA, 3756 bp, Homo sapiens
  Payload ID: 9200
  Gene Symbol: LTBP3
  Gene Name: latent transforming growth factor beta binding protein 3
  ENST ID: ENST00000530866
  CDS Start-End: 347-3756
ttctttctgctcctcttctggaccccacagacttcctcctgggacctccgtgagccctggccaaaggctgtccccaccctttagccctttcctcagaggggattggaccagcactaacgagaagttactttggggccctgagacccccacgtttgcaagggaggctgggaaagagctggaaggcctgggctccggctccacccggcctccatcgtcagtgtgacccggcagggccacctctctccctcagcctcggtatctcgctctacgcaggcctccccgccccgccccgcccggaggaatccgcggccggccagacggtcccagttgtcagcagggctccaacatgacgctcatcggagagaacggccacagcacagacacgctcacgggctccggcttccgcgtggtggtgtgccctctcccctgcatgaatggcggccagtgctcctcgcgaaaccagtgcctgtgtcccccggacttcactgggcgcttctgccaggtgcccgcaggaggagccggtgggggtaccggcggctcaggccccggcctgagcaggacaggggccctgtccacaggggcgctgccgcccctggctccggagggcgactctgtggccagcaagcacgccatctacgccgtccaggtgatcgctgaccctcctgggcccggggaggggcctcctgcccagcacgcagccttcctggtgcccctaggcccgggacagatctcagcagaagtgcaggccccgccccccgtggtgaatgtgcgcgtccatcacccgcccgaggcctcagtccaggtgcaccgcattgagagctcgaacgccgagagcgcagccccctcccagcacctgctgccgcaccccaagccctcgcacccccggccgcccacccagaagcccctgggccgctgctttcaggacactctgcccaagcagccgtgtggcagcaaccccctccccggcctcaccaagcaggaagactgctgcggtagcatcggcactgcctggggccagagcaagtgccacaagtgtccccagctgcagtacacaggagtgcagaagccagggcctgtacgtggggaagtgggcgctgactgtccccagggctacaagaggcttaacagcacccactgccaggacatcaacgagtgcgcaatgccgggcgtgtgtcgccatggtgactgcctcaacaaccctggctcctatcgctgtgtctgcccacctggccatagtttaggcccctcccgtacacagtgcattgcagacaaaccggaggagaagagcctgtgtttccgcctggtgagccctgagcaccagtgccagcacccactgaccacccgcctgacccgccagctctgctgctgcagtgtcggcaaggcctggggcgcgcggtgtcagcgctgcccaacagatggcaccgctgcgttcaaggagatctgcccagctgggaagggataccacattctcacctcccaccagacgctcaccattcagggcgagagtgacttttcccttttcctgcaccctgacgggccacccaagccccagcagcttccggagagccctagccaggctccaccacctgaggacacagaggaagagagaggggtgaccacggactcaccggtgagtgaggagaggtcagtgcagcagagccacccaactgccaccacgactcctgcccggccctaccccgagctgatctcccgtccctcgcccccgaccatgcgctggttcctgccggacttgcctccttcccgcagcgccgtagagatcgctcccactcaggtcacagagactgatgagtgccgactgaaccagaacatctgtggccacggagagtgcgtgccgggcccccctgactactcctgccactgcaaccccggctaccggtcacatccccagcaccgctactgcgtggatgtgaacgagtgcgaggcagagccctgtggcccggggaggggcatctgcatgaacaccggcggctcctacaattgccactgcaaccgcggctaccgcctgcacgtgggcgccggggggcgctcgtgcgtggacctgaacgaatgcgccaagccccacctgtgcggcgacggcggcttctgcatcaactttcccggtcactacaagtgcaactgctaccccggctaccggctcaaagcctcccggcctcctgtgtgcgaagacatcgacgagtgccgggacccaagctcttgcccggatggcaaatgcgagaacaagcccgggagcttcaagtgcatcgcctgtcagcctggctaccgcagccaggggggcggggcctgtcgcgacgtgaacgagtgcgccgagggcagcccctgctcgcctggctggtgcgagaacctcccgggctccttccgctgcacctgtgcccagggctacgcgcccgcgcccgacggccgcagttgcttggatgtggacgagtgtgaggctggggacgtgtgtgacaatggcatctgcagcaacacgccaggatctttccagtgtcagtgcctctctggctaccatctgtccagggaccggagccactgcgaggacattgatgagtgtgacttccctgcagcctgcattgggggtgactgcatcaataccaatggctcctacagatgtctttgcccccaggggcatcggctggtgggtggcaggaaatgccaagacatagatgagtgcagccaggacccgagcctgtgccttccccatggggcctgcaagaaccttcagggctcctatgtgtgtgtctgcgatgagggcttcactcccacccaggaccagcacggttgtgaggaggtggagcagccccaccacaagaaggagtgctacctgaacttcgatgacacagtgttctgcgacagcgtattggccaccaacgtgacccagcaggagtgctgctgctctctgggggccggctggggcgaccactgcgaaatctacccctgcccagtctacagctcagccgagttccacagcctctgcccagacggaaagggctacacccaggacaacaacatcgtcaactacggcatcccagcccaccgtgacatcgacgagtgcatgttgttcgggtcggagatttgcaaggagggcaagtgcgtgaacacgcagcctggctacgagtgctactgcaagcagggcttctactacgacgggaacctgctggaatgcgtggacgtggacgagtgcctggacgagtccaactgccggaacggagtgtgtgagaacacgcgcggcggctaccgctgtgcctgcacgccccctgccgagtacagtcccgcgcagcgccagtgcctgagcccggaagagatggacgtggacgagtgccaggacccggcagcctgccgccctggccgctgcgtcaacctgccgggctcctaccgctgcgagtgtcgcccgccctgggtgcccgggccctccggccgcgattgccagctccccgagagcccggccgagcgtgccccggagcggcgcgacgtgtgctggagccagcgcggagaggacggcatgtgcgctggccccctggccgggcctgccctcaccttcgacgactgctgctgccgccagggccgcggctggggcgcccaatgccgaccgtgcccgccgcgcggcgcggggtcccattgcccgacatcgcagagcgagagcaattccttctgggacacaagccccctgctgttggggaagcccccaagagatgaggacagttcagaggaggattcagacgagtgtcgctgcgtgagtgg

SEQ ID NO: 147566 - DNA, 3327 bp, Homo sapiens
  Payload ID: 9200
  Gene Symbol: LTBP3
  Gene Name: latent transforming growth factor beta binding protein 3
  ENST ID: ENST00000532932
  CDS Start-End: 865-3066
gagctcctagggttagggctcaggtgggagatggctgttcttgggggctttgggaatgtggacaaggcccctcaaaggaggggctgttaaggaagcctaaggagaggtactccaggcaaagagaacagcctgcaaagcccactggccaggtgagtttggggcagagcagagttcactgttatggcccaggctgcatggcaggagtgagggggaaggggtgtgggaaatgaaactggtgagcagtgaggatccaaaggaggggagaggctggaggcagggagtcctgggcttggtgacaaagagagtgaggggggtggttcctggatctgactgcctgtgcacagctttggcactagttaggattcccaggaaaccagctcctgctagtcttgggagggggtaatcaacccttctggaatagggggtcgggtccctggggcaagggcttatggagtcactgggctagaggacactggtgtgaccgaggctatagagtttaaggtattgaggcgactggggagaaaggagttttagtcccttgggtgggagtactgggacgactgaggggccctgaggggatgtggtttggtttgaggtgagtggggtcagggtcttggagtgaaccgggaatggaagtatccgggcctgggtgtggggtgatacggctgtcaggggcctggagtcctagtttggagctttctggggtcttgatattggggttatctaaaagagagaaataggacatcctggagttggagtatgggcgtacaggaacctgaggtcatggtgtgactggggtgttgaggtctgccctggggatatggcagaaggtgagcgctccctgctctgccgcttgacctggccatgcccgcagagactgatgagtgccgactgaaccagaacatctgtggccacggagagtgcgtgccgggcccccctgactactcctgccactgcaaccccggctaccggtcacatccccagcaccgctactgcgtggatgtgaacgagtgcgaggcagagccctgtggcccggggaggggcatctgcatgaacaccggcggctcctacaattgccactgcaaccgcggctaccgcctgcacgtgggcgccggggggcgctcgtgcgtggacctgaacgaatgcgccaagccccacctgtgcggcgacggcggcttctgcatcaactttcccggtcactacaagtgcaactgctaccccggctaccggctcaaagcctcccggcctcctgtgtgcgaagacatcgacgagtgccgggacccaagctcttgcccggatggcaaatgcgagaacaagcccgggagcttcaagtgcatcgcctgtcagcctggctaccgcagccaggggggcggggcctgtcgcgacgtgaacgagtgcgccgagggcagcccctgctcgcctggctggtgcgagaacctcccgggctccttccgctgcacctgtgcccagggctacgcgcccgcgcccgacggccgcagttgcttggatgtggacgagtgtgaggctggggacgtgtgtgacaatggcatctgcagcaacacgccaggatctttccagtgtcagtgcctctctggctaccatctgtccagggaccggagccactgcgaggacattgatgagtgtgacttccctgcagcctgcattgggggtgactgcatcaataccaatggctcctacagatgtctttgcccccaggggcatcggctggtgggtggcaggaaatgccaagacatagatgagtgcagccaggacccgagcctgtgccttccccatggggcctgcaagaaccttcagggctcctatgtgtgtgtctgcgatgagggcttcactcccacccaggaccagcacggttgtgaggaggtggagcagccccaccacaagaaggagtgctacctgaacttcgatgacacagtgttctgcgacagcgtattggccaccaacgtgacccagcaggagtgctgctgctctctgggggccggctggggcgaccactgcgaaatctacccctgcccagtctacagctcagccgagttccacagcctctgcccagacggaaagggctacacccaggacaacaacatcgtcaactacggcatcccagcccaccgtgacatcgacgagtgcatgttgttcgggtcggagatttgcaaggagggcaagtgcgtgaacacgcagcctggctacgagtgctactgcaagcagggcttctactacgacgggaacctgctggaatgcgtggacgtggacgagtgcctggacgagtccaactgccggaacggagtgtgtgagaacacgcgcggcggctaccgctgtgcctgcacgccccctgccgagtacagtcccgcgcagcgccagtgcctgagcccggaagagatggacgtggacgagtgccaggacccggcagcctgccgccctggccgctgcgtcaacctgccgggctcctaccgctgcgagtgtcgcccgccctgggtgcccgggccctccggccgcgattgccagctccccgagagcccggccgagcgtgccccggagcggcgcgacgtgtgctggagccagcgcggagaggacggcatgtgcgctggccccctggccgggcctgccctcaccttcgacgactgctgctgccgccagggccgcggctggggcgcccaatgccgaccgtgcccgccgcgcggcgcggggtcccattgcccgacatcgcagagcgagagcaattccttctgggacacaagccccctgctgttggggaagcccccaagagatgaggacagttcagaggaggattcagacgagtgtcgctgcgtgagtggccgctgcgtgccgcggccgggcggcgccgtgtgcgagtgtcccggcggcttccagctcgacgcctcccgcgcccgctgcgtggatatcgacgagtgccgagagctgaaccagcgcgggctgctgtgcaagagcgagcgctgcgtgaacaccagcggctccttccgctgcgtctgcaaagccggcttcgcgcgcagccgcccgcacggggcctgcgttccccagcgccgccgctgacgccgccgacgccgccctcggcccagacctcggtgatcactgagggatttccgcgagctcggcctcacttctgccccgacttgtggctcggacccagggaccttcagggcccgcagaccctcccggcgccttgagacccgaggcgcccctaccggcccccctccccggttagcgggcggttgtaaggtctccggcgggcgctgcctgccttcctcccagagggtgtttcctagaaactgataaatcagatcgtgcctcttt

SEQ ID NO: 147567 - DNA, 575 bp, Homo sapiens
  Payload ID: 9200
  Gene Symbol: LTBP3
  Gene Name: latent transforming growth factor beta binding protein 3
  ENST ID: ENST00000529371
  CDS Start-End: 205-575
ggcagggagacacgcgccaccgcgcccatcccgggcctgcccctgctacccacgcttttcctccctgcagacgtggacgagtgcctggacgagtccaactgccggaacggagtgtgtgagaacacgcgcggcggctaccgctgtgcctgcacgccccctgccgagtacagtcccgcgcagcgccagtgcctgagcccggaagagatggagcgtgccccggagcggcgcgacgtgtgctggagccagcgcggagaggacggcatgtgcgctggccccctggccgggcctgccctcaccttcgacgactgctgctgccgccagggccgcggctggggcgcccaatgccgaccgtgcccgccgcgcggcgcggggtcccattgcccgacatcgcagagcgagagcaattccttctgggacacaagccccctgctgttggggaagcccccaagagatgaggacagttcagaggaggattcagacgagtgtcgctgcgtgagtggccgctgcgtgccgcggccgggcggcgccgtgtgcgagtgtcccggcggcttccagctcgacgcctcccgcgcccg

SEQ ID NO: 147568 - DNA, 748 bp, Homo sapiens
  Payload ID: 9200
  Gene Symbol: LTBP3
  Gene Name: latent transforming growth factor beta binding protein 3
  ENST ID: ENST00000532661
  CDS Start-End: 84-748
ggtgcgcccagcccacgcctccgggctgcagctgcgggaccggagcggccagtgtttgtcaccccgcagacatcgacgagtgcatgttgttcgggtcggagatttgcaaggagggcaagtgcgtgaacacgcagcctggctacgagtgctactgcaagcagggcttctactacgacgggaacctgctggaatgcgtggacgtggacgagtgcctggacgagtccaactgccggaacggagtgtgtgagaacacgcgcggcggctaccgctgtgcctgcacgccccctgccgagtacagtcccgcgcagcgccagtgcctgagcccggaagagatggagcgtgccccggagcggcgcgacgtgtgctggagccagcgcggagaggacggcatgtgcgctggccccctggccgggcctgccctcaccttcgacgactgctgctgccgccagggccgcggctggggcgcccaatgccgaccgtgcccgccgcgcggcgcggggtcccattgcccgacatcgcagagcgagagcaattccttctgggacacaagccccctgctgttggggaagcccccaagagatgaggacagttcagaggaggattcagacgagtgtcgctgcgtgagtggccgctgcgtgccgcggccgggcggcgccgtgtgcgagtgtcccggcggcttccagctcgacgcctcccgcgcccgctgcgtggatatcgacgagtgccgagagctgaaccagcgcgggct

SEQ ID NO: 147569 - DNA, 4700 bp, Homo sapiens
  Payload ID: 9200
  Gene Symbol: LTBP3
  Gene Name: latent transforming growth factor beta binding protein 3
  ENST ID: ENST00000536982
  CDS Start-End: 3261-4052
cttgctccggcctcctcgctcctgcctgagttcggggcctggtctgggcttcgtcctggggctgggaagtttctgcgctccccgctgtccagtctgcatctccgcgcctcccgccgggcccccgcggtcccctcccgcccgcttcccccgctgccctccctcgctgccccctaccctctcccggggctcccggccctctactcccttcgggcgcgggcccctcgccccgcccgggcgcgccccccctcccccgggtcctgcggccccggatgcccgggccccgaggggctgctggcggcctggcccctgagatgcgcggggcgggggcggcggggctgctggcgctgctgctgctgctgctgctgctgctgctgggcctgggcggcagggtcgagggggggccggccggcgagcggggcgcaggcgggggcggggcgctggcccgcgagcgcttcaaggtggtctttgcgccggtgatctgcaagcggacctgtctcaagggccagtgtcgggacagttgtcagcagggctccaacatgacgctcatcggagagaacggccacagcacagacacgctcacgggctccggcttccgcgtggtggtgtgccctctcccctgcatgaatggcggccagtgctcctcgcgaaaccagtgcctgtgtcccccggacttcactgggcgcttctgccaggtgcccgcaggaggagccggtgggggtaccggcggctcaggccccggcctgagcaggacaggggccctgtccacaggggcgctgccgcccctggctccggagggcgactctgtggccagcaagcacgccatctacgccgtccaggtgatcgctgaccctcctgggcccggggaggggcctcctgcccagcacgcagccttcctggtgcccctaggcccgggacagatctcagcagaagtgcaggccccgccccccgtggtgaatgtgcgcgtccatcacccgcccgaggcctcagtccaggtgcaccgcattgagagctcgaacgccgagagcgcagccccctcccagcacctgctgccgcaccccaagccctcgcacccccggccgcccacccagaagcccctgggccgctgctttcaggacactctgcccaagcagccgtgtggcagcaaccccctccccggcctcaccaagcaggaagactgctgcggtagcatcggcactgcctggggccagagcaagtgccacaagtgtccccagctgcagtacacaggagtgcagaagccagggcctgtacgtggggaagtgggcgctgactgtccccagggctacaagaggcttaacagcacccactgccaggacatcaacgagtgcgcaatgccgggcgtgtgtcgccatggtgactgcctcaacaaccctggctcctatcgctgtgtctgcccacctggccatagtttaggcccctcccgtacacagtgcattgcagacaaaccggaggagaagagcctgtgtttccgcctggtgagccctgagcaccagtgccagcacccactgaccacccgcctgacccgccagctctgctgctgcagtgtcggcaaggcctggggcgcgcggtgtcagcgctgcccaacagatggcaccgctgcgttcaaggagatctgcccagctgggaagggataccacattctcacctcccaccagacgctcaccattcagggcgagagtgacttttcccttttcctgcaccctgacgggccacccaagccccagcagcttccggagagccctagccaggctccaccacctgaggacacagaggaagagagaggggtgaccacggactcaccggtgagtgaggagaggtcagtgcagcagagccacccaactgccaccacgactcctgcccggccctaccccgagctgatctcccgtccctcgcccccgaccatgcgctggttcctgccggacttgcctccttcccgcagcgccgtagagatcgctcccactcaggtcacagagactgatgagtgccgactgaaccagaacatctgtggccacggagagtgcgtgccgggcccccctgactactcctgccactgcaaccccggctaccggtcacatccccagcaccgctactgcgtggatgtgaacgagtgcgaggcagagccctgtggcccggggaggggcatctgcatgaacaccggcggctcctacaattgccactgcaaccgcggctaccgcctgcacgtgggcgccggggggcgctcgtgcgtggacctgaacgaatgcgccaagccccacctgtgcggcgacggcggcttctgcatcaactttcccggtcactacaagtgcaactgctaccccggctaccggctcaaagcctcccggcctcctgtgtgcgaagacatcgacgagtgccgggacccaagctcttgcccggatggcaaatgcgagaacaagcccgggagcttcaagtgcatcgcctgtcagcctggctaccgcagccaggggggcggggcctgtcgcgacgtgaacgagtgcgccgagggcagcccctgctcgcctggctggtgcgagaacctcccgggctccttccgctgcacctgtgcccagggctacgcgcccgcgcccgacggccgcagttgcttggatgtggacgagtgtgaggctggggacgtgtgtgacaatggcatctgcagcaacacgccaggatctttccagtgtcagtgcctctctggctaccatctgtccagggaccggagccactgcgaggacattgatgagtgtgacttccctgcagcctgcattgggggtgactgcatcaataccaatggctcctacagatgtctttgcccccaggggcatcggctggtgggtggcaggaaatgccaagacatagatgagtgcagccaggacccgagcctgtgccttccccatggggcctgcaagaaccttcagggctcctatgtgtgtgtctgcgatgagggcttcactcccacccaggaccagcacggttgtgaggaggtggagcagccccaccacaagaaggagtgctacctgaacttcgatgacacagtgttctgcgacagcgtattggccaccaacgtgacccagcaggagtgctgctgctctctgggggccggctggggcgaccactgcgaaatctacccctgcccagtctacagctcagccgagttccacagcctctgcccagacggaaagggctacacccaggacaacaacatcgtcaactacggcatcccagcccaccgtgacatcgacgagtgcatgttgttcgggtcggagatttgcaaggagggcaagtgcgtgaacacgcagcctggctacgagtgctactgcaagcagggcttctactacgacgggaacctgctggaatgcgtggacgtggacgagtgcctggacgagtccaactgccggaacggagtgtgtgagaacacgcgcggcggctaccgctgtgcctgcacgccccctgccgagtacagtcccgcgcagcgccagtgcctgagcccggaagagatggacgtggacgagtgccaggacccggcagcctgccgccctggccgctgcgtcaacctgccgggctcctaccgctgcgagtgtcgcccgccctgggtgcccgggccctccggccgcgattgccagctccccgagagcccggccgagcgtgccccggagcggcgcgacgtgtgctggagccagcgcggagaggacggcatgtgcgctggccccctggccgggcctgccctcaccttcgacgactgctgctgccgccagggccgcggctggggcgcccaatgccgaccgtgcccgccgcgcggcgcggggtcccattgcccgacatcgcagagcgagagcaattccttctgggacacaagccccctgctgttggggaagcccccaagagatgaggacagttcagaggaggattcagacgagtgtcgctgcgtgagtgccgctgcgtgccgcggccgggcggcgccgtgtgcgagtgtcccggcggcttccagctcgacgcctcccgcgcccgctgcgtggatatcgacgagtgccgagagctgaaccagcgcgggctgctgtgcaagagcgagcgctgcgtgaacaccagcggctccttccgctgcgtctgcaaagccggcttcgcgcgcagccgcccgcacggggcctgcgttccccagcgccgccgctgacgccgccgacgccgccctcggcccagacctcggtgatcactgagggatttccgcgagctcggcctcacttctgccccgacttgtggctcggacccagggaccttcagggcccgcagaccctcccggcgccttgagacccgaggcgcccctaccggcccccctccccggttagcgggcggttgtaaggtctccggcgggcgctgcctgccttcctcccagagggtgtttcctagaaactgataaatcagatcgtgcctctttacccttggctttcgaagcaaattgatgttcacgtctgacgtgggcgcgggctgcgcagggcggcgccagaccccagccgcctcccaggggctagactgagcccggcacaaggggtgtgaaatagaatttattgtggctctgattatgtacacgtgagatggcctggctgggccggccgggctcacatggtttgtacaataaatacatctgtggggcgggctctccgcagccgggaagggccaccgccacggttcagtcc

SEQ ID NO: 147570 - DNA, 5032 bp, Homo sapiens
  Payload ID: 9201
  Gene Symbol: LTBP4
  Gene Name: latent transforming growth factor beta binding protein 4
  ENST ID: ENST00000204005
  CDS Start-End: 1-4764
atgggagacgtaaaagcgttgctgtttgtcgctgctgcccgggccagacgtctaggaggagccgctgcatccgagtccctggctgtctccgaagccttctgcagggtccgaagctgccagcccaaaaagtgtgcaggcccccagcggtgcctgaacccagtgcctgcagtgcccagtcccagccccagcgtgaggaagagacaggtgtccctcaactggcagccactgacgctccaggaggccagagctctactgaagcggcggcggccccgggggccagggggccggggactactgagaaggaggcccccacagcgtgcccccgctggcaaggccccggtcctgtgtcccttgatctgtcacaatggcggtgtgtgcgtgaagcctgaccgctgcctctgtcccccggacttcgctggcaagttctgccagttgcactcctcgggcgcccggcccccggccccggctgtaccaggcctcacccgctccgtgtacactatgccactggccaaccaccgcgacgacgagcacggcgtggcatctatggtgagcgtccacgtggagcacccgcaggaggcgtcggtggtggtgcaccaggtggagcgtgtgtctggcccttgggaggaggcggacgctgaggcggtggcgcgggcggaagcggcggcgcgggcggaggcggcagcgccctacacggtgttggcacagagcgcgccgcgggaggacggctactcagatgcctcgggcttcggttactgctttcgggagctgcgcggaggcgaatgcgcgtccccgctgcccgggctccggacgcaggaggtctgctgccgaggggccggcttggcctggggcgttcacgactgtcagctgtgctccgagcgcctggggaactccgaaagagtgagcgccccagatggaccttgtccaaccggctttgaaagagttaatgggtcctgcgaagatgtggatgagtgcgcgactggcgggcgctgccagcacggcgagtgtgcaaacacgcgcggcgggtacacgtgtgtgtgccccgacggctttctgctcgactcgtcccgcagcagctgcatctcccaacacgtgatctcagaggccaaagggccctgcttccgcgtgctccgcgacggcggctgttcgctgcccattctgcggaacatcactaaacagatctgctgctgcagccgcgtaggcaaggcctggggccggggctgccagctctgcccacccttcggctcagagggtttccgggagatctgcccggctggtcctggttaccactactcggcctccgacctccgctacaacaccagacccctgggccaggagccaccccgagtgtcactcagccagcctcgtaccctgccagccacctctcggccatctgcaggctttctgcccacccatcgcctggagccccggcctgaaccccggcccgatccccggcccggccctgagcttcccttgcccagcatccctgcctggactggtcctgagattcctgaatcaggtccctcctccggcatgtgtcagcgcaacccccaggtctgcggcccaggacgctgcatttcccggcccagcggctacacctgcgcttgcgactctggcttccggctcagcccccagggcacccgatgcattgatgtggacgaatgtcgccgcgtgcccccgccctgtgctcccgggcgctgcgagaactcaccaggcagcttccgctgcgtgtgcggcccgggcttccgagccggcccacgggctgcggaatgcctggatgtggacgagtgccaccgcgtgccgccgccgtgtgacctcgggcgctgcgagaacacgccaggcagcttcctgtgcgtgtgccccgccgggtaccaggctgcaccgcacggagccagctgccaggatgtggatgaatgcacccagagcccaggcctgtgtggccgaggggcctgcaagaacctgcctggctctttccgctgtgtttgcccggctggcttccggggctcggcgtgtgaagaggatgtggatgagtgtgcccaggagccgccgccctgtgggcccggccgctgtgacaacacggcaggctcctttcactgtgcctgccctgctggcttccgctcccgagggcccggggccccctgccaagatgtggatgagtgtgcccgaagccccccaccctgcacctacggccggtgtgagaacacagaaggcagcttccagtgtgtctgccccatgggcttccaacccaacactgctggctccgagtgcgaggatgtggatgagtgtgagaaccacctcgcatgccctgggcaggagtgtgtgaactcgcccggctccttccagtgcaggacctgtccttctggccaccacctgcaccgtggcagatgcactgatgtggacgaatgcagttcgggtgcccctccctgtggtccccacggccactgcactaacaccgaaggctccttccgctgcagctgcgcgccaggctaccgggcgccgtcgggtcggcccgggccctgcgcagacgtgaacgagtgcctggagggcgatttctgcttccctcacggcgagtgcctcaacactgacggctcctttgcctgtacttgtgcccctggctaccgacccggaccccgcggagcctcttgcctcgacgttgacgagtgcagcgaggaggacctttgccagagcggcatctgtaccaacaccgacggctccttcgagtgcatctgtcctccgggacaccgcgctggcccggacctcgcctcctgcctcgacgtggacgaatgtcgcgagcgaggcccagccctgtgcgggtcgcagcgctgtgagaactctcccggctcctaccgctgtgtccgggactgcgatcctgggtaccacgcgggccccgagggcacctgtgacgatgtggatgagtgccaagaatatggtcccgagatttgtggagcccagcgttgtgagaacacccctggctcctaccgctgcacaccagcctgtgaccctggctatcagcccacgccagggggcggatgccaggatgtggacgaatgccggaaccggtccttctgcggtgcccacgccgtgtgccagaacctgcccggctccttccagtgcctctgtgaccagggttacgagggggcacgggatgggcgtcactgcgtggatgtgaacgagtgtgaaacactacagggtgtatgtggagctgccctgtgtgaaaatgtcgaaggctccttcctctgtgtctgccccaacagcccggaagagtttgaccccatgactggacgctgtgttcccccacgaacttctgctggcacgttcccaggctcgcagccccaggcacctgctagccccgttctgcccgccaggccacctccgccacccctgccccgccgacccagcacacctaggcagggccctgtggggagtgggcgccgggagtgctactttgacacagcggccccggatgcatgtgacaacatcctggctcggaatgtgacatggcaggagtgctgctgtactgtgggtgagggctggggcagcggctgccgcatccagcagtgcccgggcaccgagacagctgagtaccagtcattgtgccctcacggccggggctacctggcgcccagtggagacctgagcctccggagagacgtggacgaatgtcagctcttccgagaccaggtgtgcaagagtggcgtgtgtgtgaacacggccccgggctactcatgctattgcagcaacggctactactaccacacacagcggctggagtgcatcgacaatgacgagtgcgccgatgaggaaccggcctgtgagggcggccgctgtgtcaacactgtgggctcttatcactgtacctgcgagcccccactggtgctggatggctcgcagcgccgctgcgtctccaacgagagccagagcctcgatgacaatctgggagtgtgctggcaggaagtgggggctgacctcgtgtgcagccaccctcggctggaccgtcaggccacctacacagagtgctgctgcctgtatggagaggcctggggcatggactgcgccctctgccctgcgcaggactcagatgacttcgaggccctgtgcaatgtgctacgcccccccgcatatagccccccgcgaccaggtggctttggactcccctacgagtacggcccagacttaggtccaccttaccagggcctcccatatgggcctgagttgtacccaccacctgcgctaccctacgacccctacccaccgccacctgggcccttcgcccgccgggaggctccttatggggcaccccgcttcgacatgccagactttgaggacgatggtggcccctatggcgaatctgaggctcctgcgccacctggcccgggcacccgctggccctatcggtcccgggacacccgccgctccttcccagagcccgaggagcctcctgaaggtggaagctatgctggttccctggctgagccctacgaggagctggaggcggaggagtgcgggatcctggacggctgcaccaacggccgctgcgtgcgcgtccccgaaggcttcacctgccgttgcttcgacggctaccgcctggacatgacccgcatggcctgcgttgacatcaacgagtgtgatgaggccgaggctgcctccccgctgtgcgtcaacgcgcgttgcctcaacacggatggctccttccgctgcatctgccgcccgggattcgcacccacgcaccagccgcaccactgtgcgcccgcacggccccgggcctgagccctggcacccgctggccgcccacccgcgcccgccactcggggcccctgccgcgcatcctgcagcccgcttatgcgtatgtgcacggggccgcccgcctggacctggagaagggacctacggacgcctggaagctgcgacgccctgcactgctcccgcctccaccagcgcctcccactgatgtcgtggtcccgggcctggcccaggggcccctttacatgccctctcccttttataaaattttccattaaaaaccacctattttcta

SEQ ID NO: 147571 - DNA, 3140 bp, Homo sapiens
  Payload ID: 9201
  Gene Symbol: LTBP4
  Gene Name: latent transforming growth factor beta binding protein 4
  ENST ID: ENST00000243562
  CDS Start-End: 1-2873
atgtggacgaatgtcgccgcgtgcccccgccctgtgctcccgggcgctgcgagaactcaccaggcagcttccgctgcgtgtgcggcccgggcttccgagccggcccacgggctgcggaatgcctggatgtggacgagtgccaccgcgtgccgccgccgtgtgacctcgggcgctgcgagaacacgccaggcagcttcctgtgcgtgtgccccgccgggtaccaggctgcaccgcacggagccagctgccaggatgtggatgagtgtgcccgaagccccccaccctgcacctacggccggtgtgagaacacagaaggcagcttccagtgtgtctgccccatgggcttccaacccaacactgctggctccgagtgcgaggatgtggatgagtgtgagaaccacctcgcatgccctgggcaggagtgtgtgaactcgcccggctccttccagtgcaggacctgtccttctggccaccacctgcaccgtggcagatgcactgatgtggacgaatgcagttcgggtgcccctccctgtggtccccacggccactgcactaacaccgaaggctccttccgctgcagctgcgcgccaggctaccgggcgccgtcgggtcggcccgggccctgcgcagacgtgaacgagtgcctggagggcgatttctgcttccctcacggcgagtgcctcaacactgacggctcctttgcctgtacttgtgcccctggctaccgacccggaccccgcggagcctcttgcctcgacgttgacgagtgcagcgaggaggacctttgccagagcggcatctgtaccaacaccgacggctccttcgagtgcatctgtcctccgggacaccgcgctggcccggacctcgcctcctgcctcgacgtggacgaatgtcgcgagcgaggcccagccctgtgcgggtcgcagcgctgtgagaactctcccggctcctaccgctgtgtccgggactgcgatcctgggtaccacgcgggccccgagggcacctgtgacgatgtggatgagtgccaagaatatggtcccgagatttgtggagcccagcgttgtgagaacacccctggctcctaccgctgcacaccagcctgtgaccctggctatcagcccacgccagggggcggatgccaggatgtggacgaatgccggaaccggtccttctgcggtgcccacgccgtgtgccagaacctgcccggctccttccagtgcctctgtgaccagggttacgagggggcacgggatgggcgtcactgcgtggatgtgaacgagtgtgaaacactacagggtgtatgtggagctgccctgtgtgaaaatgtcgaaggctccttcctctgtgtctgccccaacagcccggaagagtttgaccccatgactggacgctgtgttcccccacgaacttctgctggcacgttcccaggctcgcagccccaggcacctgctagccccgttctgcccgccaggccacctccgccacccctgccccgccgacccagcacacctaggcagggccctgtggggagtgggcgccgggagtgctactttgacacagcggccccggatgcatgtgacaacatcctggctcggaatgtgacatggcaggagtgctgctgtactgtgggtgagggctggggcagcggctgccgcatccagcagtgcccgggcaccgagacagctgagtaccagtcattgtgccctcacggccggggctacctggcgcccagtggagacctgagcctccggagagacgtggacgaatgtcagctcttccgagaccaggtgtgcaagagtggcgtgtgtgtgaacacggccccgggctactcatgctattgcagcaacggctactactaccacacacagcggctggagtgcatcgacaatgacgagtgcgccgatgaggaaccggcctgtgagggcggccgctgtgtcaacactgtgggctcttatcactgtacctgcgagcccccactggtgctggatggctcgcagcgccgctgcgtctccaacgagagccagagcctcgatgacaatctgggagtgtgctggcaggaagtgggggctgacctcgtgtgcagccaccctcggctggaccgtcaggccacctacacagagtgctgctgcctgtatggagaggcctggggcatggactgcgccctctgccctgcgcaggactcagatgacttcgaggccctgtgcaatgtgctacgcccccccgcatatagccccccgcgaccaggtggctttggactcccctacgagtacggcccagacttaggtccaccttaccagggcctcccatatgggcctgagttgtacccaccacctgcgctaccctacgacccctacccaccgccacctgggcccttcgcccgccgggaggctccttatggggcaccccgcttcgacatgccagactttgaggacgatggtggcccctatggcgaatctgaggctcctgcgccacctggcccgggcacccgctggccctatcggtcccgggacacccgccgctccttcccagagcccgaggagcctcctgaaggtggaagctatgctggttccctggctgagccctacgaggagctggaggcggaggagtgcgggatcctggacggctgcaccaacggccgctgcgtgcgcgtccccgaaggcttcacctgccgttgcttcgacggctaccgcctggacatgacccgcatggcctgcgttgacatcaacgagtgtgatgaggccgaggctgcctccccgctgtgcgtcaacgcgcgttgcctcaacacggatggctccttccgctgcatctgccgcccgggattcgcacccacgcaccagccgcaccactgtgcgcccgcacggccccgggcctgagccctggcacccgctggccgcccacccgcgcccgccactcggggcccctgccgcgcatcctgcagcccgcttatgcgtatgtgcacggggccgcccgcctggacctggagaagggacctacggacgcctggaagctgcgacgccctgcactgctcccgcctccaccagcgcctcccactgatgtcgtggtcccgggcctggcccaggggcccctttacatgccctctcccttttataaaattttccattaaaaaccacctattttct

SEQ ID NO: 147572 - DNA, 4948 bp, Homo sapiens
  Payload ID: 9201
  Gene Symbol: LTBP4
  Gene Name: latent transforming growth factor beta binding protein 4
  Uniprot ID: Q8N2S1
  ENST ID: ENST00000308370
  CDS Start-End: 1-4875
atgccgaggcctggcaccagcggccgccgccccctcctgctggtgctgttgctgccgctcttcgcagccgccacctccgccgccagccccagccccagccccagccaggtcgtcgaggtcccgggggtccccagccgcccggccagcgttgctgtttgtcgctgctgcccgggccagacgtctaggaggagccgctgcatccgagccttctgcagggtccgaagctgccagcccaaaaagtgtgcaggcccccagcggtgcctgaacccagtgcctgcagtgcccagtcccagccccagcgtgaggaagagacaggtgtccctcaactggcagccactgacgctccaggaggccagagctctactgaagcggcggcggccccgggggccagggggccggggactactgagaaggaggcccccacagcgtgcccccgctggcaaggccccggtcctgtgtcccttgatctgtcacaatggcggtgtgtgcgtgaagcctgaccgctgcctctgtcccccggacttcgctggcaagttctgccagttgcactcctcgggcgcccggcccccggccccggctgtaccaggcctcacccgctccgtgtacactatgccactggccaaccaccgcgacgacgagcacggcgtggcatctatggtgagcgtccacgtggagcacccgcaggaggcgtcggtggtggtgcaccaggtggagcgtgtgtctggcccttgggaggaggcggacgctgaggcggtggcgcgggcggaagcggcggcgcgggcggaggcggcagcgccctacacggtgttggcacagagcgcgccgcgggaggacggctactcagatgcctcgggcttcggttactgctttcgggagctgcgcggaggcgaatgcgcgtccccgctgcccgggctccggacgcaggaggtctgctgccgaggggccggcttggcctggggcgttcacgactgtcagctgtgctccgagcgcctggggaactccgaaagagtgagcgccccagatggaccttgtccaaccggctttgaaagagttaatgggtcctgcgaagatgtggatgagtgcgcgactggcgggcgctgccagcacggcgagtgtgcaaacacgcgcggcgggtacacgtgtgtgtgccccgacggctttctgctcgactcgtcccgcagcagctgcatctcccaacacgtgatctcagaggccaaagggccctgcttccgcgtgctccgcgacggcggctgttcgctgcccattctgcggaacatcactaaacagatctgctgctgcagccgcgtaggcaaggcctggggccggggctgccagctctgcccacccttcggctcagagggtttccgggagatctgcccggctggtcctggttaccactactcggcctccgacctccgctacaacaccagacccctgggccaggagccaccccgagtgtcactcagccagcctcgtaccctgccagccacctctcggccatctgcaggctttctgcccacccatcgcctggagccccggcctgaaccccggcccgatccccggcccggccctgagcttcccttgcccagcatccctgcctggactggtcctgagattcctgaatcaggtccctcctccggcatgtgtcagcgcaacccccaggtctgcggcccaggacgctgcatttcccggcccagcggctacacctgcgcttgcgactctggcttccggctcagcccccagggcacccgatgcattgatgtggacgaatgtcgccgcgtgcccccgccctgtgctcccgggcgctgcgagaactcaccaggcagcttccgctgcgtgtgcggcccgggcttccgagccggcccacgggctgcggaatgcctggatgtggacgagtgccaccgcgtgccgccgccgtgtgacctcgggcgctgcgagaacacgccaggcagcttcctgtgcgtgtgccccgccgggtaccaggctgcaccgcacggagccagctgccaggatgtggatgaatgcacccagagcccaggcctgtgtggccgaggggcctgcaagaacctgcctggctctttccgctgtgtttgcccggctggcttccggggctcggcgtgtgaagaggatgtggatgagtgtgcccaggagccgccgccctgtgggcccggccgctgtgacaacacggcaggctcctttcactgtgcctgccctgctggcttccgctcccgagggcccggggccccctgccaagatgtggatgagtgtgcccgaagccccccaccctgcacctacggccggtgtgagaacacagaaggcagcttccagtgtgtctgccccatgggcttccaacccaacactgctggctccgagtgcgaggatgtggatgagtgtgagaaccacctcgcatgccctgggcaggagtgtgtgaactcgcccggctccttccagtgcaggacctgtccttctggccaccacctgcaccgtggcagatgcactgatgtggacgaatgcagttcgggtgcccctccctgtggtccccacggccactgcactaacaccgaaggctccttccgctgcagctgcgcgccaggctaccgggcgccgtcgggtcggcccgggccctgcgcagacgtgaacgagtgcctggagggcgatttctgcttccctcacggcgagtgcctcaacactgacggctcctttgcctgtacttgtgcccctggctaccgacccggaccccgcggagcctcttgcctcgacgttgacgagtgcagcgaggaggacctttgccagagcggcatctgtaccaacaccgacggctccttcgagtgcatctgtcctccgggacaccgcgctggcccggacctcgcctcctgcctcgacgtggacgaatgtcgcgagcgaggcccagccctgtgcgggtcgcagcgctgtgagaactctcccggctcctaccgctgtgtccgggactgcgatcctgggtaccacgcgggccccgagggcacctgtgacgatgtggatgagtgccaagaatatggtcccgagatttgtggagcccagcgttgtgagaacacccctggctcctaccgctgcacaccagcctgtgaccctggctatcagcccacgccagggggcggatgccaggatgtggacgaatgccggaaccggtccttctgcggtgcccacgccgtgtgccagaacctgcccggctccttccagtgcctctgtgaccagggttacgagggggcacgggatgggcgtcactgcgtggatgtgaacgagtgtgaaacactacagggtgtatgtggagctgccctgtgtgaaaatgtcgaaggctccttcctctgtgtctgccccaacagcccggaagagtttgaccccatgactggacgctgtgttcccccacgaacttctgctggcacgttcccaggctcgcagccccaggcacctgctagccccgttctgcccgccaggccacctccgccacccctgccccgccgacccagcacacctaggcagggccctgtggggagtgggcgccgggagtgctactttgacacagcggccccggatgcatgtgacaacatcctggctcggaatgtgacatggcaggagtgctgctgtactgtgggtgagggctggggcagcggctgccgcatccagcagtgcccgggcaccgagacagctgagtaccagtcattgtgccctcacggccggggctacctggcgcccagtggagacctgagcctccggagagacgtggacgaatgtcagctcttccgagaccaggtgtgcaagagtggcgtgtgtgtgaacacggccccgggctactcatgctattgcagcaacggctactactaccacacacagcggctggagtgcatcgacaatgacgagtgcgccgatgaggaaccggcctgtgagggcggccgctgtgtcaacactgtgggctcttatcactgtacctgcgagcccccactggtgctggatggctcgcagcgccgctgcgtctccaacgagagccagagcctcgatgacaatctgggagtgtgctggcaggaagtgggggctgacctcgtgtgcagccaccctcggctggaccgtcaggccacctacacagagtgctgctgcctgtatggagaggcctggggcatggactgcgccctctgccctgcgcaggactcagatgacttcgaggccctgtgcaatgtgctacgcccccccgcatatagccccccgcgaccaggtggctttggactcccctacgagtacggcccagacttaggtccaccttaccagggcctcccatatgggcctgagttgtacccaccacctgcgctaccctacgacccctacccaccgccacctgggcccttcgcccgccgggaggctccttatggggcaccccgcttcgacatgccagactttgaggacgatggtggcccctatggcgaatctgaggctcctgcgccacctggcccgggcacccgctggccctatcggtcccgggacacccgccgctccttcccagagcccgaggagcctcctgaaggtggaagctatgctggttccctggctgagccctacgaggagctggaggcggaggagtgcgggatcctggacggctgcaccaacggccgctgcgtgcgcgtccccgaaggcttcacctgccgttgcttcgacggctaccgcctggacatgacccgcatggcctgcgttgacatcaacgagtgtgatgaggccgaggctgcctccccgctgtgcgtcaacgcgcgttgcctcaacacggatggctccttccgctgcatctgccgcccgggattcgcacccacgcaccagccgcaccactgtgcgcccgcacggccccgggcctgagccctggcacccgctggccgcccacccgcgcccgccactcggggcccctgccgcgcatcctgcagcccgctta

SEQ ID NO: 147573 - DNA, 4764 bp, Homo sapiens
  Payload ID: 9201
  Gene Symbol: LTBP4
  Gene Name: latent transforming growth factor beta binding protein 4
  Uniprot ID: Q8N2S1
  ENST ID: ENST00000396819
  CDS Start-End: 18-4691
agcgcggcgctgcagccatggcgggcggcgtgcggctgctctgggtgtcgctattggtgctgctggcgcagctagggccgcagcctggactgggccggctcggagagcgtctccgcgtgcgcttcaccccggtcgtgtgcggcctgcgctgcgtccatgggccgaccggctcccgctgtaccccgacctgcgcgccccgcaacgccaccagcgtggacagcggcgctcccggcggggcggccccggggggacccggcttccgcgccttcctgtgtcccttgatctgtcacaatggcggtgtgtgcgtgaagcctgaccgctgcctctgtcccccggacttcgctggcaagttctgccagttgcactcctcgggcgcccggcccccggccccggctgtaccaggcctcacccgctccgtgtacactatgccactggccaaccaccgcgacgacgagcacggcgtggcatctatggtgagcgtccacgtggagcacccgcaggaggcgtcggtggtggtgcaccaggtggagcgtgtgtctggcccttgggaggaggcggacgctgaggcggtggcgcgggcggaagcggcggcgcgggcggaggcggcagcgccctacacggtgttggcacagagcgcgccgcgggaggacggctactcagatgcctcgggcttcggttactgctttcgggagctgcgcggaggcgaatgcgcgtccccgctgcccgggctccggacgcaggaggtctgctgccgaggggccggcttggcctggggcgttcacgactgtcagctgtgctccgagcgcctggggaactccgaaagagtgagcgccccagatggaccttgtccaaccggctttgaaagagttaatgggtcctgcgaagatgtggatgagtgcgcgactggcgggcgctgccagcacggcgagtgtgcaaacacgcgcggcgggtacacgtgtgtgtgccccgacggctttctgctcgactcgtcccgcagcagctgcatctcccaacacgtgatctcagaggccaaagggccctgcttccgcgtgctccgcgacggcggctgttcgctgcccattctgcggaacatcactaaacagatctgctgctgcagccgcgtaggcaaggcctggggccggggctgccagctctgcccacccttcggctcagagggtttccgggagatctgcccggctggtcctggttaccactactcggcctccgacctccgctacaacaccagacccctgggccaggagccaccccgagtgtcactcagccagcctcgtaccctgccagccacctctcggccatctgcaggctttctgcccacccatcgcctggagccccggcctgaaccccggcccgatccccggcccggccctgagcttcccttgcccagcatccctgcctggactggtcctgagattcctgaatcaggtccctcctccggcatgtgtcagcgcaacccccaggtctgcggcccaggacgctgcatttcccggcccagcggctacacctgcgcttgcgactctggcttccggctcagcccccagggcacccgatgcattgatgtggacgaatgtcgccgcgtgcccccgccctgtgctcccgggcgctgcgagaactcaccaggcagcttccgctgcgtgtgcggcccgggcttccgagccggcccacgggctgcggaatgcctggatgtggacgagtgccaccgcgtgccgccgccgtgtgacctcgggcgctgcgagaacacgccaggcagcttcctgtgcgtgtgccccgccgggtaccaggctgcaccgcacggagccagctgccaggatgtggatgaatgcacccagagcccaggcctgtgtggccgaggggcctgcaagaacctgcctggctctttccgctgtgtttgcccggctggcttccggggctcggcgtgtgaagaggatgtggatgagtgtgcccaggagccgccgccctgtgggcccggccgctgtgacaacacggcaggctcctttcactgtgcctgccctgctggcttccgctcccgagggcccggggccccctgccaagatgtggatgagtgtgcccgaagccccccaccctgcacctacggccggtgtgagaacacagaaggcagcttccagtgtgtctgccccatgggcttccaacccaacactgctggctccgagtgcgaggatgtggatgagtgtgagaaccacctcgcatgccctgggcaggagtgtgtgaactcgcccggctccttccagtgcaggacctgtccttctggccaccacctgcaccgtggcagatgcactgatgtggacgaatgcagttcgggtgcccctccctgtggtccccacggccactgcactaacaccgaaggctccttccgctgcagctgcgcgccaggctaccgggcgccgtcgggtcggcccgggccctgcgcagacgtgaacgagtgcctggagggcgatttctgcttccctcacggcgagtgcctcaacactgacggctcctttgcctgtacttgtgcccctggctaccgacccggaccccgcggagcctcttgcctcgacgttgacgagtgcagcgaggaggacctttgccagagcggcatctgtaccaacaccgacggctccttcgagtgcatctgtcctccgggacaccgcgctggcccggacctcgcctcctgcctcgacgtggacgaatgtcgcgagcgaggcccagccctgtgcgggtcgcagcgctgtgagaactctcccggctcctaccgctgtgtccgggactgcgatcctgggtaccacgcgggccccgagggcacctgtgacgatgtggatgagtgccaagaatatggtcccgagatttgtggagcccagcgttgtgagaacacccctggctcctaccgctgcacaccagcctgtgaccctggctatcagcccacgccagggggcggatgccaggatgtggacgaatgccggaaccggtccttctgcggtgcccacgccgtgtgccagaacctgcccggctccttccagtgcctctgtgaccagggttacgagggggcacgggatgggcgtcactgcgtggatgtgaacgagtgtgaaacactacagggtgtatgtggagctgccctgtgtgaaaatgtcgaaggctccttcctctgtgtctgccccaacagcccggaagagtttgaccccatgactggacgctgtgttcccccacgaacttctgctggcacgttcccaggctcgcagccccaggcacctgctagccccgttctgcccgccaggccacctccgccacccctgccccgccgacccagcacacctaggcagggccctgtggggagtgggcgccgggagtgctactttgacacagcggccccggatgcatgtgacaacatcctggctcggaatgtgacatggcaggagtgctgctgtactgtgggtgagggctggggcagcggctgccgcatccagcagtgcccgggcaccgagacagctgagtaccagtcattgtgccctcacggccggggctacctggcgcccagtggagacctgagcctccggagagacgtggacgaatgtcagctcttccgagaccaggtgtgcaagagtggcgtgtgtgtgaacacggccccgggctactcatgctattgcagcaacggctactactaccacacacagcggctggagtgcatcgacaatgacgagtgcgccgatgaggaaccggcctgtgagggcggccgctgtgtcaacactgtgggctcttatcactgtacctgcgagcccccactggtgctggatggctcgcagcgccgctgcgtctccaacgagagccagagcctcgatgacaatctgggagtgtgctggcaggaagtgggggctgacctcgtgtgcagccaccctcggctggaccgtcaggccacctacacagagtgctgctgcctgtatggagaggcctggggcatggactgcgccctctgccctgcgcaggactcagatgacttcgaggccctgtgcaatgtgctacgcccccccgcatatagccccccgcgaccaggtggctttggactcccctacgagtacggcccagacttaggtccaccttaccagggcctcccatatgggcctgagttgtacccaccacctgcgctaccctacgacccctacccaccgccacctgggcccttcgcccgccgggaggctccttatggggcaccccgcttcgacatgccagactttgaggacgatggtggcccctatggcgaatctgaggctcctgcgccacctggcccgggcacccgctggccctatcggtcccgggacacccgccgctccttcccagagcccgaggagcctcctgaaggtggaagctatgctggttccctggctgagccctacgaggagctggaggcggaggagtgcgggatcctggacggctgcaccaacggccgctgcgtgcgcgtccccgaaggcttcacctgccgttgcttcgacggctaccgcctggacatgacccgcatggcctgcgttgacatcaacgagtgtgatgaggccgaggctgcctccccgctgtgcgtcaacgcgcgttgcctcaacacggatggctccttccgctgcatctgccgcccgggattcgcacccacgcaccagccgcaccactgtgcgcccgcacggccccgggcctgagccctggcacccgctggccgcccacccgcgcccgccactcggggcccctgccgcgcatcctgcagcccgctta

SEQ ID NO: 147574 - DNA, 573 bp, Homo sapiens
  Payload ID: 9201
  Gene Symbol: LTBP4
  Gene Name: latent transforming growth factor beta binding protein 4
  ENST ID: ENST00000593463
  CDS Start-End: 1-573
acgttgacgagtgcagcgaggaggacctttgccagagcggcatctgtaccaacaccgacggctccttcgagtgcatctgtcctccgggacaccgcgctggcccggacctcgcctcctgcctcgacgtggacgaatgtcgcgagcgaggcccagccctgtgcgggtcgcagcgctgtgagaactctcccggctcctaccgctgtgtccgggactgcgatcctgggtaccacgcgggccccgagggcacctgtgacgatgtggatgagtgccaagaatatggtcccgagatttgtggagcccagcgttgtgagaacacccctggctcctaccgctgcacaccagcctgtgaccctggctatcagcccacgccagggggcggatgccaggatgtgaacgagtgtgaaacactacagggtgtatgtggagctgccctgtgtgaaaatgtcgaaggctccttcctctgtgtctgccccaacagcccggaagagtttgaccccatgactggacgctgtgttcccccacgaacttctgctgacgtggacgaatgtcagctcttccgagaccaggtgtgca

SEQ ID NO: 147575 - DNA, 910 bp, Homo sapiens
  Payload ID: 9201
  Gene Symbol: LTBP4
  Gene Name: latent transforming growth factor beta binding protein 4
  ENST ID: ENST00000599724
  CDS Start-End: 1-910
gagtgcctcaacactgacggctcctttgcctgtacttgtgcccctggctaccgacccggaccccgcggagcctcttgcctcgacgttgacgagtgcagcgaggaggacctttgccagagcggcatctgtaccaacaccgacggctccttcgagtgcatctgtcctccgggacaccgcgctggcccggacctcgcctcctgcctcgacgtggacgaatgtcgcgagcgaggcccagccctgtgcgggtcgcagcgctgtgagaactctcccggctcctaccgctgtgtccgggactgcgatcctgggtaccacgcgggccccgagggcacctgtgacgatgtgaacgagtgtgaaacactacagggtgtatgtggagctgccctgtgtgaaaatgtcgaaggctccttcctctgtgtctgccccaacagcccggaagagtttgaccccatgactggacgctgtgttcccccacgaacttctgctgacgtggacgaatgtcagctcttccgagaccaggtgtgcaagagtggcgtgtgtgtgaacacggccccgggctactcatgctattgcagcaacggctactactaccacacacagcggctggagtgcatcgacaatgacgagtgcgccgatgaggaaccggcctgtgagggcggccgctgtgtcaacactgtgggctcttatcactgtacctgcgagcccccactggtgctggatggctcgcagcgccgctgcgtctccaacgagagccagagcctcgatgacaatctgggagtgtgctggcaggaagtgggggctgacctcgtgtgcagccaccctcggctggaccgtcaggccacctacacagagtgctgctgcctgtatggagaggcctggggcatggactgcgccctctgccctgcgcaggact

SEQ ID NO: 147576 - DNA, 2019 bp, Homo sapiens
  Payload ID: 9201
  Gene Symbol: LTBP4
  Gene Name: latent transforming growth factor beta binding protein 4
  ENST ID: ENST00000601032
  CDS Start-End: 1-2019
gaacacagaaggcagcttccagtgtgtctgccccatgggcttccaacccaacactgctggctccgagtgcgaggatgtggatgagtgtgagaaccacctcgcatgccctgggcaggagtgtgtgaactcgcccggctccttccagtgcaggacctgtccttctggccaccacctgcaccgtggcagatgcactgatgtggacgaatgcagttcgggtgcccctccctgtggtccccacggccactgcactaacaccgaaggctccttccgctgcagctgcgcgccaggctaccgggcgccgtcgggtcggcccgggccctgcgcagacgtgaacgagtgcctggagggcgatttctgcttccctcacggcgagtgcctcaacactgacggctcctttgcctgtacttgtgcccctggctaccgacccggaccccgcggagcctcttgcctcgacgttgacgagtgcagcgaggaggacctttgccagagcggcatctgtaccaacaccgacggctccttcgagtgcatctgtcctccgggacaccgcgctggcccggacctcgcctcctgcctcgacgtggacgaatgtcgcgagcgaggcccagccctgtgcgggtcgcagcgctgtgagaactctcccggctcctaccgctgtgtccgggactgcgatcctgggtaccacgcgggccccgagggcacctgtgacgatgtgaacgagtgtgaaacactacagggtgtatgtggagctgccctgtgtgaaaatgtcgaaggctccttcctctgtgtctgccccaacagcccggaagagtttgaccccatgactggacgctgtgttcccccacgaacttctgctggcacgttcccaggctcgcagccccaggcacctgctagccccgttctgcccgccaggccacctccgccacccctgccccgccgacccagcacacctaggcagggccctgtggggagtgggcgccgggagtgctactttgacacagcggccccggatgcatgtgacaacatcctggctcggaatgtgacatggcaggagtgctgctgtactgtgggtgagggctggggcagcggctgccgcatccagcagtgcccgggcaccgagacagctgagtaccagtcattgtgccctcacggccggggctacctggcgcccagtggagacctgagcctccggagagacgtggacgaatgtcagctcttccgagaccaggtgtgcaagagtggcgtgtgtgtgaacacggccccgggctactcatgctattgcagcaacggctactactaccacacacagcggctggagtgcatcgacaatgacgagtgcgccgatgaggaaccggcctgtgagggcggccgctgtgtcaacactgtgggctcttatcactgtacctgcgagcccccactggtgctggatggctcgcagcgccgctgcgtctccaacgagagccagagcctcgatgacaatctgggagtgtgctggcaggaagtgggggctgacctcgtgtgcagccaccctcggctggaccgtcaggccacctacacagagtgctgctgcctgtatggagaggcctggggcatggactgcgccctctgccctgcgcaggactcagatgacttcgaggccctgtgcaatgtgctacgcccccccgcatatagccccccgcgaccaggtggctttggactcccctacgagtacggcccagacttaggtccaccttaccagggcctcccatatgggcctgagttgtacccaccacctgcgctaccctacgacccctacccaccgccacctgggcccttcgcccgccgggaggctccttatggggcaccccgcttcgacatgccagactttgaggacgatggtggcccctatggcgaatctgaggctcctgcgccacctggcccgggcacccgctggccctatcggtcccgggacacccgccgctccttcccagagcccgaggagcctcctgaaggtggaagctatgctggttccctggctgagcc

SEQ ID NO: 147577 - DNA, 670 bp, Homo sapiens
  Payload ID: 9201
  Gene Symbol: LTBP4
  Gene Name: latent transforming growth factor beta binding protein 4
  ENST ID: ENST00000597071
  CDS Start-End: 1-670
caacactgacggctcctttgcctgtacttgtgcccctggctaccgacccggaccccgcggagcctcttgcctcgacgttgacgagtgcagcgaggaggacctttgccagagcggcatctgtaccaacaccgacggctccttcgagtgcatctgtcctccgggacaccgcgctggcccggacctcgcctcctgcctcgacgtggacgaatgtcgcgagcgaggcccagccctgtgcgggtcgcagcgctgtgagaactctcccggctcctaccgctgtgtccgggactgcgatcctgggtaccacgcgggccccgagggcacctgtgacgatgtggatgagtgccaagaatatggtcccgagatttgtggagcccagcgttgtgagaacacccctggctcctaccgctgcacaccagcctgtgaccctggctatcagcccacgccagggggcggatgccaggatgtgaacgagtgtgaaacactacagggtgtatgtggagctgccctgtgtgaaaatgtcgaaggctccttcctctgtgtctgccccaacagcccggaagagtttgaccccatgactggacgctgtgttcccccacgaacttctgctggcacgttcccaggctcgcagccccaggcacctgctagccccgttctgcccgccaggccacct

SEQ ID NO: 147578 - DNA, 547 bp, Homo sapiens
  Payload ID: 9201
  Gene Symbol: LTBP4
  Gene Name: latent transforming growth factor beta binding protein 4
  ENST ID: ENST00000622457
  CDS Start-End: 1-547
atggtcccgagatttgtggagcccagcgttgtgagaacacccctggctcctaccgctgcacaccagcctgtgaccctggctatcagcccacgccagggggcggatgccaggatgtggacgaatgccggaaccggtccttctgcggtgcccacgccgtgtgccagaacctgcccggctccttccagtgcctctgtgaccagggttacgagggggcacgggatgggcgtcactgcgtggatgtgaacgagtgtgaaacactacagggtgtatgtggagctgccctgtgtgaaaatgtcgaaggctccttcctctgtgtctgccccaacagcccggaagagtttgaccccatgactggacgctgtgttcccccacgaacttctgctgacgtggacgaatgtcagctcttccgagaccaggtgtgcaagagtggcgtgtgtgtgaacacggccccgggctactcatgctattgcagcaacggctactactaccacacacagcggctggagtgcatcgacaatgacgagtgcgccgatgaggaaccggcctg

SEQ ID NO: 147579 - DNA, 281 bp, Homo sapiens
  Payload ID: 9201
  Gene Symbol: LTBP4
  Gene Name: latent transforming growth factor beta binding protein 4
  ENST ID: ENST00000599225
  CDS Start-End: 1-281
cccgcttcgacatgccagactttgaggacgatggtggcccctatggcgaatctgaggcggaggagtgcgggatcctggacggctgcaccaacggccgctgcgtgcgcgtccccgaaggcttcacctgccgttgcttcgacggctaccgcctggacatgacccgcatggcctgcgttgacatcaacgagtgtgatgaggccgaggctgcctccccgctgtgcgtcaacgcgcgttgcctcaacacggatggctccttccgctgcatctgccgcccgggattc

SEQ ID NO: 147580 - DNA, 755 bp, Homo sapiens
  Payload ID: 9201
  Gene Symbol: LTBP4
  Gene Name: latent transforming growth factor beta binding protein 4
  ENST ID: ENST00000612121
  CDS Start-End: 1-755
cttccgctgcagctgcgcgccaggctaccgggcgccgtcgggtcggcccgggccctgcgcagacgtgaacgagtgcctggagggcgatttctgcttccctcacggcgagtgcctcaacactgacggctcctttgcctgtacttgtgcccctggctaccgacccggaccccgcggagcctcttgcctcgacgttgacgagtgcagcgaggaggacctttgccagagcggcatctgtaccaacaccgacggctccttcgagtgcatctgtcctccgggacaccgcgctggcccggacctcgcctcctgcctcgacgtggacgaatgtcgcgagcgaggcccagccctgtgcgggtcgcagcgctgtgagaactctcccggctcctaccgctgtgtccgggactgcgatcctgggtaccacgcgggccccgagggcacctgtgacgatgtggacgaatgccggaaccggtccttctgcggtgcccacgccgtgtgccagaacctgcccggctccttccagtgcctctgtgaccagggttacgagggggcacgggatgggcgtcactgcgtggatgtgaacgagtgtgaaacactacagggtgtatgtggagctgccctgtgtgaaaatgtcgaaggctccttcctctgtgtctgccccaacagcccggaagagtttgaccccatgactggacgctgtgttcccccacgaacttctgctggcacgttcccaggctcgcagccccaggcacctgctagcc

SEQ ID NO: 147581 - DNA, 657 bp, Homo sapiens
  Payload ID: 9201
  Gene Symbol: LTBP4
  Gene Name: latent transforming growth factor beta binding protein 4
  ENST ID: ENST00000594537
  CDS Start-End: 5-217
ggagatgtctgcaagaacggcacctttctcctggtcaggcgggaaactgaggcccaaagaccaagaaacgctggcttctggacacacatcgtggaaggcgttgctgtttgtcgctgctgcccgggccagacgtctaggaggagccgctgcatccgagccttctgcagggtccgaagctgccagcccaaaaagtgtgcaggcccccagcggtgcctgaacccagtgcctgcagtgcccagtcccagccccagcgtgaggaagagacaggtgtccctcaactggcagccactgacgctccaggaggccagagctctactgaagcggcggcggccccgggggccagggggccggggactactgagaaggaggcccccacagcgtgcccccgctggcaaggccccggtcctgtgtcccttgatctgtcacaatggcggtgtgtgcgtgaagcctgaccgctgcctctgtcccccggacttcgctggcaagttctgccagttgcactcctcgggcgcccggcccccggccccggctgtaccaggcctcacccgctccgtgtacactatgccactggccaaccaccgcgacgacgagcacggcgtggcatctatggtgagcgtccacgtggagcacccgcaggaggcgtcggtggtggtgcac

SEQ ID NO: 147582 - DNA, 567 bp, Homo sapiens
  Payload ID: 9201
  Gene Symbol: LTBP4
  Gene Name: latent transforming growth factor beta binding protein 4
  ENST ID: ENST00000618486
  CDS Start-End: 1-567
acgttgacgagtgcagcgaggaggacctttgccagagcggcatctgtaccaacaccgacggctccttcgagtgcatctgtcctccgggacaccgcgctggcccggacctcgcctcctgcctcgacgtggacgaatgtcgcgagcgaggcccagccctgtgcgggtcgcagcgctgtgagaactctcccggctcctaccgctgtgtccgggactgcgatcctgggtaccacgcgggccccgagggcacctgtgacgatgtggacgaatgccggaaccggtccttctgcggtgcccacgccgtgtgccagaacctgcccggctccttccagtgcctctgtgaccagggttacgagggggcacgggatgggcgtcactgcgtggatgtgaacgagtgtgaaacactacagggtgtatgtggagctgccctgtgtgaaaatgtcgaaggctccttcctctgtgtctgccccaacagcccggaagagtttgaccccatgactggacgctgtgttcccccacgaacttctgctggcacgttcccaggctcgcagccccaggcacctgctagcc

SEQ ID NO: 147583 - DNA, 699 bp, Homo sapiens
  Payload ID: 9201
  Gene Symbol: LTBP4
  Gene Name: latent transforming growth factor beta binding protein 4
  ENST ID: ENST00000598166
  CDS Start-End: 1-438
ccacctggcccgggcacccgctggccctatcggtcccgggacacccgccgctccttcccagagcccgaggagcctcctgaaggtggaagctatgctggttccctggctgagccctacgaggagctggaggcggaggagtgcgggatcctggacggctgcaccaacggccgctgcgtgcgcgtccccgaaggcttcacctgccgttgcttcgacggctaccgcctggacatgacccgcatggcctgcgttgccttcagcagcgatcgttgtctcccctccgcagacatcaacgagtgtgatgaggccgaggctgcctccccgctgtgcgtcaacgcgcgttgcctcaacacggatggctccttccgctgcatctgccgcccgggattcgcacccacgcaccagccgcaccactgtgcgcccgcacggccccgggcctgagccctggcacccgctggccgcccacccgcgcccgccactcggggcccctgccgcgcatcctgcagcccgcttatgcgtatgtgcacggggccgcccgcctggacctggagaagggacctacggacgcctggaagctgcgacgccctgcactgctcccgcctccaccagcgcctcccactgatgtcgtggtcccgggcctggcccaggggcccctttacatgccctctcccttttataaaattttccattaaaaaccaccta

SEQ ID NO: 147584 - DNA, 726 bp, Homo sapiens
  Payload ID: 9201
  Gene Symbol: LTBP4
  Gene Name: latent transforming growth factor beta binding protein 4
  ENST ID: ENST00000599016
  CDS Start-End: 12-146
gcccccagcaaatgctccagccacaggcgttgctgtttgtcgctgctgcccgggccagacgtctaggaggagccgctgcatccgagccttctgcagggtccgaagctgccagcccaaaaagtgtgcaggcccccagcggtgcctgaacccagtgcctgcagtgcccagtcccagccccagcgtgaggaagagacaggtgtccctcaactggcagccactgacgctccaggaggccagagctctactgaagcggcggcggccccgggggccagggggccggggactactgagaaggaggcccccacagcgtgcccccgctggcaaggccccggtcctgtgtcccttgatctgtcacaatggcggtgtgtgcgtgaagcctgaccgctgcctctgtcccccggacttcgctggcaagttctgccagttgcactcctcgggcgcccggcccccggccccggctgtaccaggcctcacccgctccgtgtacactatgccactggccaaccaccgcgacgacgagcacggcgtggcatctatggtgagcgtccacgtggagcacccgcaggaggcgtcggtggtggtgcaccaggtggagcgtgtgtctggcccttgggaggaggcggacgctgaggcggtggcgcgggcggaagcggcggcgcgggcggaggcggcagcgccctacacggtgttggcacagagcgcgccgcgggaggacggctactcaga

SEQ ID NO: 147585 - DNA, 723 bp, Homo sapiens
  Payload ID: 9201
  Gene Symbol: LTBP4
  Gene Name: latent transforming growth factor beta binding protein 4
  ENST ID: ENST00000600026
  CDS Start-End: 284-418
gtttctgacaaaaaggacctgaaaaatcactgattctagaataggggagtgtcaaggggagttcatacccatgaatctccaccggtaggaatatcttgcatgccaggatgtctggaatgctgagaattataggatacagaaaggaacctggattactaggaaatctagagaatgggagagatcctggactatccgcccttccagagcactggaaggtttgtttgcgttccaagaaatccataatggcaggagattccggattatcagagaatctggaacacaaatgggagacgtaaaagcgttgctgtttgtcgctgctgcccgggccagacgtctaggaggagccgctgcatccgagccttctgcagggtccgaagctgccagcccaaaaagtgtgcaggcccccagcggtgcctgaacccagtgcctgcagtgcccagtcccagccccagcgtgaggaagagacaggtgtccctcaactggcagccactgacgctccaggaggccagagctctactgaagcggcggcggccccgggggccagggggccggggactactgagaaggaggcccccacagcgtgcccccgctggcaaggccccggtcctgtgtcccttgatctgtcacaatggcggtgtgtgcgtgaagcctgaccgctgcctctgtcccccggacttcgctggcaagttctgccagttgcactcctcgggcgcccggcccccg

SEQ ID NO: 147586 - DNA, 1116 bp, Homo sapiens
  Payload ID: 9202
  Gene Symbol: LXN
  Gene Name: latexin
  Uniprot ID: Q9BS40
  ENST ID: ENST00000264265
  CDS Start-End: 216-884
agaagcagtcagcccagggctctcggatgcagggagcctgggcccaaacagcagcttccggagtcggaaggagctgaggaagaagactgactgaaggagcttgcgacttttccgcctcggcaaccggacccagcagcaagcaggacgggcggcgctctgctactggtcccgttaagccagagtagcccaagccctgaagtcactgctcatccggaatggaaatcccgccgaccaactacccagcctccagggcggccttggtggcacagaactacatcaactaccagcaggggaccccgcacagggtgtttgaggtgcagaaggtcaaacaagccagcatggaggatattccaggaagaggacataagtatcaccttaaatttgctgttgaagaaattatacaaaaacaagttaaggtgaactgcacagctgaagtactttacccttcaacgggacaagaaactgcaccagaagtcaacttcacatttgaaggagaaactggaaagaatccagatgaagaagacaacacattttatcaaagacttaagtccatgaaggaaccgctagaagcacaaaatattccagacaattttggaaatgtatctccagaaatgacgctcgttctacatttagcctgggttgcctgtggttatataatatggcaaaattctactgaagacacatggtataaaatggtaaaaattcaaactgtcaagcaagtgcaaagaaatgatgactttattgaattagactacaccattctacttcataatatagcatctcaggagattattccctggcaaatgcaagttctctggcatccacaatacggcactaaagtaaaacataatagccgtctgccaaaggaagtacaactggaataaacaaaaaccctaacactggaagtgtaaacatgtctattgatgtgtatgccaatttcactggcatctagcttatgaggccaaataatcccaaagtgtcactttatataaatgtcttgattacagtatagaactttatagagtccataatacaaagtatcactacataaaaatgtctttaaaacagtaatagtggtatgtatatccaaaataaaaagcttcaatttcagcctca

SEQ ID NO: 147587 - DNA, 749 bp, Homo sapiens
  Payload ID: 9202
  Gene Symbol: LXN
  Gene Name: latexin
  ENST ID: ENST00000482640
  CDS Start-End: 1-472
cacagctgaagtactttacccttcaacgggacaagaaactgcaccagaagtcaacttcacatttgaaggagaaactggaaagaatccagatgaagaagacaacacattttatcaaagacttaagtccatgaaggaaccgctagaagcacaaaatattccagacaattttggaaatgtatctccagaaatgacgctcgttctacatttagcctgggttgcctgtggttatataatatggcaaaattctactgaagacacatggtataaaatggtaaaaattcaaactgtcaagcaagtgcaaagaaatgatgactttattgaattagactacaccattctacttcataatatagcatctcagttccatggaatccatgacagcaccaactccatctttacctttcacctaaacacaagcacagcaattcagactttctctgtccctgcattccaagaaggaaagaaatcttaactgaaatggaaacagttgccaggtgcagtggctcatgcctataatcccagcactgtgggagactgaggcaggatgataatttgagcccaagagtttgagaccagcctgagcaacaaagtgagacctcttctataaaaaataaaaataaaaccagaacacagatacttaacttaagcaactttcagataagcctaactgtcaaaagtccgctgttaccattgttttaatctttcaggtttataagctttattaaataatagcaacaaaacaattaaaa

SEQ ID NO: 147588 - DNA, 2066 bp, Homo sapiens
  Payload ID: 9203
  Gene Symbol: LAYN
  Gene Name: layilin
  Uniprot ID: Q6UX15
  ENST ID: ENST00000375614
  CDS Start-End: 337-1461
aaacgcgggatctcccagggaagctcggagggggacagggagctggttcccctctgcgactcgcccctctctggctggccgagtgtctggcgccaacctcgctggaggaggctgtcgggggcgggccagccagcggggctgccctcctcgcagtgacgtcccagggggcggaggggcgaccgactgactccgcgccctcccccccgcctcccgtgcggtccgtcggtggcctagagatgctgctgccgcggttgcagttgtcgcgcacgcctctgcccgccagcccgctccaccgccgtagcgcccgagtgtcggggggcgcacccgagtcgggccatgaggccgggaaccgcgctacaggccgtgctgctggccgtgctgctggtggggctgcgggccgcgacgggtcgcctgctgagtgggcagccagtctgccggggagggacacagaggccttgttataaagtcatttacttccatgatacttctcgaagactgaactttgaggaagccaaagaagcctgcaggagggatggaggccagctagtcagcatcgagtctgaagatgaacagaaactgatagaaaagttcattgaaaacctcttgccatctgatggtgacttctggattgggctcaggaggcgtgaggagaaacaaagcaatagcacagcctgccaggacctttatgcttggactgatggcagcatatcacaatttaggaactggtatgtggatgagccatcctgcggcagcgaggtctgcgtggtcatgtaccatcagccatcggcacccgctggcatcggaggcccctacatgttccagtggaatgatgaccggtgcaacatgaagaacaatttcatttgcaaatattctgatgagaaaccagcagttccttctagagaagctgaaggtgaggaaacagagctgacaacacctgtacttccagaagaaacacaggaagaagatgccaaaaaaacatttaaagaaagtagagaagctgccttgaatctggcctacatcctaatccccagcattccccttctcctcctccttgtggtcaccacagttgtatgttgggtttggatctgtagaaaaagaaaacgggagcagccagaccctagcacaaagaagcaacacaccatctggccctctcctcaccagggaaacagcccggacctagaggtctacaatgtcataagaaaacaaagcgaagctgacttagctgagacccggccagacctgaagaatatttcattccgagtgtgttcgggagaagccactcccgatgacatgtcttgtgactatgacaacatggctgtgaacccatcagaaagtgggtttgtgactctggtgagcgtggagagtggatttgtgaccaatgacatttatgagttctccccagaccaaatggggaggagtaaggagtctggatgggtggaaaatgaaatatatggttattaggacatataaaaaactgaaactgacaacaatggaaaagaaatgataagcaaaatcctcttattttctataaggaaaatacacagaaggtctatgaacaagcttagatcaggtcctgtggatgagcatgtggtccccacgacctcctgttggacccccacgttttggctgtatcctttatcccagccagtcatccagctcgaccttatgagaaggtaccttgcccaggtctggcacatagtagagtctcaataaatgtcacttggttggttgtatctaacttttaagggacagagctttacctggcagtgataaagatgggctgtggagcttggaaaaccacctctgttttccttgctctatacagcagcacatattatcatacagacagaaaatccagaatcttttcaaagcccacatatggtagcacaggctggcctgtgcatcggcaattctcatatctgtttttttcaaagaataataaaatcaaataaagagcaggaaacagagtgttagtctgtgtctacagcccttcctctgcatgtggccacaggggacctttttttgtttctcctgacatccagacttggaaatatctaactacttgc

SEQ ID NO: 147589 - DNA, 1836 bp, Homo sapiens
  Payload ID: 9203
  Gene Symbol: LAYN
  Gene Name: layilin
  Uniprot ID: Q6UX15
  ENST ID: ENST00000375615
  CDS Start-End: 186-1334
agtgacgtcccagggggcggaggggcgaccgactgactccgcgccctcccccccgcctcccgtgcggtccgtcggtggcctagagatgctgctgccgcggttgcagttgtcgcgcacgcctctgcccgccagcccgctccaccgccgtagcgcccgagtgtcggggggcgcacccgagtcgggccatgaggccgggaaccgcgctacaggccgtgctgctggccgtgctgctggtggggctgcgggccgcgacgggtcgcctgctgagtgcctcggatttggacctcagaggagggcagccagtctgccggggagggacacagaggccttgttataaagtcatttacttccatgatacttctcgaagactgaactttgaggaagccaaagaagcctgcaggagggatggaggccagctagtcagcatcgagtctgaagatgaacagaaactgatagaaaagttcattgaaaacctcttgccatctgatggtgacttctggattgggctcaggaggcgtgaggagaaacaaagcaatagcacagcctgccaggacctttatgcttggactgatggcagcatatcacaatttaggaactggtatgtggatgagccatcctgcggcagcgaggtctgcgtggtcatgtaccatcagccatcggcacccgctggcatcggaggcccctacatgttccagtggaatgatgaccggtgcaacatgaagaacaatttcatttgcaaatattctgatgagaaaccagcagttccttctagagaagctgaaggtgaggaaacagagctgacaacacctgtacttccagaagaaacacaggaagaagatgccaaaaaaacatttaaagaaagtagagaagctgccttgaatctggcctacatcctaatccccagcattccccttctcctcctccttgtggtcaccacagttgtatgttgggtttggatctgtagaaaaagaaaacgggagcagccagaccctagcacaaagaagcaacacaccatctggccctctcctcaccagggaaacagcccggacctagaggtctacaatgtcataagaaaacaaagcgaagctgacttagctgagacccggccagacctgaagaatatttcattccgagtgtgttcgggagaagccactcccgatgacatgtcttgtgactatgacaacatggctgtgaacccatcagaaagtgggtttgtgactctggtgagcgtggagagtggatttgtgaccaatgacatttatgagttctccccagaccaaatggggaggagtaaggagtctggatgggtggaaaatgaaatatatggttattaggacatataaaaaactgaaactgacaacaatggaaaagaaatgataagcaaaatcctcttattttctataaggaaaatacacagaaggtctatgaacaagcttagatcaggtcctgtggatgagcatgtggtccccacgacctcctgttggacccccacgttttggctgtatcctttatcccagccagtcatccagctcgaccttatgagaaggtaccttgcccaggtctggcacatagtagagtctcaataaatgtcacttggttggttgtatctaacttttaagggacagagctttacctggcagtgataaagatgggctgtggagcttggaaaaccacctctgttttccttgctctatacagcagcacatattatcatacagacagaaaatccagaatcttttcaaagcccacatatggtagcacaggctggcctgtgcatcggcaattctcatatctgtttttttcaaagaataataaaatcaaataaagagcaggaaa

SEQ ID NO: 147590 - DNA, 2590 bp, Homo sapiens
  Payload ID: 9203
  Gene Symbol: LAYN
  Gene Name: layilin
  Uniprot ID: Q6UX15
  ENST ID: ENST00000436913
  CDS Start-End: 614-1303
aaacgcgggatctcccagggaagctcggagggggacagggagctggttcccctctgcgactcgcccctctctggctggccgagtgtctggcgccaacctcgctggaggaggctgtcgggggcgggccagccagcggggctgccctcctcgcagtgacgtcccagggggcggaggggcgaccgactgactccgcgccctcccccccgcctcccgtgcggtccgtcggtggcctagagatgctgctgccgcggttgcagttgtcgcgcacgcctctgcccgccagcccgctccaccgccgtagcgcccgagtgtcggggggcgcacccgagtcgggccatgaggccgggaaccgcgctacaggccgtgctgctggccgtgctgctggtggggctgcgggccgcgacgggtcgcctgctgagtgggcagccagtctgccggggagggacacagaggccttgttataaagtcatttacttccatgatacttctcgaagactgaactttgaggaagccaaagaagcctgcaggagggatggaggccagctagtcagcatcgagtctgaagatgaacagaaactgatagaaaagttcattgaaaacctcttgccatctgatggtgacttctggattgggctcaggaggcgtgaggagaaacaaagcaatagcacagcctgccaggacctttatgcttggactgatggcagcatatcacaatttagagaaaccagcagttccttctagagaagctgaaggtgaggaaacagagctgacaacacctgtacttccagaagaaacacaggaagaagatgccaaaaaaacatttaaagaaagtagagaagctgccttgaatctggcctacatcctaatccccagcattccccttctcctcctccttgtggtcaccacagttgtatgttgggtttggatctgtagaaaaagaaaacgggagcagccagaccctagcacaaagaagcaacacaccatctggccctctcctcaccagggaaacagcccggacctagaggtctacaatgtcataagaaaacaaagcgaagctgacttagctgagacccggccagacctgaagaatatttcattccgagtgtgttcgggagaagccactcccgatgacatgtcttgtgactatgacaacatggctgtgaacccatcagaaagtgggtttgtgactctggtgagcgtggagagtggatttgtgaccaatgacatttatgagttctccccagaccaaatggggaggagtaaggagtctggatgggtggaaaatgaaatatatggttattaggacatataaaaaactgaaactgacaacaatggaaaagaaatgataagcaaaatcctcttattttctataaggaaaatacacagaaggtctatgaacaagcttagatcaggtcctgtggatgagcatgtggtccccacgacctcctgttggacccccacgttttggctgtatcctttatcccagccagtcatccagctcgaccttatgagaaggtaccttgcccaggtctggcacatagtagagtctcaataaatgtcacttggttggttgtatctaacttttaagggacagagctttacctggcagtgataaagatgggctgtggagcttggaaaaccacctctgttttccttgctctatacagcagcacatattatcatacagacagaaaatccagaatcttttcaaagcccacatatggtagcacaggctggcctgtgcatcggcaattctcatatctgtttttttcaaagaataataaaatcaaataaagagcaggaaacagagtgttagtctgtgtctacagcccttcctctgcatgtggccacaggggacctttttttgtttctcctgacatccagacttggaaatatctaactacttgcaaaactaaaaatgaggccaggcgcagtggctgacgcctgtaatcccagaaccttgggagaccaagattggaggatagcttgagttcaggagttccagaccttcctgggcaaaatagtgagactctgactctacaaaaaatttaaaaattagcagggcatggtggcatgcgcctgcagtcccagctactcaggaggccgaggtgggggaattgcttgagcccaggaggttgaggctgcagtgagctaggatcacgccactgctctcctgcgtgggcaacagaatgagaccctgtctctaaacaaaaatattttttaaagaaactaaaaatgaaatttgagtctcagcttctaggcttatgtactcccatccctgatactacacgttgttctgtttgcatgtttgttactgcagcatcaacataacatgactaataatgatgacagttctaccttttgttgacagacctcattgtttcaattgtgtttggcctcaaattcagagaaaagtttctcagcccagcatcaatcatatacacattggaggtctgaaagccattatttaaatcaccagcaatttccctcaatcagcttcataatctcatattttaacctttcctcatatgtcttattttttaatagctcagcaactttgcttcacatatggagccccaacctctagagt

SEQ ID NO: 147591 - DNA, 927 bp, Homo sapiens
  Payload ID: 9203
  Gene Symbol: LAYN
  Gene Name: layilin
  ENST ID: ENST00000530962
  CDS Start-End: 601-927
cgctccgggaggcggccgcagagacagcggggtagggatgctggatccccggtgccgtgggaaccctgcctgttactcctcgtctcttctgcggggttggatggctgggtcgagcgcccggtatgagagcgcttagagatcgggaaagaactccagttagtgtgggacgagccccacctgactccggggaatgactctctgcttccttcctcctgttgtgtcactgcagcctcggatttggacctcagaggagggcagccagtctgccggggagggacacagaggccttgttataaagtcatttacttccatgatacttctcgaagactgaactttgaggaagccaaagaagcctgcaggagggatggaggccagctagtcagcatcgagtctgaagatgaacagaaactgatagaaaagttcattgaaaacctcttgccatctgatggtgacttctggattgggctcaggaggcgtgaggagaaacaaagcaatagcacagcctgccaggacctttatgcttggactgatggcagcatatcacaatttaggaactggtatgtggatgagccatcctgcggcagcgaggtctgcgtggtcatgtaccatcagccatcggcacccgctggcatcggaggcccctacatgttccagtggaatgatgaccggtgcaacatgaagaacaatttcatttgcaaatattctgatgagaaaccagcagttccttctagagaagctgaaggtgaggaaacagagctgacaacacctgtacttccagaagaaacacaggaagaagatgccaaaaaaacatttaaagaaagtagagaagctgccttgaatctggcctacatcctaatccccagcattccccttctcctcctccttgtggtcaccacagttgtatgttgggtttggatctgtagaaaa

SEQ ID NO: 147592 - DNA, 550 bp, Homo sapiens
  Payload ID: 9203
  Gene Symbol: LAYN
  Gene Name: layilin
  ENST ID: ENST00000533999
  CDS Start-End: 403-550
attccctgctcaggcgtcgcccttcgtgctgggactgcggcctgctgagccccagggcagccagtctgccggggagggacacagaggccttgttataaagtcatttacttccatgatacttctcgaagactgaactttgaggaagccaaagaagcctgcaggagggatggaggccagctagtcagcatcgagtctgaagatgaacagaaactgatagaaaagttcattgaaaacctcttgccatctgatggtgacttctggattgggctcaggaggcgtgaggagaaacaaagcaatagcacagcctgccaggacctttatgcttggactgatggcagcatatcacaatttaggaactggtatgtggatgagccatcctgcggcagcgaggtctgcgtggtcatgtaccatcagccatcggcacccgctggcatcggaggcccctacatgttccagtggaatgatgaccggtgcaacatgaagaacaatttcatttgcaaatattctgatgagaaaccagcagttccttctagagaagctgaaggtgagg

SEQ ID NO: 147593 - DNA, 2172 bp, Homo sapiens
  Payload ID: 9203
  Gene Symbol: LAYN
  Gene Name: layilin
  ENST ID: ENST00000525866
  CDS Start-End: 125-529
gtgcggtccgtcggtggcctagagatgctgctgccgcggttgcagttgtcgcgcacgcctctgcccgccagcccgctccaccgccgtagcgcccgagtgtcggggggcgcacccgagtcgggccatgaggccgggaaccgcgctacaggccgtgctgctggccgtgctgctggtggggctgcgggccgcgacgggtcgcctgctgagtgggcagccagtctgccggggagggacacagaggccttgttataaagtcatttacttccatgatacttctcgaagactgaactttgaggaagccaaagaagcctgcaggagggatggaggccagctagtcagcatcgagtctgaagatgaacagaaactgatagaaaagttcattgaaaacctcttgccatctgatggtgacttctggattgggctcaggaggcgtgaggagaaacaaagcaatagcacagcctgccaggacctttatgcttggactgatggcagcatatcacaatttagagaaaccagcagttccttctagagaagctgaaggtgaggaaacagagctgacaacacctgtacttccagaagaaacacaggaagaagatgccaaaaaaacatttaaagaaagtagagaagctgccttgaatctggcctacatcctaatccccagcattccccttctcctcctccttgtggtcaccacagttgtatgttgggtttggatctgtagaaaaagaaaacgggagcagccagaccctagcacaaagaagcaacacaccatctggccctctcctcaccagggaaacagcccggacctagaggtctacaatgtcataagaaaacaaagcgaagctgacttagctgagacccggccagacctgaagaatatttcattccgagtgtgttcgggagaagccactcccgatgacatgtcttgtgactatgacaacatggctgtgaacccatcagaaagtgggtttgtgactctggtgagcgtggagagtggatttgtgaccaatgacatttatgagttctccccagaccaaatggggaggagtaaggagtctggatgggtggaaaatgaaatatatggttattaggacatataaaaaactgaaactgacaacaatggaaaagaaatgataagcaaaatcctcttattttctataaggaaaatacacagaaggtctatgaacaagcttagatcaggtcctgtggatgagcatgtggtccccacgacctcctgttggacccccacgttttggctgtatcctttatcccagccagtcatccagctcgaccttatgagaaggtaccttgcccaggtctggcacatagtagagtctcaataaatgtcacttggttggttgtatctaacttttaagggacagagctttacctggcagtgataaagatgggctgtggagcttggaaaaccacctctgttttccttgctctatacagcagcacatattatcatacagacagaaaatccagaatcttttcaaagcccacatatggtagcacaggctggcctgtgcatcggcaattctcatatctgtttttttcaaagaataataaaatcaaataaagagcaggaaacagagtgttagtctgtgtctacagcccttcctctgcatgtggccacaggggacctttttttgtttctcctgacatccagacttggaaatatctaactacttgcaaaactaaaaatgaggccaggcgcagtggctgacgcctgtaatcccagaaccttgggagaccaagattggaggatagcttgagttcaggagttccagaccttcctgggcaaaatagtgagactctgactctacaaaaaatttaaaaattagcagggcatggtggcatgcgcctgcagtcccagctactcaggaggccgaggtgggggaattgcttgagcccaggaggttgaggctgcagtgagctaggatcacgccactgctctcctgcgtgggcaacagaatgagaccctgtctctaaacaaaaatattttttaaagaaactaaaaatgaaatttgagtctcagcttctaggcttatgtactcccatccctgatactacacgttgttctgtttgcatgtttgttactgcagcatcaacataacatgactaataatgatgacagttctaccttttgttgacagacctcattgtttc

SEQ ID NO: 147594 - DNA, 1763 bp, Homo sapiens
  Payload ID: 9203
  Gene Symbol: LAYN
  Gene Name: layilin
  ENST ID: ENST00000525126
  CDS Start-End: 136-948
ccccgcctcccgtgcggtccgtcggtggcctagagatgctgctgccgcggttgcagttgtcgcgcacgcctctgcccgccagcccgctccaccgccgtagcgcccgagtgtcggggggcgcacccgagtcgggccatgaggccgggaaccgcgctacaggccgtgctgctggccgtgctgctggtggggctgcgggccgcgacgggtcgcctgctgagtgcctcggatttggacctcagaggagggcagccagtctgccggggagggacacagaggccttgttataaagtcatttacttccatgatacttctcgaagactgaactttgaggaagccaaagaagcctgcaggagggatggaggccagctagtcagcatcgagtctgaagatgaacagaaactgatagaaaagttcattgaaaacctcttgccatctgatggtgacttctggattgggctcaggaggcgtgaggagaaacaaagcaatagcacagcctgccaggacctttatgcttggactgatggcagcatatcacaatttaggaactggtatgtggatgagccatcctgcggcagcgaggtctgcgtggtcatgtaccatcagccatcggcacccgctggcatcggaggcccctacatgttccagtggaatgatgaccggtgcaacatgaagaacaatttcatttgcaaatattctgatgagaaaccagcagttccttctagagaagctgaaggtgaggaaacagagctgacaacacctgtacttccagaagaaacacaggaagaagatgccaaaaaaacatttaaagaaagtagagaagctgccttgaatctggcctacatcctaatccccagcattccccttctcctcctccttgtggtcaccacagttgtatgttgggtttggatctgtagaaaaaggcaaaaaacgggagcagccagaccctagcacaaagaagcaacacaccatctggccctctcctcaccagggaaacagcccggacctagaggtctacaatgtcataagaaaacaaagcgaagctgacttagctgagacccggccagacctgaagaatatttcattccgagtgtgttcgggagaagccactcccgatgacatgtcttgtgactatgacaacatggctgtgaacccatcagaaagtgggtttgtgactctggtgagcgtggagagtggatttgtgaccaatgacatttatgagttctccccagaccaaatggggaggagtaaggagtctggatgggtggaaaatgaaatatatggttattaggacatataaaaaactgaaactgacaacaatggaaaagaaatgataagcaaaatcctcttattttctataaggaaaatacacagaaggtctatgaacaagcttagatcaggtcctgtggatgagcatgtggtccccacgacctcctgttggacccccacgttttggctgtatcctttatcccagccagtcatccagctcgaccttatgagaaggtaccttgcccaggtctggcacatagtagagtctcaataaatgtcacttggttggttgtatctaacttttaagggacagagctttacctggcagtgataaagatgggctgtggagcttggaaaaccacctctgttttccttgctctatacagcagcacatattatcatacagacagaaaatccagaatcttttcaaagcccacatatggtagcacaggctggcctgtgcatcggcaattctcatatctgtttttttcaaagaa

SEQ ID NO: 147595 - DNA, 1703 bp, Homo sapiens
  Payload ID: 9203
  Gene Symbol: LAYN
  Gene Name: layilin
  ENST ID: ENST00000533265
  CDS Start-End: 115-903
tcggtggcctagagatgctgctgccgcggttgcagttgtcgcgcacgcctctgcccgccagcccgctccaccgccgtagcgcccgagtgtcggggggcgcacccgagtcgggccatgaggccgggaaccgcgctacaggccgtgctgctggccgtgctgctggtggggctgcgggccgcgacgggtcgcctgctgagtgggcagccagtctgccggggagggacacagaggccttgttataaagtcatttacttccatgatacttctcgaagactgaactttgaggaagccaaagaagcctgcaggagggatggaggccagctagtcagcatcgagtctgaagatgaacagaaactgatagaaaagttcattgaaaacctcttgccatctgatggtgacttctggattgggctcaggaggcgtgaggagaaacaaagcaatagcacagcctgccaggacctttatgcttggactgatggcagcatatcacaatttaggaactggtatgtggatgagccatcctgcggcagcgaggtctgcgtggtcatgtaccatcagccatcggcacccgctggcatcggaggcccctacatgttccagtggaatgatgaccggtgcaacatgaagaacaatttcatttgcaaatattctgatgagaaaccagcagttccttctagagaagctgaaggtgaggaaacagagctgacaacacctgtacttccagaagaaacacaggaagaagatgccaaaaaaacatttaaagaaagtagagaagctgccttgaatctggcctacatcctaatccccagcattccccttctcctcctccttgtggtcaccacagttgtatgttgggtttggatctgtagaaaaaggcaaaaaacgggagcagccagaccctagcacaaagaagcaacacaccatctggccctctcctcaccagggaaacagcccggacctagaggtctacaatgtcataagaaaacaaagcgaagctgacttagctgagacccggccagacctgaagaatatttcattccgagtgtgttcgggagaagccactcccgatgacatgtcttgtgactatgacaacatggctgtgaacccatcagaaagtgggtttgtgactctggtgagcgtggagagtggatttgtgaccaatgacatttatgagttctccccagaccaaatggggaggagtaaggagtctggatgggtggaaaatgaaatatatggttattaggacatataaaaaactgaaactgacaacaatggaaaagaaatgataagcaaaatcctcttattttctataaggaaaatacacagaaggtctatgaacaagcttagatcaggtcctgtggatgagcatgtggtccccacgacctcctgttggacccccacgttttggctgtatcctttatcccagccagtcatccagctcgaccttatgagaaggtaccttgcccaggtctggcacatagtagagtctcaataaatgtcacttggttggttgtatctaacttttaagggacagagctttacctggcagtgataaagatgggctgtggagcttggaaaaccacctctgttttccttgctctatacagcagcacatattatcatacagacagaaaatccagaatcttttcaaagcccacatatggtagcacaggctggcctgtgcatcggcaattctcatatct

SEQ ID NO: 147596 - DNA, 664 bp, Homo sapiens
  Payload ID: 9203
  Gene Symbol: LAYN
  Gene Name: layilin
  ENST ID: ENST00000528924
  CDS Start-End: 339-664
ggtcgagcgcccggtatgagagcgcttagagatcgggaaagaactccagttagtgtgggacgagccccacctgactccggggaatgactctctgcttccttcctcctgttgtgtcactgcagcctcggatttggacctcagaggagggcagccagtctgccggggagggacacagaggccttgttataaagtcatttacttccatgatacttctcgaagactgaactttgaggaagccaaagaagcctgcaggagggatggaggccagctagtcagcatcgagtctgaagatgaacagaaactgatagaaaagttcattgaaaacctcttgccatctgatggtgacttctggattgggctcaggaggcgtgaggagaaacaaagcaatagcacagcctgccaggacctttatgcttggactgatggcagcatatcacaatttagagaaaccagcagttccttctagagaagctgaaggtgaggaaacagagctgacaacacctgtacttccagaagaaacacaggaagaagatgccaaaaaaacatttaaagaaagtagagaagctgccttgaatctggcctacatcctaatccccagcattccccttctcctcctccttgtggtcaccacagttgtatgttgggtttggatctgtagaaaaag

SEQ ID NO: 147597 - DNA, 1320 bp, Homo sapiens
  Payload ID: 9204
  Gene Symbol: LBHD1
  Gene Name: LBH domain containing 1
  Uniprot ID: Q9BQE6
  ENST ID: ENST00000354588
  CDS Start-End: 217-1008
cagcattttccgcaaggaatccatggccgcctgcacagccagcggagcgcccacgggagctccccgcagccgcaagctgttgccgcgcggtctcactaccccttggcgcaggctagagcgccctatagcagaaaccatagataagcggccggctagagaggacctgctcgaggaaacgtttggaatccggagcgcttggatctcagaatcaccaccatggcccttgtgccagggagaagcaaggaggatgggctttggactagaaatagcccaggctcctcccagcatccagaaagtcccaggctgcccaaccctctctgggacagaggaaaaattggcaaggttgaaggtcaccagcacattcaggatttctctcaaaagtcccatctgccgtctattgtggtggaatccagtgaggtgaatgaagagagtggggatctccatttgccccatgaggagctgctgctgctcactgatggtgaggaagaggatgctgaggccttcttccaagaccaaagtgaagagccaggctgggcttggagcccacaggaccctagaagtcctttaagaacatttaacgctggactcagctgggggcaggaccaggatgaagaagatgcttgttggattcttgaggacacagcatgtctggaagccaccaaccactgtcccttctgggactcaacaggctcccgtgtttgtagaagtggctttgtggaatattcccatctcctgcctcctaatagctttgagggagctgaagaagaagctgttcaaacgccggcgggtgttgaatcgggagcggcgtctgaggcaccgggtggtcggggctgtgatagaccaagggctgatcacgcggcaccacctcaagaagcgggcgtccagtgcacgtgccaacattacactgtcagggaagaagcgcagaaaactcctccagcagatccggcttgcccagaaagagaagacagccatggaagtggaagccccttcaaagccagccaggactagtgaaccacagctcaaaaggcaaaagaagacaaaagccccccaggatgtagaaatgaaggaccttgaagatgagagctaaacctcttccactagaagattctcaactggagccagccttcagactcagtggttgtttcagaggactttgacaaaagcaaggccccttttcactctccagatttcctcctacctaatggcctactgacctcccctagagggatgtctttgggagggaagaaggtacagaagaaagattggagaagggcctctctagcagtcaactccatttgtaataaagccctagcactctga

SEQ ID NO: 147598 - DNA, 821 bp, Homo sapiens
  Payload ID: 9204
  Gene Symbol: LBHD1
  Gene Name: LBH domain containing 1
  ENST ID: ENST00000415855
  CDS Start-End: 28-821
gagatcagcattttccgcaaggaatccatggccgcctgcacagccagcggagcgcccacgggagctccccgcagccgcaagctgttgccgcgcggtctcactaccccttggcgcaggctagagcgccctatagcagaaaccatagataagcggccggctagagaggacctgctcgaggaaacgtttggaatccggagcgcttggatctcagggagaagcaaggaggatgggctttggactagaaatagcccaggctcctcccagcatccagaaagtcccaggctgcccaaccctctctgggacagaggaaaaattggcaaggttgaaggtcaccagcacattcaggatttctctcaaaagtcccatctgccgtctattgtggtggaatccagtgaggtgaatgaagagagtggggatctccatttgccccatgaggagctgctgctgctcactgatggtgaggaagaggatgctgaggccttcttccaagaccaaagtgaagagccaggctgggcttggagcccacaggaccctagaagtcctttaagaacatttaacgctggactcagctgggggcaggaccaggatgaagaagatgcttgttggattcttgaggacacagcatgtctggaagccaccaaccactgtcccttctgggactcaacaggctcccgtgtttgtagaagtggctttgtggaatattcccatctcctgcctcctaatagctttgagggagctgaagaagaagctgttcaaacgccggcgggtgttgaatcgggagcggcgtctgaggcaccgggtggtcggggctgtgatagacc

SEQ ID NO: 147599 - DNA, 2915 bp, Homo sapiens
  Payload ID: 9204
  Gene Symbol: LBHD1
  Gene Name: LBH domain containing 1
  Uniprot ID: Q9BQE6
  ENST ID: ENST00000431002
  CDS Start-End: 1735-2604
attttccgcaaggaatccatggccgcctgcacagccagcggagcgcccacgggagctccccgcagccgcaagctgttgccgcgcggtctcactaccccttggcgcaggctagagcgccctatagcagaaaccatagataagcggccggctagagaggacctgctcgaggaaacgtttggaatccggagcgcttggatctcaggtttagctgagggggttgaggtgtccaagaagtgctggcaccaagggctgagcgcggggaccctgtgtcctcaattccggggtgggattgctagggggagagtgcgtgtcttcatggttgccgtgggttttatgattgcccatttttctgtcttccgacgtttcccgatcagtagaggcccgagctgtgctctgtggtttcctgcagtcacccgcgcgttttcaacacagcgcatggagggcatctacacacatacacatccctctccatcccctcaactctggaacaaacactcaaagtcaagtatactggttggagaaatgggtaatagttacttatctttaacatttattttacaaacaacctattccttttctcgtcatggtacacacttggtattgtttgggtttttttttggttttgttgttgttgttagtgtgtgggcgtggttttgtttgtttttggagacaaggtctcgctctgtcgcccagggctggagtgcagtggcgcgatcatggctcactgaagcctcgacttccagggcccaagcgatcctcctgcctcaacctcccggatagctgggattacaggcgtgcaccaccacgcccggctggtattgctttttgttttgcttcgttttcttttttgctttttgagacagagtctcactctgttgcccagctggagtgcagtggcgtgatctcggctcactgcaagctctgcctcccgggttcacgccattctcctgcctcagcctcccgagtagctgggactacaggcgcccgccaccacggccggctaattttttgtatttttagtagagaaagagtttcactatgtaggtcaggctggtctcgaactcctgacctcgtgatccgcccaatccgcccacctcggcctcccaaagtgctgggattacaggtgtgagccaccgcgcccggctgttttgctttgttttcaaccactaaaaggctggattcgtgtaacatactgaattctgctttacagaagaaaacacctcttagctgtgtgactgattataggcaagttcttgtgccccggtttctgcatcagaaaatgaagcttataacaacagtacttgtctcacagttttaggataattaaattagttatatgtaaagcaattaaaacagctcctgccaaagagtaaacaccatataaatattcattaaataacatacaaacataccaggttgggaaaaatcagtaagcataggagtcaggaaattccaagttggttatcacaactcttggcccacagggctttaatccaggtgcccttgtctcctacccttgttgccatcccagtgtctccagggagtaagtagaaataaagatcctatctcacctcttgggcattttcccctcccctgaaagcgtataatcgcttagcacagtcggtgcttaaggggccaggctccaaagaagattaaaggaacagtttgtggggtgcactgggcagcagtactctcctctgagttcaatcatcttgcactctaagaatcaccaccatggcccttgtgccagggagaagcaaggaggatgggctttggactagaaatagcccaggctcctcccagcatccagaaagtcccaggctgcccaaccctctctgggacagaggaaaaattggcaaggttgaaggtcaccagcacattcaggttagtacttcctcagcctgtgtctggcagctggcttaccctccagtttggcccaacctccctgctgtccctattcaggatttctctcaaaagtcccatctgccgtctattgtggtggaatccagtgaggtgaatgaagagagtggggatctccatttgccccatgaggagctgctgctgctcactgatggtgaggaagaggatgctgaggccttcttccaagaccaaagtgaagagccaggctgggcttggagcccacaggaccctagaagtcctttaagaacatttaacgctggactcagctgggggcaggaccaggatgaagaagatgcttgttggattcttgaggacacagcatgtctggaagccaccaaccactgtcccttctgggactcaacaggctcccgtgtttgtagaagtggctttgtggaatattcccatctcctgcctcctaatagctttgagggagctgaagaagaagctgttcaaacgccggcgggtgttgaatcgggagcggcgtctgaggcaccgggtggtcggggctgtgatagaccaagggctgatcacgcggcaccacctcaagaagcgggcgtccagtgcacgtgccaacattacactgtcagggaagaagcgcagaaaactcctccagcagatccggcttgcccagaaagagaagacagccatggaagtggaagccccttcaaagccagccaggactagtgaaccacagctcaaaaggcaaaagaagacaaaagccccccaggatgtagaaatgaaggaccttgaagatgagagctaaacctcttccactagaagattctcaactggagccagccttcagactcagtggttgtttcagaggactttgacaaaagcaaggccccttttcactctccagatttcctcctacctaatggcctactgacctcccctagagggatgtctttgggagggaagaaggtacagaagaaagattggagaagggcctctctagcagtcaactccatttgtaataaagccctagcactctg

SEQ ID NO: 147600 - DNA, 403 bp, Homo sapiens
  Payload ID: 9204
  Gene Symbol: LBHD1
  Gene Name: LBH domain containing 1
  ENST ID: ENST00000528862
  CDS Start-End: 37-403
ccgacggcagctcacaggaccccggagagtcctggcatggtatctcggtccggactctccgctgggcccacgaaggagaaaggctgcctcggattcctgcgcccaagccaaggtccggcgcccacggaggatttctctcaaaagtcccatctgccgtctattgtggtggaatccagtgaggtgaatgaagagagtggggatctccatttgccccatgaggagctgctgctgctcactgatggtgaggaagaggatgctgaggccttcttccaagaccaaagtgaagagccaggctgggcttggagcccacaggaccctagaagtcctttaagaacatttaacgctggactcagctgggggcaggaccaggatgaagaagatgcttgttggattcttgaggaca

SEQ ID NO: 147601 - DNA, 1508 bp, Homo sapiens
  Payload ID: 9204
  Gene Symbol: LBHD1
  Gene Name: LBH domain containing 1
  Uniprot ID: Q9BQE6
  ENST ID: ENST00000532208
  CDS Start-End: 436-1227
tccaagaagtgctggcaccaagggctgagcgcggggaccctgtgtcctcaattccggggtgggattgctagggggagagtgcgtgtcttcatggttgccgtgggttttatgattgcccatttttctgtcttccgacgtttcccgatcagtagaggcccgagctgtgctctgtggtttcctgcagtcacccgcgcgttttcaacacagcgcatggagggcatctacacacatacacatccctctccatcccctcaactctggaacaaacactcaaagtcaagtatactggttggagaaatggcgtataatcgcttagcacagtcggtgcttaaggggccaggctccaaagaagattaaaggaacagtttgtggggtgcactgggcagcagtactctcctctgagttcaatcatcttgcactctaagaatcaccaccatggcccttgtgccagggagaagcaaggaggatgggctttggactagaaatagcccaggctcctcccagcatccagaaagtcccaggctgcccaaccctctctgggacagaggaaaaattggcaaggttgaaggtcaccagcacattcaggatttctctcaaaagtcccatctgccgtctattgtggtggaatccagtgaggtgaatgaagagagtggggatctccatttgccccatgaggagctgctgctgctcactgatggtgaggaagaggatgctgaggccttcttccaagaccaaagtgaagagccaggctgggcttggagcccacaggaccctagaagtcctttaagaacatttaacgctggactcagctgggggcaggaccaggatgaagaagatgcttgttggattcttgaggacacagcatgtctggaagccaccaaccactgtcccttctgggactcaacaggctcccgtgtttgtagaagtggctttgtggaatattcccatctcctgcctcctaatagctttgagggagctgaagaagaagctgttcaaacgccggcgggtgttgaatcgggagcggcgtctgaggcaccgggtggtcggggctgtgatagaccaagggctgatcacgcggcaccacctcaagaagcgggcgtccagtgcacgtgccaacattacactgtcagggaagaagcgcagaaaactcctccagcagatccggcttgcccagaaagagaagacagccatggaagtggaagccccttcaaagccagccaggactagtgaaccacagctcaaaaggcaaaagaagacaaaagccccccaggatgtagaaatgaaggaccttgaagatgagagctaaacctcttccactagaagattctcaactggagccagccttcagactcagtggttgtttcagaggactttgacaaaagcaaggccccttttcactctccagatttcctcctacctaatggcctactgacctcccctagagggatgtctttgggagggaagaaggtacagaagaaagattggagaagggcctctctagcagtcaa

SEQ ID NO: 147602 - DNA, 492 bp, Homo sapiens
  Payload ID: 9204
  Gene Symbol: LBHD1
  Gene Name: LBH domain containing 1
  ENST ID: ENST00000377954
  CDS Start-End: 129-492
atagataagcggccggctagagaggacctgctcgaggaaacgtttggaatccggagcgcttggatctcagaggcccgagctgtgctctgtggtttcctgcagtcacccgcgcgttttcaacacagcgcatggagggcatctacacacatacacatccctctccatcccctcaactctggaacaaacactcaaagtcaagtatactggttggagaaatggggagaagcaaggaggatgggctttggactagaaatagcccaggctcctcccagcatccagaaagtcccaggctgcccaaccctctctgggacagaggaaaaattggcaaggttgaaggtcaccagcacattcaggatttctctcaaaagtcccatctgccgtctattgtggtggaatccagtgaggtgaatgaagagagtggggatctccatttgccccatgaggagctgctgctgctcactgatggtgaggaagaggatgctgaggccttct

SEQ ID NO: 147603 - DNA, 1178 bp, Homo sapiens
  Payload ID: 9205
  Gene Symbol: LIME1
  Gene Name: Lck interacting transmembrane adaptor 1
  Uniprot ID: Q9H400
  ENST ID: ENST00000309546
  CDS Start-End: 88-975
agccgagggctgcacaaagaccttcctggcctgccccagacagagctgaggacccctggccgtgggcttgggcctcggcttcacaggatggggctgccagtgtcctgggcccctcctgccctctgggttctagggtgctgcgccctgctcctctcgctgtgggcgctgtgcacagcctgccgcaggcccgaggacgctgtagcccccaggaagagggcgcggaggcagcgggcgaggctgcagggcagtgcgacggcggcggaagcgtccctactgaggcggacccacctctgctccctcagcaagtcggacaccagactgcacgagctgcaccggggcccgcgcagcagcagggccctgcggcctgccagcatggatctcctgcgcccacactggctggaggtgtccagggacatcaccggaccgcaggcagccccctctgccttcccacaccaggagctgccccgggctctgccggcagctgcagccaccgcagggtgcgctggcctcgaggccacctattccaacgtggggctggcggcccttcccggggtcagcctggcggccagccctgtggtggccgagtatgcccgcgtccagaagcgcaaagggacccatcgcagtccccaagagccacagcaggggaagactgaggtgaccccggccgctcaggtggacgtcctgtactccagggtctgcaagcctaaaaggagggacccaggacccaccacagacccgctggaccccaagggccagggagcgattctggccctggcgggtgacctggcctaccagaccctcccgctcagggccctggatgtggacagcggccccctggaaaacgtgtatgagagcatccgggagctgggggaccctgctggcaggagcagcacgtgcggggctgggacgccccctgcttccagctgccccagcctagggaggggctggagacccctccctgcctccctgccctgaacactcaaggacctgtgctccttcctccagagtgaggcccgtcccccgccccgccccgcctcacagctgacagcgccagtcccaggtccccgggctgccagcccgtgaggtccgtgaggtcctggccgctctgacagccgcggcctccccgggctccagagaaggcccgcgtctaaataaagcgccagcgcaggatgaaagcg

SEQ ID NO: 147604 - DNA, 451 bp, Homo sapiens
  Payload ID: 9205
  Gene Symbol: LIME1
  Gene Name: Lck interacting transmembrane adaptor 1
  ENST ID: ENST00000444951
  CDS Start-End: 132-451
aggccagggtgcccgccaggctgcctgacacccacagatgggtggagctcagtgctgctccagcgggcgagacgggcgggagaggactgtggcccaccacgtggggcactcttgggcctcggcttcacaggatggggctgccagtgtcctgggcccctcctgccctctgggttctagggtgctgcgccctgctcctctcgctgtgggcgctgtgcacagcctgccgcaggcccgaggacgctgtagcccccaggaagagggcgcggaggcagcgggcgaggctgcagggcagtgcgacggcggcggaagcgtccctactgaggcggacccacctctgctccctcagcaagtcggacaccagactgcacgagctgcaccggggcccgcgcagcagcagggccctgcggcctgccagcatggatctcctgcgcccacactggctggaggtgtc

SEQ ID NO: 147605 - DNA, 661 bp, Homo sapiens
  Payload ID: 9205
  Gene Symbol: LIME1
  Gene Name: Lck interacting transmembrane adaptor 1
  ENST ID: ENST00000493265
  CDS Start-End: 267-661
ccgtggtcacccgcagggacacggaggggccaggcagagcagccctagttcacctcaccgggagcccccgccagaaggtgggcacctctgggagggagggactgccaggccttggggcttcctgtgctgagtcagagctggaacgggagacgcaggagccccgcagccgcgggaggtgcagatttggggctgccaggtggcgccaggtccccttggccagcccccagcgcccctttcttctgtccccagggcctcggcttcacaggatggggctgccagtgtcctgggcccctcctgccctctgggttctagggtgctgcgccctgctcctctcgctgtgggcgctgtgcacagcctgccgcaggcccgaggacgctgtagcccccaggaagagggcgcggaggcagcgggcgaggctgcagggcagtgcgacggcggcggaagcgcaagtcggacaccagactgcacgagctgcaccggggcccgcgcagcagcagggccctgcggcctgccagcatggatctcctgcgcccacactggctggaggtgtccagggacatcaccggaccgcaggcagccccctctgccttcccacaccaggagctgccccgggctctgccggcagctgcagccaccgcagggtgcgctggcctcgaggcca

SEQ ID NO: 147606 - DNA, 819 bp, Homo sapiens
  Payload ID: 9205
  Gene Symbol: LIME1
  Gene Name: Lck interacting transmembrane adaptor 1
  ENST ID: ENST00000480139
  CDS Start-End: 62-592
tggcctgccccagacagagctgaggacccctggccgtgggcttgggcctcggcttcacaggatggggctgccagtgtcctgggcccctcctgccctctgggttctagggtgctgcgccctgctcctctcgctgtgggcgctgtgcacagcctgccgcaggcccgaggacgctgtagcccccaggaagagggcgcggaggcagcgggcgaggctgcagggcagtgcgacggcggcggaagcgcaagtcggacaccagactgcacgagctgcaccggggcccgcgcagcagcagggccctgcggcctgccagcatggatctcctgcgcccacactggctggaggtgtccagggacatcaccggaccgcaggcagccccctctgccttcccacaccaggagctgccccgggctctgccggcagctgcagccaccgcagggtgcgctggcctcgaggccacctattccaacgtggggctggcggcccttcccggggtcagcctggcggccagccctgtggtggccgagtatgcccgcgtccagaagcgcaaagggacccatcgcagtccccaagagccacagcaggggaagactgaggtgaccccggccgctcaggtggacgtcctgtactccagggtctgcaagcctaaaaggagggacccaggacccaccacagacccgctggaccccaagggccagggagcgattctggccctggcgggtgacctggcctaccagaccctcccgctcagggccctggatgtggacagcggccccctggaaaacgtgtatgagagcatccgggagctgggggaccctgctg

SEQ ID NO: 147607 - DNA, 809 bp, Homo sapiens
  Payload ID: 9205
  Gene Symbol: LIME1
  Gene Name: Lck interacting transmembrane adaptor 1
  ENST ID: ENST00000476183
  CDS Start-End: 52-809
gccagcccccagcgcccctttcttctgtccccagggcctcggcttcacaggatggggctgccagtgtcctgggcccctcctgccctctgggttctagggtgctgcgccctgctcctctcgctgtgggcgctgtgcacagcctgccgcaggaagagggcgcggaggcagcgggcgaggctgcagggcagtgcgacggcggcggaagcgtccctactgaggcggacccacctctgctccctcagcaagtcggacaccagactgcacgagctgcaccggggcccgcgcagcagcagggccctgcggcctgccagcatggatctcctgcgcccacactggctggaggtgtccagggacatcaccggaccgcaggcagccccctctgccttcccacaccaggagctgccccgggctctgccggcagctgcagccaccgcagggtgcgctggcctcgaggccacctattccaacgtggggctggcggcccttcccggggtcagcctggcggccagccctgtggtggccgagtatgcccgcgtccagaagcgcaaagggacccatcgcagtccccaagagccacagcaggggaagactgaggtgaccccggccgctcaggtggacgtcctgtactccagggtctgcaagcctaaaaggagggacccaggacccaccacagacccgctggaccccaagggccagggagcgattctggccctggcgggtgacctggcctaccagaccctcccgctcagggccctggatgtggacagcggccccctggaaaacgtgtatgagagcatccgggagctggg

SEQ ID NO: 147608 - DNA, 805 bp, Homo sapiens
  Payload ID: 9205
  Gene Symbol: LIME1
  Gene Name: Lck interacting transmembrane adaptor 1
  ENST ID: ENST00000487026
  CDS Start-End: 74-709
caaagaccttcctggcctgccccagacagagctgaggacccctggccgtgggcttgggcctcggcttcacaggatggggctgccagtgtcctgggcccctcctgccctctgggttctagggtgctgcgccctgctcctctcgctgtgggcgctgtgcacagcctgccgcaggcccgaggacgctgtagcccccaggaagagggcgcggaggcagcgggcgaggctgcagggcagtgcgacggcggcggaagcggtgagtgccaggctgtcccggggaccagggtggggtccgcagggcaccgaccagccttcctcgcccccagtccctactgaggcggacccacctctgctccctcagcaagtcggacaccagactgcacgagctgcaccggggcccgcgcagcagcagggccctgcggcctgccagcatggatctcctgcgcccacactggctggaggtgtccagggacatcaccggaccgcaggcagccccctctgccttcccacaccaggagctgccccgggctctgccggcagctgcagccaccgcagggtgcgctggcctcgaggccacctattccaacgtggggctggcggcccttcccggggtcagcctggcggccagccctgtggtggccgagtatgcccgcgtccagaagcgcaaagggacccatcgcagtccccaagagccacagcaggggaagactgaggtgaccccggccgctcaggtggacgtcctgtactccagggtctgcaagcctaaaaggagggacccaggacccaccacagacccgctggaccccaa

SEQ ID NO: 147609 - DNA, 2166 bp, Homo sapiens
  Payload ID: 9206
  Gene Symbol: LCK
  Gene Name: LCK proto-oncogene, Src family tyrosine kinase
  Uniprot ID: P06239
  ENST ID: ENST00000333070
  CDS Start-End: 101-1720
gagggctcagagggagcaccggtttggagctgggaccccctattttagcttttctgtggctggtgaatggggatcccaggatctcacaatctcagggaccatgggctgtggctgcagctcacacccggaagatgactggatggaaaacatcgatgtgtgtgagaactgccattatcccatagtcccactggatggcaagggcacgctgctcatccgaaatggctctgaggtgcgggacccactggttacctacgaaggctccaatccgccggcttccccactgcaagacaacctggttatcgctctgcacagctatgagccctctcacgacggagatctgggctttgagaagggggaacagctccgcatcctggagcagagcggcgagtggtggaaggcgcagtccctgaccacgggccaggaaggcttcatccccttcaattttgtggccaaagcgaacagcctggagcccgaaccctggttcttcaagaacctgagccgcaaggacgcggagcggcagctcctggcgcccgggaacactcacggctccttcctcatccgggagagcgagagcaccgcgggatcgttttcactgtcggtccgggacttcgaccagaaccagggagaggtggtgaaacattacaagatccgtaatctggacaacggtggcttctacatctcccctcgaatcacttttcccggcctgcatgaactggtccgccattacaccaatgcttcagatgggctgtgcacacggttgagccgcccctgccagacccagaagccccagaagccgtggtgggaggacgagtgggaggttcccagggagacgctgaagctggtggagcggctgggggctggacagttcggggaggtgtggatggggtactacaacgggcacacgaaggtggcggtgaagagcctgaagcagggcagcatgtccccggacgccttcctggccgaggccaacctcatgaagcagctgcaacaccagcggctggttcggctctacgctgtggtcacccaggagcccatctacatcatcactgaatacatggagaatgacacacttctagactcccagttggaggagaaaggtctgggggcctccccctggggcaacttgggccagcaactcttgcttctgcccacagggagtctagtggattttctcaagaccccttcaggcatcaagttgaccatcaacaaactcctggacatggcagcccaaattgcagaaggcatggcattcattgaagagcggaattatattcatcgtgaccttcgggctgccaacattctggtgtctgacaccctgagctgcaagattgcagactttggcctagcacgcctcattgaggacaacgagtacacagccagggagggggccaagtttcccattaagtggacagcgccagaagccattaactacgggacattcaccatcaagtcagatgtgtggtcttttgggatcctgctgacggaaattgtcacccacggccgcatcccttacccagggatgaccaacccggaggtgattcagaacctggagcgaggctaccgcatggtgcgccctgacaactgtccagaggagctgtaccaactcatgaggctgtgctggaaggagcgcccagaggaccggcccacctttgactacctgcgcagtgtgctggaggacttcttcacggccacagagggccagtaccagcctcagccttgagaggccttgagaggccctggggttctccccctttctctccagcctgacttggggagatggagttcttgtgccatagtcacatggcctatgcacatatggactctgcacatgaatcccacccacatgtgacacatatgcaccttgtgtctgtacacgtgtcctgtagttgcgtggactctgcacatgtcttgtacatgtgtagcctgtgcatgtatgtcttggacactgtacaaggtacccctttctggctctcccatttcctgagaccacagagagaggggagaagcctgggattgacagaagcttctgcccacctacttttctttcctcagatcatccagaagttcctcaagggccaggactttatctaatacctctgtgtgctcctccttggtgcctggcctggcacacatcaggagttcaataaatgtctgttgatgactgtt

SEQ ID NO: 147610 - DNA, 2117 bp, Homo sapiens
  Payload ID: 9206
  Gene Symbol: LCK
  Gene Name: LCK proto-oncogene, Src family tyrosine kinase
  Uniprot ID: P06239
  ENST ID: ENST00000336890
  CDS Start-End: 139-1668
aagtcagggtgggacgtgggcgcggggagacaggtggtggctacgacggcgaagggagctgagactgtccaggcagccaggttaggccaggaggaccatgtgaatggggccagagggctcccgggctgggcagggaccatgggctgtggctgcagctcacacccggaagatgactggatggaaaacatcgatgtgtgtgagaactgccattatcccatagtcccactggatggcaagggcacgctgctcatccgaaatggctctgaggtgcgggacccactggttacctacgaaggctccaatccgccggcttccccactgcaagacaacctggttatcgctctgcacagctatgagccctctcacgacggagatctgggctttgagaagggggaacagctccgcatcctggagcagagcggcgagtggtggaaggcgcagtccctgaccacgggccaggaaggcttcatccccttcaattttgtggccaaagcgaacagcctggagcccgaaccctggttcttcaagaacctgagccgcaaggacgcggagcggcagctcctggcgcccgggaacactcacggctccttcctcatccgggagagcgagagcaccgcgggatcgttttcactgtcggtccgggacttcgaccagaaccagggagaggtggtgaaacattacaagatccgtaatctggacaacggtggcttctacatctcccctcgaatcacttttcccggcctgcatgaactggtccgccattacaccaatgcttcagatgggctgtgcacacggttgagccgcccctgccagacccagaagccccagaagccgtggtgggaggacgagtgggaggttcccagggagacgctgaagctggtggagcggctgggggctggacagttcggggaggtgtggatggggtactacaacgggcacacgaaggtggcggtgaagagcctgaagcagggcagcatgtccccggacgccttcctggccgaggccaacctcatgaagcagctgcaacaccagcggctggttcggctctacgctgtggtcacccaggagcccatctacatcatcactgaatacatggagaatgggagtctagtggattttctcaagaccccttcaggcatcaagttgaccatcaacaaactcctggacatggcagcccaaattgcagaaggcatggcattcattgaagagcggaattatattcatcgtgaccttcgggctgccaacattctggtgtctgacaccctgagctgcaagattgcagactttggcctagcacgcctcattgaggacaacgagtacacagccagggagggggccaagtttcccattaagtggacagcgccagaagccattaactacgggacattcaccatcaagtcagatgtgtggtcttttgggatcctgctgacggaaattgtcacccacggccgcatcccttacccagggatgaccaacccggaggtgattcagaacctggagcgaggctaccgcatggtgcgccctgacaactgtccagaggagctgtaccaactcatgaggctgtgctggaaggagcgcccagaggaccggcccacctttgactacctgcgcagtgtgctggaggacttcttcacggccacagagggccagtaccagcctcagccttgagaggccttgagaggccctggggttctccccctttctctccagcctgacttggggagatggagttcttgtgccatagtcacatggcctatgcacatatggactctgcacatgaatcccacccacatgtgacacatatgcaccttgtgtctgtacacgtgtcctgtagttgcgtggactctgcacatgtcttgtacatgtgtagcctgtgcatgtatgtcttggacactgtacaaggtacccctttctggctctcccatttcctgagaccacagagagaggggagaagcctgggattgacagaagcttctgcccacctacttttctttcctcagatcatccagaagttcctcaagggccaggactttatctaatacctctgtgtgctcctccttggtgcctggcctggcacacatcaggagttcaataaatgtctgttgatgactgttgta

SEQ ID NO: 147611 - DNA, 932 bp, Homo sapiens
  Payload ID: 9206
  Gene Symbol: LCK
  Gene Name: LCK proto-oncogene, Src family tyrosine kinase
  ENST ID: ENST00000373557
  CDS Start-End: 78-932
acttgtagcctgagggctcagagggagcaccggtttggagctgggaccccctattttagcttttctgtggctggtgaatggggatcccaggatctcacaatctcaggtacttttggaactttccagggcaaggccccattatatctgatgttgggggagcagatcttgggggagccccttcagccccctcttccattccctcagggaccatgggctgtggctgcagctcacacccggaagatgactggatggaaaacatcgatgtgtgtgagaactgccattatcccatagtcccactggatggcaagggcacgctgctcatccgaaatggctctgaggtgcgggacccactggttacctacgaaggctccaatccgccggcttccccactgcaagacaacctggttatcgctctgcacagctatgagccctctcacgacggagatctgggctttgagaagggggaacagctccgcatcctggagcagagcggcgagtggtggaaggcgcagtccctgaccacgggccaggaaggcttcatccccttcaattttgtggccaaagcgaacagcctggagcccgaaccctggttcttcaagaacctgagccgcaaggacgcggagcggcagctcctggcgcccgggaacactcacggctccttcctcatccgggagagcgagagcaccgcgggatcgttttcactgtcggtccgggacttcgaccagaaccagggagaggtggtgaaacattacaagatccgtaatctggacaacggtggcttctacatctcccctcgaatcacttttcccggcctgcatgaactggtccgccattacaccaatgcttcagatgggctgtgcacacggttgagccgcccctgccagacccagaagccccagaagccgtggtgggaggacgagtgggaggttccc

SEQ ID NO: 147612 - DNA, 551 bp, Homo sapiens
  Payload ID: 9206
  Gene Symbol: LCK
  Gene Name: LCK proto-oncogene, Src family tyrosine kinase
  ENST ID: ENST00000373562
  CDS Start-End: 139-551
gaatttacttgtagcctgagggctcagagggagcaccggtttggagctgggaccccctattttagcttttctgtggctggtgaatggggatcccaggatctcacaatctcagccccctcttccattccctcagggaccatgggctgtggctgcagctcacacccggaagatgactggatggaaaacatcgatgtgtgtgagaactgccattatcccatagtcccactggatggcaagggcacgctgctcatccgaaatggctctgaggtgcgggacccactggttacctacgaaggctccaatccgccggcttccccactgcaagacaacctggttatcgctctgcacagctatgagccctctcacgacggagatctgggctttgagaagggggaacagctccgcatcctggagcagagcggcgagtggtggaaggcgcagtccctgaccacgggccaggaaggcttcatccccttcaattttgtggccaaagcgaacagcctggagcccgaaccctggttcttcaagaacctgagccgcaaggacgcgga

SEQ ID NO: 147613 - DNA, 2137 bp, Homo sapiens
  Payload ID: 9206
  Gene Symbol: LCK
  Gene Name: LCK proto-oncogene, Src family tyrosine kinase
  ENST ID: ENST00000373564
  CDS Start-End: 139-1689
aagtcagggtgggacgtgggcgcggggagacaggtggtggctacgacggcgaagggagctgagactgtccaggcagccaggttaggccaggaggaccatgtgaatggggccagagggctcccgggctgggcagggaccatgggctgtggctgcagctcacacccggaagatgactggatggaaaacatcgatgtgtgtgagaactgccattatcccatagtcccactggatggcaagggcacgctgctcatccgaaatggctctgaggtgcgggacccactggttacctacgaaggctccaatccgccggcttccccactgcaaggtgaccccaggcagcagggcctgaaagacaaggcctgcggatccctggctgttggcttccacctctcccccacctactttctccccggtcttgccttccttgtcccccaccctgtaactccaggcttcctgccgatcccagctcggttctccctgatgccccttgtctttacagacaacctggttatcgctctgcacagctatgagccctctcacgacggagatctgggctttgagaagggggaacagctccgcatcctggagcagagcggcgagtggtggaaggcgcagtccctgaccacgggccaggaaggcttcatccccttcaattttgtggccaaagcgaacagcctggagcccgaaccctggttcttcaagaacctgagccgcaaggacgcggagcggcagctcctggcgcccgggaacactcacggctccttcctcatccgggagagcgagagcaccgcgggatcgttttcactgtcggtccgggacttcgaccagaaccagggagaggtggtgaaacattacaagatccgtaatctggacaacggtggcttctacatctcccctcgaatcacttttcccggcctgcatgaactggtccgccattacaccaggtactacaacgggcacacgaaggtggcggtgaagagcctgaagcagggcagcatgtccccggacgccttcctggccgaggccaacctcatgaagcagctgcaacaccagcggctggttcggctctacgctgtggtcacccaggagcccatctacatcatcactgaatacatggagaatgggagtctagtggattttctcaagaccccttcaggcatcaagttgaccatcaacaaactcctggacatggcagcccaaattgcagaaggcatggcattcattgaagagcggaattatattcatcgtgaccttcgggctgccaacattctggtgtctgacaccctgagctgcaagattgcagactttggcctagcacgcctcattgaggacaacgagtacacagccagggagggggccaagtttcccattaagtggacagcgccagaagccattaactacgggacattcaccatcaagtcagatgtgtggtcttttgggatcctgctgacggaaattgtcacccacggccgcatcccttacccagggatgaccaacccggaggtgattcagaacctggagcgaggctaccgcatggtgcgccctgacaactgtccagaggagctgtaccaactcatgaggctgtgctggaaggagcgcccagaggaccggcccacctttgactacctgcgcagtgtgctggaggacttcttcacggccacagagggccagtaccagcctcagccttgagaggccttgagaggccctggggttctccccctttctctccagcctgacttggggagatggagttcttgtgccatagtcacatggcctatgcacatatggactctgcacatgaatcccacccacatgtgacacatatgcaccttgtgtctgtacacgtgtcctgtagttgcgtggactctgcacatgtcttgtacatgtgtagcctgtgcatgtatgtcttggacactgtacaaggtacccctttctggctctcccatttcctgagaccacagagagaggggagaagcctgggattgacagaagcttctgcccacctacttttctttcctcagatcatccagaagttcctcaagggccaggactttatctaatacctctgtgtgctcctccttggtgcctggcctggcacacatcaggagttcaataaatgtctgttgatgactgttgt

SEQ ID NO: 147614 - DNA, 714 bp, Homo sapiens
  Payload ID: 9206
  Gene Symbol: LCK
  Gene Name: LCK proto-oncogene, Src family tyrosine kinase
  ENST ID: ENST00000482949
  CDS Start-End: 114-714
ggagacaggtggtggctacgacggcgaagggagctgagactgtccaggcagccaggttaggccaggaggaccatgtgaatggggccagagggctcccgggctgggcagggaccatgggctgtggctgcagctcacacccggaagatgactggatggaaaacatcgatgtgtgtgagaactgccattatcccatagtcccactggatggcaagggcacgctgctcatccgaaatggctctgaggtgcgggacccactggttacctacgaaggctccaatccgccggcttccccactgcaaggtgaccccaggcagcagggcctgaaagacaaggcctgcggatccctggctgttggcttccacctctcccccacctactttctccccggtcttgccttccttgtcccccaccctgtaactccaggcttcctgccgatcccagctcggttctccctgatgccccttgtctttacagacaacctggttatcgctctgcacagctatgagccctctcacgacggagatctgggctttgagaagggggaacagctccgcatcctggagcagagcggcgagtggtggaaggcgcagtccctgaccacgggccaggaaggcttcatccccttcaattttgtggccaaagcgaacagcctggagcccgaaccctggttcttcaagaacctgagccgcaaggacgcggagcggcagctcctgg

SEQ ID NO: 147615 - DNA, 566 bp, Homo sapiens
  Payload ID: 9206
  Gene Symbol: LCK
  Gene Name: LCK proto-oncogene, Src family tyrosine kinase
  ENST ID: ENST00000461712
  CDS Start-End: 120-566
gtgaatttacttgtagcctgagggctcagagggagcaccggtttggagctgggaccccctattttagcttttctgtggctggtgaatggggatcccaggatctcacaatctcagggaccatgggctgtggctgcagctcacacccggaagatgactggatggaaaacatcgatgtgtgtgagaactgccattatcccatagtcccactggatggcaagggcacgctgctcatccgaaatggctctgaggtgcgggacccactggttacctacgaaggctccaatccgccggcttccccactgcaaggtgaccccaggcagcagggcctgaaagacaaggcctgcggatccctggctgttggcttccacctctcccccacctactttctccccggtcttgccttccttgtcccccaccctgtaactccaggcttcctgccgatcccagctcggttctccctgatgccccttgtctttacagacaacctggttatcgctctgcacagctatgagccctctcacgacggagatctgggctttgagaagggggaacagctccgcatcctg

SEQ ID NO: 147616 - DNA, 1060 bp, Homo sapiens
  Payload ID: 9206
  Gene Symbol: LCK
  Gene Name: LCK proto-oncogene, Src family tyrosine kinase
  ENST ID: ENST00000495610
  CDS Start-End: 104-1060
ggtggctacgacggcgaagggagctgagactgtccaggcagccaggttaggccaggaggaccatgtgaatggggccagagggctcccgggctgggcagggaccatgggctgtggctgcagctcacacccggaagatgactggatggaaaacatcgatgtgtgtgagaactgccattatcccatagtcccactggatggcaagggcacgctgctcatccgaaatggctctgaggtgcgggacccactggttacctacgaaggctccaatccgccggcttccccactgcaagacaacctggttatcgctctgcacagctatgagccctctcacgacggagatctgggctttgagaagggggaacagctccgcatcctggagcagagcggcgagtggtggaaggcgcagtccctgaccacgggccaggaaggcttcatccccttcaattttgtggccaaagcgaacagcctggagcccgaaccctggttcttcaagaacctgagccgcaaggacgcggagcggcagctcctggcgcccgggaacactcacggctccttcctcatccgggagagcgagagcaccgcgggatcgttttcactgtcggtccgggacttcgaccagaaccagggagaggtggtgaaacattacaagatccgtaatctggacaacggtggcttctacatctcccctcgaatcacttttcccggcctgcatgaactggtccgccattacaccaggtactacaacgggcacacgaaggtggcggtgaagagcctgaagcagggcagcatgtccccggacgccttcctggccgaggccaacctcatgaagcagctgcaacaccagcggctggttcggctctacgctgtggtcacccaggagcccatctacatcatcactgaatacatggagaatgggagtctagtggattttctcaagaccccttcaggcatcaagttgaccatcaacaaactcctggacatggcagcccaaattgcagaaggcatggcattcattgaagagcggaattatattcatcgtgaccttcgggctgccaacatt

SEQ ID NO: 147617 - DNA, 580 bp, Homo sapiens
  Payload ID: 9206
  Gene Symbol: LCK
  Gene Name: LCK proto-oncogene, Src family tyrosine kinase
  ENST ID: ENST00000477031
  CDS Start-End: 78-580
acttgtagcctgagggctcagagggagcaccggtttggagctgggaccccctattttagcttttctgtggctggtgaatggggatcccaggatctcacaatctcaggtacttttggaactttccagggcaaggccccattatatctgatgttgggggagcagatcttgggggagccccttcagccccctcttccattccctcagggaccatgggctgtggctgcagctcacacccggaagatgactggatggaaaacatcgatgtgtgtgagaactgccattatcccatagtcccactggatggcaagggcacgctgctcatccgaaatggctctgaggtgcgggacccactggttacctacgaaggctccaatccgccggcttccccactgcaaggtgaccccaggcagcagggcctgaaagacaaggcctgcggatccctggctgttggcttccacctctcccccacctactttctccccggtcttgccttccttgtcccccaccctgtaactccaggcttcctgccgatcccagctcggttctccctgatgccccttgtctttacagacaacctggt

SEQ ID NO: 147618 - DNA, 2099 bp, Homo sapiens
  Payload ID: 9206
  Gene Symbol: LCK
  Gene Name: LCK proto-oncogene, Src family tyrosine kinase
  Uniprot ID: P06239
  ENST ID: ENST00000619559
  CDS Start-End: 122-1651
gtgtgaatttacttgtagcctgagggctcagagggagcaccggtttggagctgggaccccctattttagcttttctgtggctggtgaatggggatcccaggatctcacaatctcagggaccatgggctgtggctgcagctcacacccggaagatgactggatggaaaacatcgatgtgtgtgagaactgccattatcccatagtcccactggatggcaagggcacgctgctcatccgaaatggctctgaggtgcgggacccactggttacctacgaaggctccaatccgccggcttccccactgcaagacaacctggttatcgctctgcacagctatgagccctctcacgacggagatctgggctttgagaagggggaacagctccgcatcctggagcagagcggcgagtggtggaaggcgcagtccctgaccacgggccaggaaggcttcatccccttcaattttgtggccaaagcgaacagcctggagcccgaaccctggttcttcaagaacctgagccgcaaggacgcggagcggcagctcctggcgcccgggaacactcacggctccttcctcatccgggagagcgagagcaccgcgggatcgttttcactgtcggtccgggacttcgaccagaaccagggagaggtggtgaaacattacaagatccgtaatctggacaacggtggcttctacatctcccctcgaatcacttttcccggcctgcatgaactggtccgccattacaccaatgcttcagatgggctgtgcacacggttgagccgcccctgccagacccagaagccccagaagccgtggtgggaggacgagtgggaggttcccagggagacgctgaagctggtggagcggctgggggctggacagttcggggaggtgtggatggggtactacaacgggcacacgaaggtggcggtgaagagcctgaagcagggcagcatgtccccggacgccttcctggccgaggccaacctcatgaagcagctgcaacaccagcggctggttcggctctacgctgtggtcacccaggagcccatctacatcatcactgaatacatggagaatgggagtctagtggattttctcaagaccccttcaggcatcaagttgaccatcaacaaactcctggacatggcagcccaaattgcagaaggcatggcattcattgaagagcggaattatattcatcgtgaccttcgggctgccaacattctggtgtctgacaccctgagctgcaagattgcagactttggcctagcacgcctcattgaggacaacgagtacacagccagggagggggccaagtttcccattaagtggacagcgccagaagccattaactacgggacattcaccatcaagtcagatgtgtggtcttttgggatcctgctgacggaaattgtcacccacggccgcatcccttacccagggatgaccaacccggaggtgattcagaacctggagcgaggctaccgcatggtgcgccctgacaactgtccagaggagctgtaccaactcatgaggctgtgctggaaggagcgcccagaggaccggcccacctttgactacctgcgcagtgtgctggaggacttcttcacggccacagagggccagtaccagcctcagccttgagaggccttgagaggccctggggttctccccctttctctccagcctgacttggggagatggagttcttgtgccatagtcacatggcctatgcacatatggactctgcacatgaatcccacccacatgtgacacatatgcaccttgtgtctgtacacgtgtcctgtagttgcgtggactctgcacatgtcttgtacatgtgtagcctgtgcatgtatgtcttggacactgtacaaggtacccctttctggctctcccatttcctgagaccacagagagaggggagaagcctgggattgacagaagcttctgcccacctacttttctttcctcagatcatccagaagttcctcaagggccaggactttatctaatacctctgtgtgctcctccttggtgcctggcctggcacacatcaggagttcaataaatgtctgttgatgactgttgt

SEQ ID NO: 147619 - DNA, 4542 bp, Homo sapiens
  Payload ID: 9207
  Gene Symbol: LCA5
  Gene Name: Leber congenital amaurosis 5
  Uniprot ID: Q86VQ0
  ENST ID: ENST00000369846
  CDS Start-End: 436-2529
accctggagcccaggttaccgccgctgccacccaggagccccgatcctcgcctctgtcccatccttgtgttcaaacctcccgcatctcggcaacctcggcacccgcccggcagcctccgcaggaaccaggcacccgctctttggcggtcagacgccgaggccccagctgggagtttggtcctaagagggaaggcaaggaggcgggacgccgcatcggctctgctgaagagcctgcgggttggagggcaaaaaagtttatcttctggatgccaatgtgaattgtggtctacaaatacattgtggagaaaatagattgcacagaaatgaatattatcaggatctgaagactgtgaaaatgtttttcagtattgtcatagtctcctctggagaaaataatctgtgaaattatgtgaatagagaccatttttcaaaacaatgggggaaagagcaggaagtccaggtactgatcaagaaagaaaggcaggcaaacaccattattcttacttatctgattttgaaacgccacagtcttctggccgatcatcgctggtcagttcttcacctgcaagtgttaggagaaaaaatcctaaaagacaaacttcagatggccaagtacatcaccaagcccctcggaaaccaagccctaagggtctaccaaacagaaagggagtccgagtgggatttcgctcccagagcctcaatagagagccacttcggaaagatactgatcttgttacaaaacggattctgtctgcaagactgctaaaaatcaatgagttgcagaatgaagtatctgaactccaggtcaagttagctgagctgctaaaagaaaataaatctttgaaaaggcttcagtacagacaggagaaagccctgaataagtttgaagatgccgaaaatgaaatctcacaacttatatttcgtcataacaatgagattacagcactcaaagaacgcttaagaaaatctcaagagaaagaacgggcaactgagaaaagggtaaaagatacagaaagtgaactatttaggacaaaattttccttacagaaactgaaagagatctctgaagctagacacctacctgaacgagatgatttggcaaagaaactagtttcagcagagttaaagttagatgacaccgagagaagaattaaggagctatcgaaaaaccttgaactgagtactaacagtttccaacgacagttgcttgctgaaaggaaaagggcatatgaggctcatgatgaaaataaagttcttcaaaaggaggtacagcgactatatcacaaattaaaggaaaaggagagagaactggatataaaaaatatatattctaatcgtctgccaaagtcctctccaaataaagagaaagaacttgcattaagaaaaaatgctgcatgccagagtgattttgcagacctgtgtacaaaaggagtacaaaccatggaagacttcaagccagaagaatatcctttaactccagaaacaattatgtgttacgaaaacaaatgggaagaaccaggacatcttactttggacttgcaatctcaaaagcaagacaggcatggagaagcagggattctaaacccaattatggaaagagaagaaaaatttgttacagatgaagaactccatgtcgtaaaacaggaggttgaaaagctggaggatgaatgggaaagagaagaacttgataaaaagcaaaaagaaaaggcatctttactggaaagagaagaaaagccagagtgggaaactggaaggtaccaactaggaatgtatccaattcagaatatggataaattgcaaggagaggaagaagaaagactgaagagagaaatgctacttgctaaactgaatgaaattgacagagaactccaagattctcgaaatctaaaataccctgttttgccattgttacctgattttgaatcaaaactacactccccagagagaagccccaaaacatacaggttctctgaatcctcagagagattatttaatgggcatcatttgcaagacatcagtttctcaactccaaaaggagaaggtcagaattcaggaaatgttagaagtccagcctcccctaatgagttcgcatttggtagctacgtgccttcgtttgcaaaaacatcagagaggtcaaatccatttagtcaaaaaagtagttttttggatttccaaagaaacagtatggaaaaacttagtaaagatggtgtagatttaattacaagaaaagagaaaaaagctaatttgatggaacagttatttggtgccagtggtagcagcaccatttcctccaaaagcagtgacccaaattctgtggcttccagtaaaggagacattgaccctctaaattttctccctgggaataaaggcagcagagatcaagaacatgatgaagatgaaggctttttcctcagtgaaggaagaagttttaatccaaataggcaccgattaaaacatgcagacgataaaccagcagtaaaagcagctgattctgtagaagatgaaattgaagaagtagcactgagatgactgactagagtatacattttttctaattgtaaatattgaaatattttaatacagtatttattataaacatttagactttttaatgctaaaatgtccttattaaggaatgatttttaatagctaaatacaatgcagttaaaaagaagtagatcatacatacaccacatagatagtttgccaagaatgaaggaggcttttttgaatgaaaccaaaaataaaaatatgtcttgaaaaatgaaatagattttaactcttcatccagtgctatggcaagtttaactgcactggaggtggtattccttttctacttttattcctatttatgtatttatttttaatcatattctcactgtgctaaatacagtcttcccactaattgttgaatgaaaattaagggtgaaagtctgtgttgggaagtgtagctccggatggtggagaaccagtgcttcttaggagcccttccctttatggatagggccaggggtccctatcttacgtggcagtcctaagctactcttgagtgatagcagtcacaacattgggatttcccattcctctgaaagtacccacagctaaacactactcatttcccaatttcagtatttactgaaatcacttacctacaattctgttagaatattatgttgagttcggaagacatttctctgtttgcaaggacagttagttgctctctgtcatagcccgcagaagcttggctacagtgtaattcctctccttgttctcctacactctttgtatctcagtgactgggtgtaagatttcatgccaaatgcaaggaatagtggaaatacataccaactgcaaagaatagaaaaactttatcccaatatattatagaaagatcttcagttcaattatgtccagagtaatataatttggcaatgttaatgcttttaagatttgaacttgtcctcaaaccaaggagacaacaatagtgtaatactattggacttacaggattagttttaaagcaactttgaatagaagtgtttcagacataggacttctgccttgttgactagagtggatagttttctgtttaaatgcattggtcttttggctgtttgtaattcacttcagcttatagagaagttgatgaccttggatcatgctgggtatgattggtctttaaaaagcagtaatataccaccagcccaaggagaaaacattgttaaaatgaagagtggtggaaatagtgtgttgggaagaataaaaaatttagattggcacttattctaaagtgagctgtttttttcaagaatttactagcatttgctcgtagtatgatttctgacgccagtcatatatactgatgaggggaaggagttactgtgttattctgagttcttataaatgcatattattgaatttcattgcatgactatttgtcaagacttacctggttaggtctccaattaaaagatgtaccacctgtcatcttctaaattgtgttcctttcatttattgggaacagaatctctcaaaagtgctaaactatattaaaaagttttcttaatagatttgtatgtctgatatgtataaccatttactataatatgttgcaaatcattctaatatatgtaaaacaatattatttgtaatgcagttattggtaaaatattatgtaatgttaattttgttcctagctgctaatttttctgccaaaagtattctaattttcaggttgttttaaaggcttttaaaactttttagttaagttttttattcacgtcatttaaattagttttttgctttttttctacctgataatctctttaacaagatgcaacaagacagaattattaaaattaaacctaaagttaagttacagatttaaaggcattatgatattaagcattaaaattggagattaaaatgtacaaaacagggttttccttatgaacaaaccttacagggtaaattgtttttttttctaaatgtcattaaatttatttgtactcagaactgttactaataaaaattaaaaatgca

SEQ ID NO: 147620 - DNA, 4719 bp, Homo sapiens
  Payload ID: 9207
  Gene Symbol: LCA5
  Gene Name: Leber congenital amaurosis 5
  Uniprot ID: Q86VQ0
  ENST ID: ENST00000392959
  CDS Start-End: 613-2706
agtctaggcctccgcctccgttaccctggagcccaggttaccgccgctgccacccaggagccccgatcctcgcctctgtcccatccttgtgttcaaacctcccgcatctcggcaacctcggcacccgcccggcagcctccgcaggaaccaggcacccgctctttggcggtcagacgccgaggccccagctgggagtttggtcctaagagggaaggcaaggaggcgggacgccgcatcggctctgctgaagagcctgcgggttggaggtgggctttgaagtgggcgtggagacggcgggggaggtggaggtgcgagtataaatgatcaaccagaaattatcttcaaaggaataaaaccagaagtatgtaaataaaaagcccaagataaagaaacagaaaagctgacactacatgaagcagagggcaaaaaagtttatcttctggatgccaatgtgaattgtggtctacaaatacattgtggagaaaatagattgcacagaaatgaatattatcaggatctgaagactgtgaaaatgtttttcagtattgtcatagtctcctctggagaaaataatctgtgaaattatgtgaatagagaccatttttcaaaacaatgggggaaagagcaggaagtccaggtactgatcaagaaagaaaggcaggcaaacaccattattcttacttatctgattttgaaacgccacagtcttctggccgatcatcgctggtcagttcttcacctgcaagtgttaggagaaaaaatcctaaaagacaaacttcagatggccaagtacatcaccaagcccctcggaaaccaagccctaagggtctaccaaacagaaagggagtccgagtgggatttcgctcccagagcctcaatagagagccacttcggaaagatactgatcttgttacaaaacggattctgtctgcaagactgctaaaaatcaatgagttgcagaatgaagtatctgaactccaggtcaagttagctgagctgctaaaagaaaataaatctttgaaaaggcttcagtacagacaggagaaagccctgaataagtttgaagatgccgaaaatgaaatctcacaacttatatttcgtcataacaatgagattacagcactcaaagaacgcttaagaaaatctcaagagaaagaacgggcaactgagaaaagggtaaaagatacagaaagtgaactatttaggacaaaattttccttacagaaactgaaagagatctctgaagctagacacctacctgaacgagatgatttggcaaagaaactagtttcagcagagttaaagttagatgacaccgagagaagaattaaggagctatcgaaaaaccttgaactgagtactaacagtttccaacgacagttgcttgctgaaaggaaaagggcatatgaggctcatgatgaaaataaagttcttcaaaaggaggtacagcgactatatcacaaattaaaggaaaaggagagagaactggatataaaaaatatatattctaatcgtctgccaaagtcctctccaaataaagagaaagaacttgcattaagaaaaaatgctgcatgccagagtgattttgcagacctgtgtacaaaaggagtacaaaccatggaagacttcaagccagaagaatatcctttaactccagaaacaattatgtgttacgaaaacaaatgggaagaaccaggacatcttactttggacttgcaatctcaaaagcaagacaggcatggagaagcagggattctaaacccaattatggaaagagaagaaaaatttgttacagatgaagaactccatgtcgtaaaacaggaggttgaaaagctggaggatgaatgggaaagagaagaacttgataaaaagcaaaaagaaaaggcatctttactggaaagagaagaaaagccagagtgggaaactggaaggtaccaactaggaatgtatccaattcagaatatggataaattgcaaggagaggaagaagaaagactgaagagagaaatgctacttgctaaactgaatgaaattgacagagaactccaagattctcgaaatctaaaataccctgttttgccattgttacctgattttgaatcaaaactacactccccagagagaagccccaaaacatacaggttctctgaatcctcagagagattatttaatgggcatcatttgcaagacatcagtttctcaactccaaaaggagaaggtcagaattcaggaaatgttagaagtccagcctcccctaatgagttcgcatttggtagctacgtgccttcgtttgcaaaaacatcagagaggtcaaatccatttagtcaaaaaagtagttttttggatttccaaagaaacagtatggaaaaacttagtaaagatggtgtagatttaattacaagaaaagagaaaaaagctaatttgatggaacagttatttggtgccagtggtagcagcaccatttcctccaaaagcagtgacccaaattctgtggcttccagtaaaggagacattgaccctctaaattttctccctgggaataaaggcagcagagatcaagaacatgatgaagatgaaggctttttcctcagtgaaggaagaagttttaatccaaataggcaccgattaaaacatgcagacgataaaccagcagtaaaagcagctgattctgtagaagatgaaattgaagaagtagcactgagatgactgactagagtatacattttttctaattgtaaatattgaaatattttaatacagtatttattataaacatttagactttttaatgctaaaatgtccttattaaggaatgatttttaatagctaaatacaatgcagttaaaaagaagtagatcatacatacaccacatagatagtttgccaagaatgaaggaggcttttttgaatgaaaccaaaaataaaaatatgtcttgaaaaatgaaatagattttaactcttcatccagtgctatggcaagtttaactgcactggaggtggtattccttttctacttttattcctatttatgtatttatttttaatcatattctcactgtgctaaatacagtcttcccactaattgttgaatgaaaattaagggtgaaagtctgtgttgggaagtgtagctccggatggtggagaaccagtgcttcttaggagcccttccctttatggatagggccaggggtccctatcttacgtggcagtcctaagctactcttgagtgatagcagtcacaacattgggatttcccattcctctgaaagtacccacagctaaacactactcatttcccaatttcagtatttactgaaatcacttacctacaattctgttagaatattatgttgagttcggaagacatttctctgtttgcaaggacagttagttgctctctgtcatagcccgcagaagcttggctacagtgtaattcctctccttgttctcctacactctttgtatctcagtgactgggtgtaagatttcatgccaaatgcaaggaatagtggaaatacataccaactgcaaagaatagaaaaactttatcccaatatattatagaaagatcttcagttcaattatgtccagagtaatataatttggcaatgttaatgcttttaagatttgaacttgtcctcaaaccaaggagacaacaatagtgtaatactattggacttacaggattagttttaaagcaactttgaatagaagtgtttcagacataggacttctgccttgttgactagagtggatagttttctgtttaaatgcattggtcttttggctgtttgtaattcacttcagcttatagagaagttgatgaccttggatcatgctgggtatgattggtctttaaaaagcagtaatataccaccagcccaaggagaaaacattgttaaaatgaagagtggtggaaatagtgtgttgggaagaataaaaaatttagattggcacttattctaaagtgagctgtttttttcaagaatttactagcatttgctcgtagtatgatttctgacgccagtcatatatactgatgaggggaaggagttactgtgttattctgagttcttataaatgcatattattgaatttcattgcatgactatttgtcaagacttacctggttaggtctccaattaaaagatgtaccacctgtcatcttctaaattgtgttcctttcatttattgggaacagaatctctcaaaagtgctaaactatattaaaaagttttcttaatagatttgtatgtctgatatgtataaccatttactataatatgttgcaaatcattctaatatatgtaaaacaatattatttgtaatgcagttattggtaaaatattatgtaatgttaattttgttcctagctgctaatttttctgccaaaagtattctaattttcaggttgttttaaaggcttttaaaactttttagttaagttttttattcacgtcatttaaattagttttttgctttttttctacctgataatctctttaacaagatgcaacaagacagaattattaaaattaaacctaaagttaagttacagatttaaaggcattatgatattaagcattaaaattggagattaaaatgtacaaaacagggttttccttatgaacaaaccttacagggtaaattgtttttttttctaaatgtcattaaatttatttgtactcagaactgttactaataaaaattaaaaatgca

SEQ ID NO: 147621 - DNA, 2894 bp, Homo sapiens
  Payload ID: 9207
  Gene Symbol: LCA5
  Gene Name: Leber congenital amaurosis 5
  ENST ID: ENST00000467898
  CDS Start-End: 408-1700
atgattggctgcggtctcttcgtagtgcagtctaggcctccgcctccgttaccctggagcccaggttaccgccgctgccacccaggagccccgatcctcgcctctgtcccatccttgtgttcaaacctcccgcatctcggcaacctcggcacccgcccggcagcctccgcaggaaccaggcacccgctctttggcggtcagacgccgaggccccagggcaaaaaagtttatcttctggatgccaatgtgaattgtggtctacaaatacattgtggagaaaatagattgcacagaaatgaatattatcaggatctgaagactgtgaaaatgtttttcagtattgtcatagtctcctctggagaaaataatctgtgaaattatgtgaatagagaccatttttcaaaacaatgggggaaagagcaggaagtccaggtactgatcaagaaagaaaggcaggcaaacaccattattcttacttatctgattttgaaacgccacagtcttctggccgatcatcgctggtcagttcttcacctgcaagtgttaggagaaaaaatcctaaaagacaaacttcagatggccaagtacatcaccaagcccctcggaaaccaagccctaagggtctaccaaacagaaagggagtccgagtgggatttcgctcccagagcctcaatagagagccacttcggaaagatactgatcttgttacaaaacggattctgtctgcaagactgctaaaaatcaatgagttgcagaatgaagtatctgaactccaggtcaagttagctgagctgctaaaagaaaataaatctttgaaaaggcttcagtacagacaggagaaagccctgaataagtttgaagatgccgaaaatgaaatctcacaacttatatttcgtcataacaatgagattacagcactcaaagaacgcttaagaaaatctcaagagaaagaacgggcaactgagaaaagggtaaaagatacagaaagtgaactatttaggacaaaattttccttacagaaactgaaagagatctctgaagctagacacctacctgaacgagatgatttggcaaagaaactagtttcagcagagttaaagttagatgacaccgagagaagaattaaggagctatcgaaaaaccttgaactgagtactaacagtttccaacgacagttgcttgctgaaaggaaaagggcatatgaggctcatgatgaaaataaagttcttcaaaaggaggtacagcgactatatcacaaattaaaggaaaaggagagagaactggatataaaaaatatatattctaatcgtctgccaaagtcctctccaaataaagagaaagaacttgcattaagaaaaaatgctgcatgccagagtgattttgcagacctgtgtacaaaaggagtacaaaccatggaagacttcaagccagaagaatatcctttaactccagaaacaattatgtgttacgaaaacaaatgggaagaaccaggacatcttactttggacttgcaatctcaaaagcaagacaggcatggagaagcagggattctaaacccaattatggaaagagaagaaaaatttgttacagatgaagaactccatgtcgtaaaacaggaggttgaaaagctggaggatggtaagaaaaagagtttgtttaagcatgtgacaagtcagcatcccttgagaaagaaagagtgagcgtcttctaatatcttccagcttaactgtgaattgcttaggtagaacaaagaaaggtggatacagtggtaggggatggcttatcaggagccatacacatttgaataatgttattaaggaaagaaaaaaattgaacactctaagtcatttgctatttagggttagggaataaggacaagttgcattcagaaaattctgatgaagtagaattcagatgccacttactaaagttactatacttgtggtgttcttacatattttaaaatttttaattttttcatttggaagtagtttcaaagttaaagtggcaagaatagctaaagaactatttgtgagtgagttgtgtcatgcccatacctttaaatagttgtatgtatatttccccaaactaggacattctcttagactgtattctaatgtagttttcaacttcaggaaatttaactttgacacaacacatttatctgatctgtcattcatattatgattttgtcagttgatacaatattgttcttgatagaattttcttccctctggtacaagatcatgaattgcatttagttttcatatctcttcagtcttctttaatctagagatttttgttacatatatatatagagagagagagagggaaggaaaaagagaatgtgtgtgagagattaacatttttgatgaatatagacccatttttaaaaatagaatgttcttcattttgggtttgtctgaagttttctcttaattagattcaagttaatgcatcttctgtcagaataccacataagtctatctcaggatatgacattgaaaggtttcatttatttttaagtgtagagtctttgctccatctatccatccatccatccccaccatacagcattatattagttataaaaaataggcaaagaacctttcttccccaccagtatctcaaagaacaaatttttttataaatgagaatcttaaatgcaatacgtattaaatatattattctctaatcccagaatatcaagtatagaaatgaaatttatgatgtcttttctcacttgatttataatacccaaattaaatatggtggttttatgaaagttgatagttttcctatttaaaaatattgactgttacaaaatcccatttaaaaaatttgatttcatacagaatgggaaagagaagaacttgataaaaagcaaaaagaaa

SEQ ID NO: 147622 - DNA, 2416 bp, Homo sapiens
  Payload ID: 9208
  Gene Symbol: LCA5L
  Gene Name: Leber congenital amaurosis 5-like
  Uniprot ID: O95447
  ENST ID: ENST00000288350
  CDS Start-End: 366-2378
gggacgcgccggcgctgcggcgttggcgcagtcgtgggaacagcgcggagcagagaagcaccaaaagaggcaaactgagatgcagacaaatgatcatccgtatgctgatcattttgaatagttttttaaaatatattctttctttaaaaagagaccaaaacctgtcaaaaaaatactaccgtggaaagctcataaatactacagtgtgaagaaccctgtgcttatcttcagtttatcatcagacatcttagggaagtttaataaagaacaccaggagaattgagaattaaatgaaaaggtaaatccttttaaagacctcagaagatggatctgtttgtttcaatctgcttttgaggttgtttgctatgtctttggctgatctaacaaaaacaaatatagatgagcatttcttcggcgtggcattagaaaacaataggaggtctgcagcatgcaagagaagcccaggcacaggcgatttttcacggaacagtaatgcttccaataagagtgttgattatagcagatctcagtgctcctgtggaagtttaagttctcagtatgattattcagaagactttctctgtgattgttcagaaaaggctattaatagaaattatttaaagcagcctgtggtaaaagaaaaggagaagaaaaagtataatgtttctaaaatctcccaatctaaaggccagaaggaaatatcagttgaaaaaaagcacacctggaatgcatcactctttaattctcaaatccatatgattgcccaaagaagagatgctatggctcatcgaatactctcagcaaggcttcataaaattaaaggactaaaaaatgaattagctgatatgcatcataaattggaagccatccttacagaaaaccaatttttgaaacaacttcagcttaggcatttgaaagctataggaaaatatgagaattcacaaaataatctacctcaaattatggctaaacatcagaatgaagtaaaaaatttaaggcaactacttaggaaatcccaggaaaaggaaagaactctatctaggaaacttagagaaactgacagccagttactgaagactaaagatatcttgcaggcactgcagaaactttctgaagacaaaaaccttgcagaaagggaagaactcactcataaattatctattatcacaacaaaaatggacgcaaatgacaaaaaaatacagagcttggaaaaacaactgaggttgaactgcagagcctttagccggcagctggctattgagactcggaagactttagcagctcagacagctaccaagactctgcaggtggaagtaaaacaccttcaacaaaaacttaaggaaaaggatcgtgagcttgaaattaaaaacatctatagtcatcgaatacttaaaaatttacatgacacagaggactatccaaaagtttcttcaacaaaatcagtccaagcagacagaaaaattttgccattcacaagtatgagacaccagggaacccaaaaatcagatgttccacctttgacaactaagggtaaaaaggcaacaggaaacatcgatcataaagaaaaatcaactgaaataaatcatgaaattcctcactgtgtgaataaactaccaaagcaagaggattctaagagaaaatatgaagatttatcaggggaagagaaacatttggaagtccaaatactgctggagaatactggaagacaaaaagacaaaaaagaagaccaagaaaagaaaaacatttttgtgaaagaagagcaagaactaccaccaaaaataattgaagttattcatcctgaaagagaaagcaatcaagaagatgttctagtaagagaaaagtttaaaagaagcatgcagagaaatggtgtggatgacacacttggcaaaggcactgctccctacacgaaaggccccctcagacaaagaagacattactcattcacagaagcaactgaaaacctgcatcatgggcttcctgcttcaggggggccagccaatgccggcaacatgaggtacagtcatagtacaggcaagcatctcagtaacagagaggaaatggagctagagcattctgacagtgggtatgagccctcatttggtaagtcttccagaataaaagtgaaggatacaactttcagagataagaaaagcagtctcatggaagaactctttggatcaggctatgtcttgaaaactgaccaatcaagtcctggtgttgcaaaaggctcagaggagcctttgcaaagtaaggagtcgcatcccctgcctcccagtcaggcctccaccagccatgctttcggagactctaaagtaactgtggtaaattctattaagccatcgtcacctacagaaggaaaaagaaaaataattatttaaatataatcaatatcctaatgcattctggtttgatataa

SEQ ID NO: 147623 - DNA, 2564 bp, Homo sapiens
  Payload ID: 9208
  Gene Symbol: LCA5L
  Gene Name: Leber congenital amaurosis 5-like
  Uniprot ID: O95447
  ENST ID: ENST00000358268
  CDS Start-End: 530-2542
gcggagcaggtaacggccccgctgctgccgtcgtccccctcagccggttaccctgttacagccccagctctgggcccttccggaccctcctgctacgctctttctgggcttccagtatcgccggtcactcagtcctcgcccctgcctgcctcgctggcgccccgccgtttcctcctcgcggcacagtttgccaaggaacagctaccccggctcggcagtgaccgggcgccccggcgacacacgtactctcaggcccgctgggcagggggacggcctgggccgaggttttttaaaatatattctttctttaaaaagagaccaaaacctgtcaaaaaaatactaccgtggaaagctcataaatactacagtgtgaagaaccctgtgcttatcttcagtttatcatcagacatcttagggaagtttaataaagaacaccaggagaattgagaattaaatgaaaaggtaaatccttttaaagacctcagaagatggatctgtttgtttcaatctgcttttgaggttgtttgctatgtctttggctgatctaacaaaaacaaatatagatgagcatttcttcggcgtggcattagaaaacaataggaggtctgcagcatgcaagagaagcccaggcacaggcgatttttcacggaacagtaatgcttccaataagagtgttgattatagcagatctcagtgctcctgtggaagtttaagttctcagtatgattattcagaagactttctctgtgattgttcagaaaaggctattaatagaaattatttaaagcagcctgtggtaaaagaaaaggagaagaaaaagtataatgtttctaaaatctcccaatctaaaggccagaaggaaatatcagttgaaaaaaagcacacctggaatgcatcactctttaattctcaaatccatatgattgcccaaagaagagatgctatggctcatcgaatactctcagcaaggcttcataaaattaaaggactaaaaaatgaattagctgatatgcatcataaattggaagccatccttacagaaaaccaatttttgaaacaacttcagcttaggcatttgaaagctataggaaaatatgagaattcacaaaataatctacctcaaattatggctaaacatcagaatgaagtaaaaaatttaaggcaactacttaggaaatcccaggaaaaggaaagaactctatctaggaaacttagagaaactgacagccagttactgaagactaaagatatcttgcaggcactgcagaaactttctgaagacaaaaaccttgcagaaagggaagaactcactcataaattatctattatcacaacaaaaatggacgcaaatgacaaaaaaatacagagcttggaaaaacaactgaggttgaactgcagagcctttagccggcagctggctattgagactcggaagactttagcagctcagacagctaccaagactctgcaggtggaagtaaaacaccttcaacaaaaacttaaggaaaaggatcgtgagcttgaaattaaaaacatctatagtcatcgaatacttaaaaatttacatgacacagaggactatccaaaagtttcttcaacaaaatcagtccaagcagacagaaaaattttgccattcacaagtatgagacaccagggaacccaaaaatcagatgttccacctttgacaactaagggtaaaaaggcaacaggaaacatcgatcataaagaaaaatcaactgaaataaatcatgaaattcctcactgtgtgaataaactaccaaagcaagaggattctaagagaaaatatgaagatttatcaggggaagagaaacatttggaagtccaaatactgctggagaatactggaagacaaaaagacaaaaaagaagaccaagaaaagaaaaacatttttgtgaaagaagagcaagaactaccaccaaaaataattgaagttattcatcctgaaagagaaagcaatcaagaagatgttctagtaagagaaaagtttaaaagaagcatgcagagaaatggtgtggatgacacacttggcaaaggcactgctccctacacgaaaggccccctcagacaaagaagacattactcattcacagaagcaactgaaaacctgcatcatgggcttcctgcttcaggggggccagccaatgccggcaacatgaggtacagtcatagtacaggcaagcatctcagtaacagagaggaaatggagctagagcattctgacagtgggtatgagccctcatttggtaagtcttccagaataaaagtgaaggatacaactttcagagataagaaaagcagtctcatggaagaactctttggatcaggctatgtcttgaaaactgaccaatcaagtcctggtgttgcaaaaggctcagaggagcctttgcaaagtaaggagtcgcatcccctgcctcccagtcaggcctccaccagccatgctttcggagactctaaagtaactgtggtaaattctattaagccatcgtcacctacagaaggaaaaagaaaaataattatttaaatataatcaatatcctaatgca

SEQ ID NO: 147624 - DNA, 2080 bp, Homo sapiens
  Payload ID: 9208
  Gene Symbol: LCA5L
  Gene Name: Leber congenital amaurosis 5-like
  Uniprot ID: O95447
  ENST ID: ENST00000380671
  CDS Start-End: 30-2042
tttacttttcttttattaggttgtttgctatgtctttggctgatctaacaaaaacaaatatagatgagcatttcttcggcgtggcattagaaaacaataggaggtctgcagcatgcaagagaagcccaggcacaggcgatttttcacggaacagtaatgcttccaataagagtgttgattatagcagatctcagtgctcctgtggaagtttaagttctcagtatgattattcagaagactttctctgtgattgttcagaaaaggctattaatagaaattatttaaagcagcctgtggtaaaagaaaaggagaagaaaaagtataatgtttctaaaatctcccaatctaaaggccagaaggaaatatcagttgaaaaaaagcacacctggaatgcatcactctttaattctcaaatccatatgattgcccaaagaagagatgctatggctcatcgaatactctcagcaaggcttcataaaattaaaggactaaaaaatgaattagctgatatgcatcataaattggaagccatccttacagaaaaccaatttttgaaacaacttcagcttaggcatttgaaagctataggaaaatatgagaattcacaaaataatctacctcaaattatggctaaacatcagaatgaagtaaaaaatttaaggcaactacttaggaaatcccaggaaaaggaaagaactctatctaggaaacttagagaaactgacagccagttactgaagactaaagatatcttgcaggcactgcagaaactttctgaagacaaaaaccttgcagaaagggaagaactcactcataaattatctattatcacaacaaaaatggacgcaaatgacaaaaaaatacagagcttggaaaaacaactgaggttgaactgcagagcctttagccggcagctggctattgagactcggaagactttagcagctcagacagctaccaagactctgcaggtggaagtaaaacaccttcaacaaaaacttaaggaaaaggatcgtgagcttgaaattaaaaacatctatagtcatcgaatacttaaaaatttacatgacacagaggactatccaaaagtttcttcaacaaaatcagtccaagcagacagaaaaattttgccattcacaagtatgagacaccagggaacccaaaaatcagatgttccacctttgacaactaagggtaaaaaggcaacaggaaacatcgatcataaagaaaaatcaactgaaataaatcatgaaattcctcactgtgtgaataaactaccaaagcaagaggattctaagagaaaatatgaagatttatcaggggaagagaaacatttggaagtccaaatactgctggagaatactggaagacaaaaagacaaaaaagaagaccaagaaaagaaaaacatttttgtgaaagaagagcaagaactaccaccaaaaataattgaagttattcatcctgaaagagaaagcaatcaagaagatgttctagtaagagaaaagtttaaaagaagcatgcagagaaatggtgtggatgacacacttggcaaaggcactgctccctacacgaaaggccccctcagacaaagaagacattactcattcacagaagcaactgaaaacctgcatcatgggcttcctgcttcaggggggccagccaatgccggcaacatgaggtacagtcatagtacaggcaagcatctcagtaacagagaggaaatggagctagagcattctgacagtgggtatgagccctcatttggtaagtcttccagaataaaagtgaaggatacaactttcagagataagaaaagcagtctcatggaagaactctttggatcaggctatgtcttgaaaactgaccaatcaagtcctggtgttgcaaaaggctcagaggagcctttgcaaagtaaggagtcgcatcccctgcctcccagtcaggcctccaccagccatgctttcggagactctaaagtaactgtggtaaattctattaagccatcgtcacctacagaaggaaaaagaaaaataattatttaaatataatcaatatcctaatgcattctggtttgatataa

SEQ ID NO: 147625 - DNA, 706 bp, Homo sapiens
  Payload ID: 9208
  Gene Symbol: LCA5L
  Gene Name: Leber congenital amaurosis 5-like
  ENST ID: ENST00000415863
  CDS Start-End: 498-706
ccggcgctgcggcgttggcgcagtcgtgggaacagcgcggagcagagaagcaccaaaagaggcaaactgagatgcagacaaatgatcatccgtatgctgatcattttgaataccttcagccatgcttctgccactgcctctgcaggaaagccacctgctttaaaaaaaagtcttcatggagtgcttatgagagggtcggctgttttctccagctcatttttccaaagcaaacaatcccaccagctatctcaggttttttaaaatatattctttctttaaaaagagaccaaaacctgtcaaaaaaatactaccgtggaaagctcataaatactacagtgtgaagaaccctgtgcttatcttcagtttatcatcagacatcttagggaagtttaataaagaacaccaggagaattgagaattaaatgaaaaggtaaatccttttaaagacctcagaagatggatctgtttgtttcaatctgcttttgaggttgtttgctatgtctttggctgatctaacaaaaacaaatatagatgagcatttcttcggcgtggcattagaaaacaataggaggtctgcagcatgcaagagaagcccaggcacaggcgatttttcacggaacagtaatgcttccaataagagtgttgattatagcagatctcagtgctcctgtggaagtttaagttctcagtatgattattcagaaga

SEQ ID NO: 147626 - DNA, 523 bp, Homo sapiens
  Payload ID: 9208
  Gene Symbol: LCA5L
  Gene Name: Leber congenital amaurosis 5-like
  ENST ID: ENST00000434281
  CDS Start-End: 238-523
ggaggccccgcgcgcgggtttccatggggacgcgccggcgctgcggcgttggcgcagtcgtgggaacagcgcggagcagagaagcaccaaaagaggcaaactgagatgcagacaaatgatcatccgtatgctgatcattttgaatagagaattgagaattaaatgaaaaggtaaatccttttaaagacctcagaagatggatctgtttgtttcaatctgcttttgaggttgtttgctatgtctttggctgatctaacaaaaacaaatatagatgagcatttcttcggcgtggcattagaaaacaataggaggtctgcagcatgcaagagaagcccaggcacaggcgatttttcacggaacagtaatgcttccaataagagtgttgattatagcagatctcagtgctcctgtggaagtttaagttctcagtatgattattcagaagactttctctgtgattgttcagaaaaggctattaatagaaattatttaaagcagcctgtggtaaaagaaaaggagaaga

SEQ ID NO: 147627 - DNA, 657 bp, Homo sapiens
  Payload ID: 9208
  Gene Symbol: LCA5L
  Gene Name: Leber congenital amaurosis 5-like
  ENST ID: ENST00000451131
  CDS Start-End: 626-657
gcgcagtcgtgggaacagcgcggagcagtctgtcagcactgccttcaaaatgcacccagaatagattcacaattctaccatttctctcaaccgccactgtcaccaccttggtccaggcccccatcatctgagaagcaccaaaagaggcaaactgagatgcagacaaatgatcatccgtatgctgatcattttgaatagttttttaaaatatattctttctttaaaaagagaccaaaacctgtcaaaaaaatactaccgtggaaagctcataaatactacagtgtgaagaaccctgtgcttatcttcagtttatcatcagacatcttagggaagtttaataaagaacaccagtgaggagattgtggactgcctaatatatttcatcagaagagaaggctggagaattaagcagatgcagcaaaaagcagaaactgacttcaaaaaaaaccctctcagtagagaaagtgatattagattcctattgcaaaggatctaatgccagttaaattctcttttgctttcttgataaaacaggagaattgagaattaaatgaaaaggtaaatccttttaaagacctcagaagatggatctgtttgtttcaatctgcttttgaggttgtttgctatgtctttggctgatctaacaaaaacaaatat

SEQ ID NO: 147628 - DNA, 885 bp, Homo sapiens
  Payload ID: 9208
  Gene Symbol: LCA5L
  Gene Name: Leber congenital amaurosis 5-like
  ENST ID: ENST00000418018
  CDS Start-End: 318-885
cggcgttggcgcagtcgtgggaacagcgcggagcagagaagcaccaaaagaggcaaactgagatgcagacaaatgatcatccgtatgctgatcattttgaataagaccaaaacctgtcaaaaaaatactaccgtggaaagctcataaatactacagtgtgaagaaccctgtgcttatcttcagtttatcatcagacatcttagggaagtttaataaagaacaccaggagaattgagaattaaatgaaaaggtaaatccttttaaagacctcagaagatggatctgtttgtttcaatctgcttttgaggttgtttgctatgtctttggctgatctaacaaaaacaaatatagatgagcatttcttcggcgtggcattagaaaacaataggaggtctgcagcatgcaagagaagcccaggcacaggcgatttttcacggaacagtaatgcttccaataagagtgttgattatagcagatctcagtgctcctgtggaagtttaagttctcagtatgattattcagaagactttctctgtgattgttcagaaaaggctattaatagaaattatttaaagcagcctgtggtaaaagaaaaggagaagaaaaagtataatgtttctaaaatctcccaatctaaaggccagaaggaaatatcagttgaaaaaaagcacacctggaatgcatcactctttaattctcaaatccatatgattgcccaaagaagagatgctatggctcatcgaatactctcagcaaggcttcataaaattaaaggactaaaaaatgaattagctgatatgcatcataaattggaagccatccttacagaaaaccaatttttgaaacaacttcagcttaggcatttgaaagctataggaaaatatg

SEQ ID NO: 147629 - DNA, 849 bp, Homo sapiens
  Payload ID: 9208
  Gene Symbol: LCA5L
  Gene Name: Leber congenital amaurosis 5-like
  ENST ID: ENST00000438404
  CDS Start-End: 566-849
ggccccgctgctgccgtcgtccccctcagccggttaccctgttacagccccagctctgggcccttccggaccctcctgctacgctctttctgggcttccagtatcgccggtcactcagtcctcgcccctgcctgcctcgctggcgccccgccgtttcctcctcgcggcacagtttgccaaggaacagctaccccggctcggcagtgaccgggcgccccggcgacacacgtactctcaggcccgctgggcagggggacggcctgggccgagtctgtcagcactgccttcaaaatgcacccagaatagattcacaattctaccatttctctcaaccgccactgtcaccaccttggtccaggcccccatcatctgagaagcaccaaaagaggcaaactgagatgcagacaaatgatcatccgtatgctgatcattttgaataatgaaaagcggaatctaatttgcatttcattatgagagaattgagaattaaatgaaaaggtaaatccttttaaagacctcagaagatggatctgtttgtttcaatctgcttttgaggttgtttgctatgtctttggctgatctaacaaaaacaaatatagatgagcatttcttcggcgtggcattagaaaacaataggaggtctgcagcatgcaagagaagcccaggcacaggcgatttttcacggaacagtaatgcttccaataagagtgttgattatagcagatctcagtgctcctgtggaagtttaagttctcagtatgattattcagaagactttctctgtgattgttcagaaaaggctattaatagaaattatttaaagcagcctgtggtaaaagaaaaggagaa

SEQ ID NO: 147630 - DNA, 804 bp, Homo sapiens
  Payload ID: 9208
  Gene Symbol: LCA5L
  Gene Name: Leber congenital amaurosis 5-like
  ENST ID: ENST00000448288
  CDS Start-End: 483-804
ggggacgcgccggcgctgcggcgttggcgcagtcgtgggaacagcgcggagcaggttttttaaaatatattctttctttaaaaagagaccaaaacctgtcaaaaaaatactaccgtggaaagctcataaatactacagtgtgaagaaccctgtgcttatcttcagtttatcatcagacatcttagggaagtttaataaagaacaccagtgaggagattgtggactgcctaatatatttcatcagaagagaaggctggagaattaagcagatgcagcaaaaagcagaaactgacttcaaaaaaaaccctctcagtagagaaagtgatattagattcctattgcaaaggatctaatgccagttaaattctcttttgctttcttgataaaacaggagaattgagaattaaatgaaaaggtaaatccttttaaagacctcagaagatggatctgtttgtttcaatctgcttttgaggttgtttgctatgtctttggctgatctaacaaaaacaaatatagatgagcatttcttcggcgtggcattagaaaacaataggaggtctgcagcatgcaagagaagcccaggcacaggcgatttttcacggaacagtaatgcttccaataagagtgttgattatagcagatctcagtgctcctgtggaagtttaagttctcagtatgattattcagaagactttctctgtgattgttcagaaaaggctattaatagaaattatttaaagcagcctgtggtaaaagaaaaggagaagaaaaagtataatgtttctaaaatctcccaatctaaag

SEQ ID NO: 147631 - DNA, 612 bp, Homo sapiens
  Payload ID: 9208
  Gene Symbol: LCA5L
  Gene Name: Leber congenital amaurosis 5-like
  ENST ID: ENST00000456017
  CDS Start-End: 521-612
atggggacgcgccggcgctgcggcgttggcgcagtcgtgggaacagcgcggagcagagaagcaccaaaagaggcaaactgagatgcagacaaatgatcatccgtatgctgatcattttgaataagaccaaaacctgtcaaaaaaatactaccgtggaaagctcataaatactacagtgtgaagaaccctgtgcttatcttcagtttatcatcagacatcttagggaagtttaataaagaacaccagtgaggagattgtggactgcctaatatatttcatcagaagagaaggctggagaattaagcagatgcagcaaaaagcagaaactgacttcaaaaaaaaccctctcagtagagaaagtgatattagattcctattgcaaaggatctaatgccagttaaattctcttttgctttcttgataaaacaggagaattgagaattaaatgaaaaggtaaatccttttaaagacctcagaagatggatctgtttgtttcaatctgcttttgaggttgtttgctatgtctttggctgatctaacaaaaacaaatatagatgagcatttcttcggcgtggcattagaaaacaataggaggtctgcagcatgcaagag

SEQ ID NO: 147632 - DNA, 808 bp, Homo sapiens
  Payload ID: 9208
  Gene Symbol: LCA5L
  Gene Name: Leber congenital amaurosis 5-like
  ENST ID: ENST00000411566
  CDS Start-End: 530-808
gcggagcaggtaacggccccgctgctgccgtcgtccccctcagccggttaccctgttacagccccagctctgggcccttccggaccctcctgctacgctctttctgggcttccagtatcgccggtcactcagtcctcgcccctgcctgcctcgctggcgccccgccgtttcctcctcgcggcacagtttgccaaggaacagctaccccggctcggcagtgaccgggcgccccggcgacacacgtactctcaggcccgctgggcagggggacggcctgggccgaggttttttaaaatatattctttctttaaaaagagaccaaaacctgtcaaaaaaatactaccgtggaaagctcataaatactacagtgtgaagaaccctgtgcttatcttcagtttatcatcagacatcttagggaagtttaataaagaacaccaggagaattgagaattaaatgaaaaggtaaatccttttaaagacctcagaagatggatctgtttgtttcaatctgcttttgaggttgtttgctatgtctttggctgatctaacaaaaacaaatatagatgagcatttcttcggcgtggcattagaaaacaataggaggtctgcagcatgcaagagaagcccaggcacaggcgatttttcacggaacagtaatgcttccaataagagtgttgattatagcagatctcagtgctcctgtggaagtttaagttctcagtatgattattcagaagactttctctgtgattgttcagaaaaggctattaatagaaattatttaaagcagcctgtggtaaaagaaaag

SEQ ID NO: 147633 - DNA, 690 bp, Homo sapiens
  Payload ID: 9208
  Gene Symbol: LCA5L
  Gene Name: Leber congenital amaurosis 5-like
  ENST ID: ENST00000426783
  CDS Start-End: 502-690
ccggcgctgcggcgttggcgcagtcgtgggaacagcgcggagcagccttcagccatgcttctgccactgcctctgcaggaaagccacctgctttaaaaaaaagtcttcatggagtgcttatgagagggtcggctgttttctccagctcatttttccaaagcaaacaatcccaccagctatctcaggcaagaaacacataatccaaaaactttaattatttatgttcaactctgtactggaaagaaagagcaggcaggttttttaaaatatattctttctttaaaaagagaccaaaacctgtcaaaaaaatactaccgtggaaagctcataaatactacagtgtgaagaaccctgtgcttatcttcagtttatcatcagacatcttagggaagtttaataaagaacaccaggagaattgagaattaaatgaaaaggtaaatccttttaaagacctcagaagatggatctgtttgtttcaatctgcttttgaggttgtttgctatgtctttggctgatctaacaaaaacaaatatagatgagcatttcttcggcgtggcattagaaaacaataggaggtctgcagcatgcaagagaagcccaggcacaggcgatttttcacggaacagtaatgcttccaataagagtgttgattatagcagatctcagtgctcctgtggaagtttaagttct

SEQ ID NO: 147634 - DNA, 2551 bp, Homo sapiens
  Payload ID: 9208
  Gene Symbol: LCA5L
  Gene Name: Leber congenital amaurosis 5-like
  ENST ID: ENST00000485895
  CDS Start-End: 299-1165
gggacgcgccggcgctgcggcgttggcgcagtcgtgggaacagcgcggagcaggttttttaaaatatattctttctttaaaaagagaccaaaacctgtcaaaaaaatactaccgtggaaagctcataaatactacagtgtgaagaaccctgtgcttatcttcagtttatcatcagacatcttagggaagtttaataaagaacaccaggagaattgagaattaaatgaaaaggtaaatccttttaaagacctcagaagatggatctgtttgtttcaatctgcttttgaggttgtttgctatgtctttggctgatctaacaaaaacaaatatagatgagcatttcttcggcgtggcattagaaaacaataggaggtctgcagcatgcaagagaagcccaggcacaggcgatttttcacggaacagtaatgcttccaataagagtgttgattatagcagatctcagtgctcctgtggaagtttaagttctcagtatgattattcagaagactttctctgtgattgttcagaaaaggctattaatagaaattatttaaagcagcctgtggtaaaagaaaaggagaagaaaaagtataatgtttctaaaatctcccaatctaaaggccagaaggaaatatcagttgaaaaaaagcacacctggaatgcatcactctttaattctcaaatccatatgattgcccaaagaagagatgctatggctcatcgaatactctcagcaaggcttcataaaattaaaggactaaaaaatgaattagctgatatgcatcataaattggaagccatccttacagaaaaccaatttttgaaacaacttcagcttaggcatttgaaagctataggaaaatatgagaattcacaaaataatctacctcaaattatggctaaacatcagaatgaagtaaaaaatttaaggcaactacttaggaaatcccaggaaaaggaaagaactctatctaggaaacttagagaaactgacagccagttactgaagactaaagatatcttgcaggcactgcagaaactttctgaagacaaaaaccttgcagaaagggaagaactcactcataaattatctattatcacaacaaaaatggacgcaaatgacaaaaaaatacaggtctgtatttcaggggcccagacagtttaagattccaaagttaatagagagagggtgtgaattaatcatggatgcgccccctctgtaacaaagcattactaactgcttcacttggcgtgctgcactaaataattatgttgtctaatagagggcacagaaagggagtggtttgaaggaaaaacagaagcagctcaaactagaaatgttcatctgttgcagtgcacaagagttcactctgtggctggactggtttatctggaaatgaccattctctaagagagcacagctacagtgctaagggactttttccctgtgctgaaaagattgcattgtgttacgtgaaacctctctttgaagtcaaccctctaccttaaactgttgattaaaaggctacttccctaaaaacctactcagtgcatccgttcagggcctttgtattctccctcaccattttggccaggaattaccacacagacatttgtagttattttcaaaatagcagcttttcccagataatgttcctgggtagtagggaaggaaaaggaattaaaataattaaagagatgactggattgattttcctcaacagcacttggttgtcaaaagcctggggattacattataagggatgacttgggagaaggcattgatatcatattaagaattctcctgcatatcttacattagctagtttgagtctgtatagacataaacataaatggaattaatttaggatttaattctgtaatatttgatgctgaaacacgagtattttctatgatcttgaagtaagtaaatatcaggttcgtttcctccacgttttaatctcagttatttcttctgttgttaaaattccctattttccaataaatttttttcacatgaaattaatatgtgatctacagaaaataatgagcaacctcaattttcactcttgtataccaaagtgatattattgggccttttaggtaatattgtattcatcttagcgtatgtctgtcatgtaaaagcaaatctgttttcatgtatgtatctaagttgttcatgtttttatatctatacataaaaccaaaacaaattccataactattttctttgatacaaaaagcacttaccaagtatgagaaatttctgtttggttgtaggcatttagtggaggaaaactgttttgtggaccaaaacatgttatttctttaacattaatgttttagggagtggtatttttagtgattctttccccttgtagctttccatgtcttccacttttcctgtttgggaaagtactgctgttataatggaggaggtcctactttatgttaaaacaaagaaaagtggtccttttggtaagctttctgtcaagtccagatctaacagttctccaataaaatagttctcattccagagagcagatgaata

SEQ ID NO: 147635 - DNA, 4928 bp, Homo sapiens
  Payload ID: 9209
  Gene Symbol: LRAT
  Gene Name: lecithin retinol acyltransferase (phosphatidylcholine--retinol O-acyltransferase)
  Uniprot ID: O95237
  ENST ID: ENST00000336356
  CDS Start-End: 254-946
taaaaagtcgcagcgaagcctgcacctccgagcaccgcgcgcggccctgcccccggcacggcccccaggtgcgctccttctccggctgcttgtagcactggtctcactgtccccgccgtcagccaccggttccttatccgtctcattccccattgtggcttggctgagccggtcgccaggcctcgctgtcctcctttgccttcctctctcctcagcggccgtactttgcgccgtacctcacctggcctgcaggatgaagaaccccatgctggaggtggtgtctttactactggagaagctgctcctcatctccaacttcacgctctttagttcgggcgccgcgggcgaagacaaagggaggaacagtttttatgaaaccagctctttccaccgaggcgacgtgctggaggtgccccggacccacctgacccactatggcatctacctaggagacaaccgtgttgcccacatgatgcccgacatcctgttggccctgacagacgacatggggcgcacgcagaaggtggtctccaacaagcgtctcatcctgggcgttattgtcaaagtggccagcatccgcgtggacacagtggaggacttcgcctacggagctaacatcctggtcaatcacctggacgagtccctccagaaaaaggcactgctcaacgaggaggtggcgcggagggctgaaaagctgctgggctttaccccctacagcctgctgtggaacaactgcgagcacttcgtgacctactgcagatatggcaccccgatcagtccccagtccgacaagttttgtgagactgtgaagataattattcgtgatcagagaagtgttcttgcttcagcagtcttgggattggcgtctatagtctgtacgggcttggtatcatacactacccttcctgcaatttttattccattcttcctatggatggctggctaacttcatacccccatgtcagtgtgtgtattctgtatgtaaatatgtttatatttatagagcatcaatcaatataagcattattgagaaaaatgtgacccgtaacactgtgttctggataaaaatgtgattaggaatcacgcaaagtgcttactgtgtaagcccaagaacaaaggctttctgaatcttctcaggcagttcagatttaaagcaccatccaaaccttggaaatacgacagggtgtggtagaattcagcaatatgagaaaaccagcccctaaaatgatagccacaagagattaattgtgtttttttttctcctgtaatccttgtactgttcggctgaatttgaagattggaagacttatattgagaccagtaactttactgtaaatttactttgtttcattgaaaaaacaaattgataaacatattaaactggaagaattttctttattcaaatgaaaacatgtttgatgactggtcaaaaaataagctcataatctatttttttcatgtagtatataagtcaagaatgttttattgtcattatgtgaaaccaatattggcaaatagtactttaatgatgaagtaaatgaccagaaattatagaaatctgtgttttcctgtaaaaatagcactatagtatcacttgaacaatttgatttggctttacttactaggaagcctggaattcattatttttttccttttatgtgccactgtggctactttaaatcactctgagaggtaaatggatataggattgaagttatgtgggtatttggcatgtgtgtgtgaaataaatatgtagatagtcacatatacacagactgagagataaattgttcttgattgctttattatcatcatactagtgtgttcattatagagtatctgtagaggtgaatgtaaaagtaagtccaatctattttcttatgtcattgaatttgtagtgttaacttgcatatatgttattggatgggttgtcttttaaagcatttactaatgtactctgaaatttttaaaagccttcagatttgttttctagtcacttttttccatatcatttctaattatagtttatatccttaaaagaaggatgccacagtagtatgtaaaacccaaacaagtagaacccaagcaaataaaattatttaaaataattttaaagtggcttagtactgccagtcatgtaaattgattctgctgagggtcttataagaattgagatataacaatggtaaaacaagcattcaagcacttttacaaaattaccaaattcttaaaatgaagccacagctagacttgcatttcaggtattaaaattgctttcttaactgtcaagaatcacaaaataacaaatcatattatgagtgaatatggggagggcggggccaatcagtcaatgataatctgaacaaattttaagagcagattttagattaataatgttttatcaccactaatttgcccacaacaaactcagtatttaatttttcaaattaaatattaaattatttaagtattttaaataattaaaacattaaatggcaacaccatagaatataggtgttctctggacctattctaaccacttaaaattatcttaagtatgcatacataaaagcaaccactatgagaactaccgtgttagtggtttttcacttactgtatattacccttgtaggaatagtttaaggaaattcatttcttaaaaatatagtgtcctcaaataattaatttttttgcaaactttagttattacaggcagcaaaaaccactgtctgaaactaaatctgtgttcaaagatgaagacccctcattaaaagccaaggacgttcttaagattggaactgacataattagtcttgacttacttcattaaagcaagattcaattccttgttcatttgagtgttcattatatgccaggcattgaccagttgcaattttatggtccagaattaatattattattcgtaaactagctataatagagtatatacagtgctgtgggaatacaggggaagaagcaattaaatctgctagaagggtaagagaaatctgtatgcaggaggcaatgctagcattaagccaagaaatagtgtgaggtgatcttatcacactgatgtgttcaactgtttatgggaaaaggaaactaggatggttttatttgtgaaatgttctacaacgctagaactgttgaacttcttgggagaaaaggagaatctttgttttgttgtgctgagtttgattagttgcttaaccaagtagaaagaaaagcacatcttcctgatcacagttataaaagaaaccctgaggccgggcgcggtggctcaagcctgtaaccccagcactttgggaggccaaggagggaggatcacaaggtcaggagatcgagaccatcctggctaacacggtgaaaccccatctctactaaaaatacaaaattagctgggcgtggtggccggcgcctgtagtcccagctactcatgaggttgaggcaggagaatggcgtgaaccgaggaggcggagcttgcagtgagtggaaattgcgccactgcactccagcctgggcaacaaagtgagactccatctcaaaaaaaaaaaaaaaaaaaaaaaaaaaaaaagaagaagaaaccctgagccattaatgtgtctcgtaacttgaggaagttcatgaattctctgggcttcatccattaagattcatccttatgctcctgcaagtttcttatatttatgtatttctattctgatttctgaaatgataacctagtagtgtctgatgaagttttttcatgcttattttattctttgtcacagatgaaagaagaataggactaattggggctaagatgaattaatgtaagtgtcagatactaggcaggtgttagggatgaaatgatgaatgaggcatggacctgttcctcagagtttatggcccagtagacataattgtattaggactttctgcagttgacatttgcataaagctgactgactgaaggaacagaaagtgagacagacagatatgaccaaatttatacaaaccatgtaccaacacttgaaagatgggtggatattttccaggaaacagattttgggcaggacattccatgcactggaaatagcatgaacaaatgcatgaaaattgcctacaacatgcctggcacatagctgtgaggtaccctatgagttgttgacttgaaaacatggaactgcacagggcattcaggcaagtgcaagtggttcaggggccagcgcagagcagagtgctgagtaaagatgtcagaaaaggaaagcaatggtctggtacaagtcttgtatagaacaagaagtttagacttttgaacaggcaatcgagatttggggttcagaaagataaatcccaaaagtatggagaacaaaggaactcattttaaaggactagctaagatgctcaatctctaaaaaaaaaaggatctgtattcgtgagagtagagagaaaggttgtttaggaagagtcaacagactttagcaaaatccttttatttgattcatgcataactcctgatggagtgtcaaggaagactcattcacttttctttcctgccagaaagttggttcttgcaaaatagattaacttgatgactatgtgtatattggatactcctaattttagctctgttagatatgtttctttctaaggacaagcaactatgtatagacttgttgtttgaattttttttcagtatatatatgtttcttgtttttctatttttctacttcatactgttaatgtcaaatatcaaaaatgttttccagcaatatcaagttatggcaatggcaaaagtccttgttgtagatgagaagcatataagaaatggttgccaatctttgttttgtatgatctatttagagttttaaccaacctagatctgtcagctaagctaattttatatttggtatacatgcatgtcaaataaagttaattttacatac

SEQ ID NO: 147636 - DNA, 546 bp, Homo sapiens
  Payload ID: 9209
  Gene Symbol: LRAT
  Gene Name: lecithin retinol acyltransferase (phosphatidylcholine--retinol O-acyltransferase)
  ENST ID: ENST00000502525
  CDS Start-End: 340-546
tctgctcctcgggcggccttgagcagtgcctaacgttgagcgtgaggctcgtgctccgggtctcgcgggcggccgcctcgggcgtcgagtcccggagattggacagacaccagagcctggggaccgcggagtgaccgggtggggctggagggcggcgccgcgccttctggggagacgcggaggtatcaggacctgggctatgctcctgattttatacagactgccatggctccagatataaaagaccaaataaaaagataagaattgctggcaacatatgcactaaacttcgttttgaaaaatccccttgatgccgatcactgagaagtgatccacaggatgaagaaccccatgctggaggtggtgtctttactactggagaagctgctcctcatctccaacttcacgctctttagttcgggcgccgcgggcgaagacaaagggaggaacagtttttatgaaaccagctctttccaccgaggcgacgtgctggaggtgccccggacccacctgacccactatggcatctacctaggagacaaccgt

SEQ ID NO: 147637 - DNA, 2654 bp, Homo sapiens
  Payload ID: 9209
  Gene Symbol: LRAT
  Gene Name: lecithin retinol acyltransferase (phosphatidylcholine--retinol O-acyltransferase)
  Uniprot ID: O95237
  ENST ID: ENST00000507827
  CDS Start-End: 63-755
acagaatgtagccacctttcttaacggtccgggaaaccagaggtctctccagctactcagggatgaagaaccccatgctggaggtggtgtctttactactggagaagctgctcctcatctccaacttcacgctctttagttcgggcgccgcgggcgaagacaaagggaggaacagtttttatgaaaccagctctttccaccgaggcgacgtgctggaggtgccccggacccacctgacccactatggcatctacctaggagacaaccgtgttgcccacatgatgcccgacatcctgttggccctgacagacgacatggggcgcacgcagaaggtggtctccaacaagcgtctcatcctgggcgttattgtcaaagtggccagcatccgcgtggacacagtggaggacttcgcctacggagctaacatcctggtcaatcacctggacgagtccctccagaaaaaggcactgctcaacgaggaggtggcgcggagggctgaaaagctgctgggctttaccccctacagcctgctgtggaacaactgcgagcacttcgtgacctactgcagatatggcaccccgatcagtccccagtccgacaagttttgtgagactgtgaagataattattcgtgatcagagaagtgttcttgcttcagcagtcttgggattggcgtctatagtctgtacgggcttggtatcatacactacccttcctgcaatttttattccattcttcctatggatggctggctaacttcatacccccatgtcagtgtgtgtattctgtatgtaaatatgtttatatttatagagcatcaatcaatataagcattattgagaaaaatgtgacccgtaacactgtgttctggataaaaatgtgattaggaatcacgcaaagtgcttactgtgtaagcccaagaacaaaggctttctgaatcttctcaggcagttcagatttaaagcaccatccaaaccttggaaatacgacagggtgtggtagaattcagcaatatgagaaaaccagcccctaaaatgatagccacaagagattaattgtgtttttttttctcctgtaatccttgtactgttcggctgaatttgaagattggaagacttatattgagaccagtaactttactgtaaatttactttgtttcattgaaaaaacaaattgataaacatattaaactggaagaattttctttattcaaatgaaaacatgtttgatgactggtcaaaaaataagctcataatctatttttttcatgtagtatataagtcaagaatgttttattgtcattatgtgaaaccaatattggcaaatagtactttaatgatgaagtaaatgaccagaaattatagaaatctgtgttttcctgtaaaaatagcactatagtatcacttgaacaatttgatttggctttacttactaggaagcctggaattcattatttttttccttttatgtgccactgtggctactttaaatcactctgagaggtaaatggatataggattgaagttatgtgggtatttggcatgtgtgtgtgaaataaatatgtagatagtcacatatacacagactgagagataaattgttcttgattgctttattatcatcatactagtgtgttcattatagagtatctgtagaggtgaatgtaaaagtaagtccaatctattttcttatgtcattgaatttgtagtgttaacttgcatatatgttattggatgggttgtcttttaaagcatttactaatgtactctgaaatttttaaaagccttcagatttgttttctagtcacttttttccatatcatttctaattatagtttatatccttaaaagaaggatgccacagtagtatgtaaaacccaaacaagtagaacccaagcaaataaaattatttaaaataattttaaagtggcttagtactgccagtcatgtaaattgattctgctgagggtcttataagaattgagatataacaatggtaaaacaagcattcaagcacttttacaaaattaccaaattcttaaaatgaagccacagctagacttgcatttcaggtattaaaattgctttcttaactgtcaagaatcacaaaataacaaatcatattatgagtgaatatggggagggcggggccaatcagtcaatgataatctgaacaaattttaagagcagattttagattaataatgttttatcaccactaatttgcccacaacaaactcagtatttaatttttcaaattaaatattaaattatttaagtattttaaataattaaaacattaaatggcaacaccatagaatataggtgttctctggacctattctaaccacttaaaattatcttaagtatgcatacataaaagcaaccactatgagaactaccgtgttagtggtttttcacttactgtatattacccttgtaggaatagtttaaggaaattcatttcttaaaaatatagtgtcctcaaataattaatttttttgcaaactttagttattacaggcagcaaaaaccactgtctgaaactaaatctgtgttcaaagatgaagacccctcattaaaagccaaggacgttcttaagattggaactgacataattagtcttgacttacttcattaaagcaagattcaattc

SEQ ID NO: 147638 - DNA, 1507 bp, Homo sapiens
  Payload ID: 9210
  Gene Symbol: LCAT
  Gene Name: lecithin-cholesterol acyltransferase
  Uniprot ID: P04180
  ENST ID: ENST00000264005
  CDS Start-End: 31-1353
ctttctctggcagtaggcaccagggctggaatggggccgcccggctccccatggcagtgggtgacgctgctgctggggctgctgctccctcctgccgcccccttctggctcctcaatgtgctcttccccccgcacaccacgcccaaggctgagctcagtaaccacacacggcccgtcatcctcgtgcccggctgcctggggaatcagctagaagccaagctggacaaaccagatgtggtgaactggatgtgctaccgcaagacagaggacttcttcaccatctggctggatctcaacatgttcctaccccttggggtagactgctggatcgataacaccagggttgtctacaaccggagctctgggctcgtgtccaacgcccctggtgtccagatccgcgtccctggctttggcaagacctactctgtggagtacctggacagcagcaagctggcagggtacctgcacacactggtgcagaacctggtcaacaatggctacgtgcgggacgagactgtgcgcgccgccccctatgactggcggctggagcccggccagcaggaggagtactaccgcaagctcgcagggctggtggaggagatgcacgctgcctatgggaagcctgtcttcctcattggccacagcctcggctgtctacacttgctctatttcctgctgcgccagccccaggcctggaaggaccgctttattgatggcttcatctctcttggggctccctggggtggctccatcaagcccatgctggtcttggcctcaggtgacaaccagggcatccccatcatgtccagcatcaagctgaaagaggagcagcgcataaccaccacctccccctggatgtttccctctcgcatggcgtggcctgaggaccacgtgttcatttccacacccagcttcaactacacaggccgtgacttccaacgcttctttgcagacctgcactttgaggaaggctggtacatgtggctgcagtcacgtgacctcctggcaggactcccagcacctggtgtggaagtatactgtctttacggcgtgggcctgcccacgccccgcacctacatctacgaccacggcttcccctacacggaccctgtgggtgtgctctatgaggatggtgatgacacggtggcgacccgcagcaccgagctctgtggcctgtggcagggccgccagccacagcctgtgcacctgctgcccctgcacgggatacagcatctcaacatggtcttcagcaacctgaccctggagcacatcaatgccatcctgctgggtgcctaccgccagggtccccctgcatccccgactgccagcccagagcccccgcctcctgaataaagaccttcctttgctaccgtaagccctgatggctatgtttcaggttgaagggaggcactagagtcccacactaggtttcactcctcaccagccacaggctcagtgctgtgtgcagtgaggcaagatgggctctgctgaggcctgggactgagct

SEQ ID NO: 147639 - DNA, 359 bp, Homo sapiens
  Payload ID: 9210
  Gene Symbol: LCAT
  Gene Name: lecithin-cholesterol acyltransferase
  ENST ID: ENST00000576450
  CDS Start-End: 1-241
ggagtactaccgcaagctcgcagggctggtggaggagatgcacgctgcctatgggaagcctgtcttcctcattggccacagcctcggctgtctacacttgctctatttcctgctgcgccagccccaggcctggaaggaccgctttattgatggcttcatctctcttggggctccctggggtggctccatcaagcccatgctggtcttggcctcagggagtggcaccagggcccagcactgacacagctaccacctactccccaccccctgtaccctgggagctggtctggagagagaaacacagtctggacaagagaaacgctcatcagacaccaccaataaacatcaaacagacacca

SEQ ID NO: 147640 - DNA, 348 bp, Homo sapiens
  Payload ID: 9210
  Gene Symbol: LCAT
  Gene Name: lecithin-cholesterol acyltransferase
  ENST ID: ENST00000570369
  CDS Start-End: 1-322
cctaccccttggggtagactgctggatcgataacaccagggttgtctacaaccggagctctgggctcgtgtccaacgcccctggtgtccagatccgcgtccctggctttggcaagacctactctgtggagtacctggacagcagcaagctggcagggccgccagccacagcctgtgcacctgctgcccctgcacgggatacagcatctcaacatggtcttcagcaacctgaccctggagcacatcaatgccatcctgctgggtgcctaccgccagggtccccctgcatccccgactgccagcccagagcccccgcctcctgaataaagaccttcctttgctaccgtaa

SEQ ID NO: 147641 - DNA, 322 bp, Homo sapiens
  Payload ID: 9210
  Gene Symbol: LCAT
  Gene Name: lecithin-cholesterol acyltransferase
  ENST ID: ENST00000570396
  CDS Start-End: 1-186
agccccaggcctggaaggaccgctttattgatggcttcatctctcttggggctccctggggtggctccatcaagcccatgctggtcttggcctcaggagtgcctttgcccagggatgtgcttcactgaggatggatctgccagagctagggccagaccccccgaggccccacctgctcttccctagggagtggcaccagggcccagcactgacacagctaccacctactccccaccccctgtaccctgggagctggtctggagagagaaacacagtctggacaagagaaacgctcatcagacaccaccaataaacatcaaac

SEQ ID NO: 147642 - DNA, 842 bp, Homo sapiens
  Payload ID: 9210
  Gene Symbol: LCAT
  Gene Name: lecithin-cholesterol acyltransferase
  ENST ID: ENST00000575467
  CDS Start-End: 31-312
ctttctctggcagtaggcaccagggctggaatggggccgcccggctccccatggcagtgggtgacgctgctgctggggctgctgctccctcctgccgcccccttctggctcctcaatgtgctcttccccccgcacaccacgcccaaggctgagctcagtaaccacacacggcccgtcatcctcgctagaagccaagctggacaaaccagatgtggtgaactggatgtgctaccgcaagacagaggacttcttcaccatctggctggatctcaacatgttcctaccccttggggtagactgctggatcgataacaccagggttgtctacaaccggagctctgggctcgtgtccaacgcccctggtgtccagatccgcgtccctggctttggcaagacctactctgtggagtacctggacagcagcaagctggcagggtacctgcacacactggtgcagaacctggtcaacaatggctacgtgcgggacgagactgtgcgcgccgccccctatgactggcggctggagcccggccagcaggaggagtactaccgcaagctcgcagggctggtggaggagatgcacgctgcctatgggaagcctgtcttcctcattggccacagcctcggctgtctacacttgctctatttcctgctgcgccagccccaggcctggaaggaccgctttattgatggcttcatctctcttggggctccctggggtggctccatcaagcccatgctggtcttggcctcagagatgaggtcttgctatgttgcccaggctggtctcaaactcttcaccttaagtgatcttcctgcctcagcctcccgaagtgctggga

SEQ ID NO: 147643 - DNA, 1083 bp, Homo sapiens
  Payload ID: 9210
  Gene Symbol: LCAT
  Gene Name: lecithin-cholesterol acyltransferase
  ENST ID: ENST00000573538
  CDS Start-End: 1-417
gtccagatccgcgtccctggctttggcaagacctactctgtggagtacctggacagcagcaagctggcagggtacctgcacacactggtgcagaacctggtcaacaatggctacgtgcgggacgagactgtgcgcgccgccccctatgactggcggctggagcccggccagcaggaggagtactaccgcaagctcgcagggctggtggaggagatgcacgctgcctatgggaagcctgtcttcctcattggccacagcctcggctgtctacacttgctctatttcctgctgcgccagccccaggcctggaaggaccgctttattgatggcttcatctctcttggggctccctggggtggctccatcaagcccatgctggtcttggcctcagagacagggtctcactgcattgcctagtctggtcacggactcctggcctcaagtgatcctcctgcctcagcctcccaaagtgttgggattacaggggtgacaaccagggcatccccatcatgtccagcatcaagctgaaagaggagcagcgcataaccaccacctccccctggatgtttccctctcgcatggcgtggcctgaggaccacgtgttcatttccacacccagcttcaactacacaggccgtgacttccaacgcttctttgcagacctgcactttgaggaaggctggtacatgtggctgcagtcacgtgacctcctggcaggactcccagcacctggtgtggaagtatactgtctttacggcgtgggcctgcccacgccccgcacctacatctacgaccacggcttcccctacacggaccctgtgggtgtgctctatgaggatggtgatgacacggtggcgacccgcagcaccgagctctgtggcctgtggcagggccgccagccacagcctgtgcacctgctgcccctgcacgggatacagcatctcaacatggtcttcagcaacctgaccctggagcacatcaatgccatcctgctgggtgcctaccgccagggtccccctgcatccccgactgccagcccagagcccccgcctcctgaataaagaccttcctttgctaccgtaa

SEQ ID NO: 147644 - DNA, 1240 bp, Homo sapiens
  Payload ID: 9210
  Gene Symbol: LCAT
  Gene Name: lecithin-cholesterol acyltransferase
  ENST ID: ENST00000570980
  CDS Start-End: 476-1240
ggcccccacccaccaaggacaagatgcccagcccaggatcggtgagcaggagaggcccatccatgcccggcccctattaggcccagcccccatgcccccagacctatctgttcccaccttggactttggcaataaaggagcgccagactgggtgtttgctctgcagaggcaggggtcagcggccttggcctcagcacctcagcgccttcccttcctcagggaagcctgggctttggctactggggggacagcagggagagggggtgtaagcaggggagggtaagtgtgctttgtacctgggggttgagggtatgggaggtggggggtgggtctggtcactgcagcatctggggtgacgggggtaagggtcacggggggaatccagagtccagagtgagggctgctgctcacagtgcccggctgcctggggaatcagctagaagccaagctggacaaaccagatgtggtgaactggatgtgctaccgcaagacagaggacttcttcaccatctggctggatctcaacatgttcctaccccttggggtagactgctggatcgataacaccagggttgtctacaaccggagctctgggctcgtgtccaacgcccctggtgtccagatccgcgtccctggctttggcaagacctactctgtggagtacctggacagcagcaagctggcagggtacctgcacacactggtgcagaacctggtcaacaatggctacgtgcgggacgagactgtgcgcgccgccccctatgactggcggctggagcccggccagcaggaggagtactaccgcaagctcgcagggctggtggaggagatgcacgctgcctatgggaagcctgtcttcctcattggccacagcctcggctgtctacacttgctctatttcctgctgcgccagccccaggcctggaaggaccgctttattgatggcttcatctctcttggggctccctggggtggctccatcaagcccatgctggtcttggcctcaggtgacaaccagggcatccccatcatgtccagcatcaagctgaaagaggagcagcgcataaccaccacctccccctggatgtttccctctcgcatggcgtggcctgaggaccacgtgttcatttccacacccagcttcaactacacaggccgtgacttccaacgcttctttgcagacctgcactttgaggaaggctggtacatgtggctgcagtcacgtgacctcctggcagga

SEQ ID NO: 147645 - DNA, 560 bp, Homo sapiens
  Payload ID: 9211
  Gene Symbol: LGALS1
  Gene Name: lectin, galactoside-binding, soluble, 1
  Uniprot ID: P09382
  ENST ID: ENST00000215909
  CDS Start-End: 96-503
ttaaaagggtgggagcgtccgggggcccatctctctcgggtggagtcttctgacagctggtgcgcctgcccgggaacatcctcctggactcaatcatggcttgtggtctggtcgccagcaacctgaatctcaaacctggagagtgccttcgagtgcgaggcgaggtggctcctgacgctaagagcttcgtgctgaacctgggcaaagacagcaacaacctgtgcctgcacttcaaccctcgcttcaacgcccacggcgacgccaacaccatcgtgtgcaacagcaaggacggcggggcctgggggaccgagcagcgggaggctgtctttcccttccagcctggaagtgttgcagaggtgtgcatcaccttcgaccaggccaacctgaccgtcaagctgccagatggatacgaattcaagttccccaaccgcctcaacctggaggccatcaactacatggcagctgacggtgacttcaagatcaaatgtgtggcctttgactgaaatcagccagcccatggcccccaataaaggcagctgcctctgctccctctgaaccag

SEQ ID NO: 147646 - DNA, 331 bp, Homo sapiens
  Payload ID: 9211
  Gene Symbol: LGALS1
  Gene Name: lectin, galactoside-binding, soluble, 1
  ENST ID: ENST00000454173
  CDS Start-End: 16-132
ctcctggactcaatcatggcttgtggtctggtcgccagcaacctgaatctcaaacctggagagtgccttcgagtgcgaggcgaggtggctcctgacgctaagagtgagttcttccagcaagcttcgtgctgaacctgggcaaagacagcaacaacctgtgcctgcacttcaaccctcgcttcaacgcccacggcgacgccaacaccatcgtgtgcaacagcaaggacggcggggcctgggggaccgagcagcgggaggctgtctttcccttccagcctggaagtgttgcagaggtgtgcatcaccttcgaccaggccaacctgaccgtcaa

SEQ ID NO: 147647 - DNA, 637 bp, Homo sapiens
  Payload ID: 9211
  Gene Symbol: LGALS1
  Gene Name: lectin, galactoside-binding, soluble, 1
  ENST ID: ENST00000425542
  CDS Start-End: 47-256
ctgacagctggtgcgcctgcccgggaacatcctcctggactcaatcatggcttgtgcttccccttggcttggtcagaggatgccgggcgggaacaaccccactcccacccccagccacccccggacacttcgagcagtggaggccttgtcctctaacccggctgggccggggcttgtctgtgcagggtctggtcgccagcaacctgaatctcaaacctggagagtgccttcgagtgcgaggcgaggtggctcctgacgctaagagcttcgtgctgaacctgggcaaagacagcaacaacctgtgcctgcacttcaaccctcgcttcaacgcccacggcgacgccaacaccatcgtgtgcaacagcaaggacggcggggcctgggggaccgagcagcgggaggctgtctttcccttccagcctggaagtgttgcagaggtgtgcatcaccttcgaccaggccaacctgaccgtcaagctgccagatggatacgaattcaagttccccaaccgcctcaacctggaggccatcaactacatggcagctgacggtgacttcaagatcaaatgtgtggcctttgactgaaatcagccagcccatggcccccaataaaggcagctgcctctgctccctctgaa

SEQ ID NO: 147648 - DNA, 1667 bp, Homo sapiens
  Payload ID: 9212
  Gene Symbol: LGALS12
  Gene Name: lectin, galactoside-binding, soluble, 12
  Uniprot ID: Q96DT0
  ENST ID: ENST00000255684
  CDS Start-End: 310-1293
acaaaccctcgttggccccacaggagccagcctctggcttctctctgcaatggccatgtgctgcagacccggagtgggtagttagttggttaatgccagtcttcctcccctggacactgagttctgctgacagcccccgcccagccagagctctgctgtataccaccgggagtggggctggtgtggagcctggaggtcgcccgctgccctcctagggctgctccagacagcattaaaacgctgcaggtcgcaggtgagactaacagctgggagagctgctccaggcatttaggaccctgactggggcagatgagtcagcccagtgggggcagggctcctggaacgaggatctacagttggagttgccccactgtcatgtcacctggagaaaaactggacccaattcctgacagcttcattctgcaaccaccagtcttccacccggtggttccttatgtcacgacgatttttggaggcctgcatgcaggcaagatggtcatgctgcaaggagtggtccctctagatgcacacaggtttcaggtggacttccagtgtggctgcagcctgtgtccccggccagatatcgccttccacttcaaccctcgcttccataccaccaagccccatgtcatctgcaacaccctgcatggtggacgctggcaaagggaggcccggtggccccacctggccctgcgaagaggctccagcttcctcatcctctttctcttcgggaatgaggaagtgaaggtgagtgtgaatggacagcactttctccacttccgctaccggctcccactgtctcatgtggacacgctgggtatatttggtgacatcctggtagaggctgttggattcctgaacatcaatccatttgtggagggcagcagagagtacccagctggacatgaggtgccctgctcacatgctcttccccagggtctctcgcctgggcaggtcatcatagtacggggactggtcttgcaagagccgaagcattttactgtgagcctgagggaccaggctgcccatgctcctgtgacactcagggcctccttcgcagacagaactctggcctggatctcccgctgggggcagaagaaactgatctcagcccccttcctcttttacccccagagattctttgaggtgctgctcctgttccaggagggagggctgaagctggcgctcaatgggcaggggctgggggccaccagcatgaaccagcaggccctggagcagctgcgggagctccggatcagtggaagtgtccagctctactgtgtccactcctgaggatggttccagggaaataccgccagaaaacaagaaggtcagcccactcccagggccccactctcctcccctcattaaaccatccacctgacaccagcacatcaggcctggttcacctctggggtcacgagactgagtctacaggagctttgggcctgagggaaggcacaagagtgcaaaggttcctcgaactctgcaccttcctccaccaggagcctgggatatggctccatctgccttcagggcctggactgcactcacagaggcaagtgttgtagactaacaaagatactccaaaatacaatggcttaaagaatgtggtcatttattctttattatttatttatttgtggtcaaataaataaataaggtta

SEQ ID NO: 147649 - DNA, 1425 bp, Homo sapiens
  Payload ID: 9212
  Gene Symbol: LGALS12
  Gene Name: lectin, galactoside-binding, soluble, 12
  Uniprot ID: Q96DT0
  ENST ID: ENST00000340246
  CDS Start-End: 31-1044
tccaggcatttaggaccctgactggggcagatgagtcagcccagtgggggcagggctcctggaacgaggatctacagttggagttgccccactgtcatgtcacctggagaaaaactggacccaattcctgacagcttcattctgcaaccaccagtcttccacccggtggttccttatgtcacgacgatttttggaggcctgcatgcaggcaagatggtcatgctgcaaggagtggtccctctagatgcacacagtaggtttcaggtggacttccagtgtggctgcagcctgtgtccccggccagatatcgccttccacttcaaccctcgcttccataccaccaagccccatgtcatctgcaacaccctgcatggtggacgctggcaaagggaggcccggtggccccacctggccctgcgaagaggctccagcttcctcatcctctttctcttcgggaatgaggaagtgaaggtgagtgtgaatggacagcactttctccacttccgctaccggctcccactgtctcatgtggacacgctgggtatatttggtgacatcctggtagaggctgttggattcctgaacatcaatccatttgtggagggcagcagagagtacccagctggacatcctttcctgctgatgagccccaggctggaggtgccctgctcacatgctcttccccagggtctctcgcctgggcaggtcatcatagtacggggactggtcttgcaagagccgaagcattttactgtgagcctgagggaccaggctgcccatgctcctgtgacactcagggcctccttcgcagacagaactctggcctggatctcccgctgggggcagaagaaactgatctcagcccccttcctcttttacccccagagattctttgaggtgctgctcctgttccaggagggagggctgaagctggcgctcaatgggcaggggctgggggccaccagcatgaaccagcaggccctggagcagctgcgggagctccggatcagtggaagtgtccagctctactgtgtccactcctgaggatggttccagggaaataccgccagaaaacaagaaggtcagcccactcccagggccccactctcctcccctcattaaaccatccacctgacaccagcacatcaggcctggttcacctctggggtcacgagactgagtctacaggagctttgggcctgagggaaggcacaagagtgcaaaggttcctcgaactctgcaccttcctccaccaggagcctgggatatggctccatctgccttcagggcctggactgcactcacagaggcaagtgttgtagactaacaaagatactccaaaatacaatggcttaaagaatgtggtcatttattctttattatttatttatttgtggtcaaataaataaataaggttatttattt

SEQ ID NO: 147650 - DNA, 1618 bp, Homo sapiens
  Payload ID: 9212
  Gene Symbol: LGALS12
  Gene Name: lectin, galactoside-binding, soluble, 12
  Uniprot ID: Q96DT0
  ENST ID: ENST00000394618
  CDS Start-End: 292-1302
cacaggagccagcctctggcttctctctgcaatggccatgtgctgcagacccggagtgggtagttagttggttaatgccagtcttcctcccctggacactgagttctgctgacagcccccgcccagccagagctctgctgtataccaccgggagtggggctggtgtggagcctggaggtcgcccgctgccctcctagggctgctccagacagcattaaaacgctgcaggtcgcaggtgagactaacagctgggagagctgctccaggcatttaggaccctgactggggcagatgagtcagcccagtgggggcagggctcctggaacgaggatctacagttggagttgccccactgtcatgtcacctggagaaaaactggacccaattcctgacagcttcattctgcaaccaccagtcttccacccggtggttccttatgtcacgacgatttttggaggcctgcatgcaggcaagatggtcatgctgcaaggagtggtccctctagatgcacacaggtttcaggtggacttccagtgtggctgcagcctgtgtccccggccagatatcgccttccacttcaaccctcgcttccataccaccaagccccatgtcatctgcaacaccctgcatggtggacgctggcaaagggaggcccggtggccccacctggccctgcgaagaggctccagcttcctcatcctctttctcttcgggaatgaggaagtgaaggtgagtgtgaatggacagcactttctccacttccgctaccggctcccactgtctcatgtggacacgctgggtatatttggtgacatcctggtagaggctgttggattcctgaacatcaatccatttgtggagggcagcagagagtacccagctggacatcctttcctgctgatgagccccaggctggaggtgccctgctcacatgctcttccccagggtctctcgcctgggcaggtcatcatagtacggggactggtcttgcaagagccgaagcattttactgtgagcctgagggaccaggctgcccatgctcctgtgacactcagggcctccttcgcagacagaactctggcctggatctcccgctgggggcagaagaaactgatctcagcccccttcctcttttacccccagagattctttgaggtgctgctcctgttccaggagggagggctgaagctggcgctcaatgggcaggggctgggggccaccagcatgaaccagcaggccctggagcagctgcgggagctccggatcagtggaagtgtccagctctactgtgtccactcctgaggatggttccagggaaataccgccagaaaacaagaaggtcagcccactcccagggccccactctcctcccctcattaaaccatccacctgacaccagcacatcaggcctggttcacctctggggtcacgagactgagtctacaggagctttgggcctgagggaaggcacaagagtgcaaaggttcctcgaactctgcaccttcctccaccaggagcctgggatatggctccatctgccttcagggcctggactgcactcacagaggcaagtgttgtagactaacaaagatactccaaaatacaatggcttaaagaa

SEQ ID NO: 147651 - DNA, 1816 bp, Homo sapiens
  Payload ID: 9212
  Gene Symbol: LGALS12
  Gene Name: lectin, galactoside-binding, soluble, 12
  Uniprot ID: Q96DT0
  ENST ID: ENST00000415491
  CDS Start-End: 615-1442
cctcagcttcccagagtgctgagattacaggcatgagccacagagcccagcccaggtaacttctacatggggaaaggtgagcctgggaaggccattgttaagtgcctctccaggggtccatttcagagttagctgtcagttcctaacttgtccattcttcttgcctcccagttcctagtctccagccactcaacagtcctcagaaagccccagtaccaggcttctggggaccagggtgacatctagtggatggcaagcctccctggggtcactgcagcctgttgtgtcctaggagctggggaaaggcaactggctggtgctgaatttggcaagggagcggaatttgacttctctggtgtaatgcagctttgccgtgtgacggtccaggaaaggggattaggtggaagaaaatatttcagtgaacactgatttttacctataaggaattttctgtttggagaggaaaagttgagttttattctgctcctttcctcccactcgcctgacatagaggtccctaagccctttctccaaacctgcatggatgagtttcttttcttgttcaggtggttccttatgtcacgacgatttttggaggcctgcatgcaggcaagatggtcatgctgcaaggagtggtccctctagatgcacacaggtttcaggtggacttccagtgtggctgcagcctgtgtccccggccagatatcgccttccacttcaaccctcgcttccataccaccaagccccatgtcatctgcaacaccctgcatggtggacgctggcaaagggaggcccggtggccccacctggccctgcgaagaggctccagcttcctcatcctctttctcttcgggaatgaggaagtgaaggtgagtgtgaatggacagcactttctccacttccgctaccggctcccactgtctcatgtggacacgctgggtatatttggtgacatcctggtagaggctgttggattcctgaacatcaatccatttgtggagggcagcagagagtacccagctggacatcctttcctgctgatgagccccaggctggaggtgccctgctcacatgctcttccccagggtctctcgcctgggcaggtcatcatagtacggggactggtcttgcaagagccgaagcattttactgtgagcctgagggaccaggctgcccatgctcctgtgacactcagggcctccttcgcagacagaactctggcctggatctcccgctgggggcagaagaaactgatctcagcccccttcctcttttacccccagagattctttgaggtgctgctcctgttccaggagggagggctgaagctggcgctcaatgggcaggggctgggggccaccagcatgaaccagcaggccctggagcagctgcgggagctccggatcagtggaagtgtccagctctactgtgtccactcctgaggatggttccagggaaataccgccagaaaacaagaaggtcagcccactcccagggccccactctcctcccctcattaaaccatccacctgacaccagcacatcaggcctggttcacctctggggtcacgagactgagtctacaggagctttgggcctgagggaaggcacaagagtgcaaaggttcctcgaactctgcaccttcctccaccaggagcctgggatatggctccatctgccttcagggcctggactgcactcacagaggcaagtgttgtagactaacaaagatactccaaaatacaatggcttaaagaatgtggtcatttattctttattatttatttatttgtggtcaaataaataaataaggtta

SEQ ID NO: 147652 - DNA, 1789 bp, Homo sapiens
  Payload ID: 9212
  Gene Symbol: LGALS12
  Gene Name: lectin, galactoside-binding, soluble, 12
  Uniprot ID: Q96DT0
  ENST ID: ENST00000425950
  CDS Start-End: 615-1415
cctcagcttcccagagtgctgagattacaggcatgagccacagagcccagcccaggtaacttctacatggggaaaggtgagcctgggaaggccattgttaagtgcctctccaggggtccatttcagagttagctgtcagttcctaacttgtccattcttcttgcctcccagttcctagtctccagccactcaacagtcctcagaaagccccagtaccaggcttctggggaccagggtgacatctagtggatggcaagcctccctggggtcactgcagcctgttgtgtcctaggagctggggaaaggcaactggctggtgctgaatttggcaagggagcggaatttgacttctctggtgtaatgcagctttgccgtgtgacggtccaggaaaggggattaggtggaagaaaatatttcagtgaacactgatttttacctataaggaattttctgtttggagaggaaaagttgagttttattctgctcctttcctcccactcgcctgacatagaggtccctaagccctttctccaaacctgcatggatgagtttcttttcttgttcaggtggttccttatgtcacgacgatttttggaggcctgcatgcaggcaagatggtcatgctgcaaggagtggtccctctagatgcacacaggtttcaggtggacttccagtgtggctgcagcctgtgtccccggccagatatcgccttccacttcaaccctcgcttccataccaccaagccccatgtcatctgcaacaccctgcatggtggacgctggcaaagggaggcccggtggccccacctggccctgcgaagaggctccagcttcctcatcctctttctcttcgggaatgaggaagtgaaggtgagtgtgaatggacagcactttctccacttccgctaccggctcccactgtctcatgtggacacgctgggtatatttggtgacatcctggtagaggctgttggattcctgaacatcaatccatttgtggagggcagcagagagtacccagctggacatgaggtgccctgctcacatgctcttccccagggtctctcgcctgggcaggtcatcatagtacggggactggtcttgcaagagccgaagcattttactgtgagcctgagggaccaggctgcccatgctcctgtgacactcagggcctccttcgcagacagaactctggcctggatctcccgctgggggcagaagaaactgatctcagcccccttcctcttttacccccagagattctttgaggtgctgctcctgttccaggagggagggctgaagctggcgctcaatgggcaggggctgggggccaccagcatgaaccagcaggccctggagcagctgcgggagctccggatcagtggaagtgtccagctctactgtgtccactcctgaggatggttccagggaaataccgccagaaaacaagaaggtcagcccactcccagggccccactctcctcccctcattaaaccatccacctgacaccagcacatcaggcctggttcacctctggggtcacgagactgagtctacaggagctttgggcctgagggaaggcacaagagtgcaaaggttcctcgaactctgcaccttcctccaccaggagcctgggatatggctccatctgccttcagggcctggactgcactcacagaggcaagtgttgtagactaacaaagatactccaaaatacaatggcttaaagaatgtggtcatttattctttattatttatttatttgtggtcaaataaataaataaggtta

SEQ ID NO: 147653 - DNA, 602 bp, Homo sapiens
  Payload ID: 9213
  Gene Symbol: LGALS13
  Gene Name: lectin, galactoside-binding, soluble, 13
  Uniprot ID: Q9UHV8
  ENST ID: ENST00000221797
  CDS Start-End: 46-465
agaagactggactcaattctgaaggtcgccaagaaggagagaacaatgtcttctttacccgtgccatacaaactgcctgtgtctttgtctgttggttcctgcgtgataatcaaagggacaccaatccactcttttatcaatgacccacagctgcaggtggatttctacactgacatggatgaggattcagatattgccttccgtttccgagtgcactttggcaatcatgtggtcatgaacaggcgtgagtttgggatatggatgttggaggagacaacagactacgtgccctttgaggatggcaaacaatttgagctgtgcatctacgtacattacaatgagtatgagataaaggtcaatggcatacgcatttacggctttgtccatcgaatcccgccatcatttgtgaagatggtgcaagtgtcgagagatatctccctgacctcagtgtgtgtctgcaattgagggagatgatcacactcctcattgttgaggaatccctctttctacctgaccatgggattcccagaacctgctaacagaataatccctgctcacattttcccctacactttgtcattaaaacagcacgaaaactcaca

SEQ ID NO: 147654 - DNA, 282 bp, Homo sapiens
  Payload ID: 9213
  Gene Symbol: LGALS13
  Gene Name: lectin, galactoside-binding, soluble, 13
  ENST ID: ENST00000600141
  CDS Start-End: 33-282
caattctgaaggtcgccaagaaggagagaacaatgtcttctttacccctgcaggtggatttctacactgacatggatgaggattcagatattgccttccgtttccgagtgcactttggcaatcatgtggtcatgaacaggcgtgagtttgggatatggatgttggaggagacaacagactacgtgccctttgaggatggcaaacaatttgagctgtgcatctacgtacattacaatgagtatgagataaaggtcaatggcatacgcatttacggctttgtcc

SEQ ID NO: 147655 - DNA, 494 bp, Homo sapiens
  Payload ID: 9213
  Gene Symbol: LGALS13
  Gene Name: lectin, galactoside-binding, soluble, 13
  ENST ID: ENST00000621475
  CDS Start-End: 69-494
tgctgcaactcagagattcactcagaagactggactcaattctgaaggtcgccaagaaggagagaacaatgtcttctttacccgtgccatacaaactgcctgtgtctttgtctgttggttcctgcgtgataatcaaagggacaccaatccactcttttatcaatgacccacagctgcaggtggatttctacactgacatggatgaggattcagatattgccttccgtttccgagtgcactttggcaatcatgtggtcatgaacaggcgtgagtttgggatatggatgttggaggagacaacagactacgtgccctttgaggatggcaaacaatttgagctgtgcatctacgtacattacaatgagtatgagataaaggtcaatggcatacgcatttacggctttgtccatcgaatcccgccatcatttgtgaagatggtgcaagtgtcgagagatatctccctgacctcagtgtgtgtctgcaatgggagatga

SEQ ID NO: 147656 - DNA, 773 bp, Homo sapiens
  Payload ID: 9214
  Gene Symbol: LGALS14
  Gene Name: lectin, galactoside-binding, soluble, 14
  Uniprot ID: Q8TCE9
  ENST ID: ENST00000360675
  CDS Start-End: 267-773
acagaagactggacacaattccgaagagctgcccagaaggagagaacaatgtcatcactacccagtggcagacacctttcaccccagctacacaagagggggcagatgtgtgaggatcactgcagtccaggagttcgatgtttcagtgagctgtgattgcaccactgcatatcagcctgggtgacagagcaagaccctatctcaaaaatacagaaaaatcatcaaccacttgcagtcgtcgtagaaatcaatcattccctccagttatgtccctgacccacaggcttcatttgtgcaagtactggggctgtgctgtcagtaatgtgtgccgcttctgggaaggacgtccattgcccttgatgattgtggtaccatacacactgcctgtttccttgcctgttggttcgtgcgtgataatcacagggacaccgatcctcacttttgtcaaggacccacagctggaggtgaatttctacactgggatggatgaggactcagatattgctttccaattccgactgcactttggtcatcctgcaatcatgaacagttgtgtgtttggcatatggagatatgaggagaaatgctactatttaccctttgaagatggcaaaccatttgagctgtgcatctatgtgcgtcacaaggaatacaaggtaatggtaaatggccaacgcatttacaactttgcccatcgattcccgccagcatctgtgaagatgctgcaagtcttcagagatatctccctgaccagagtgcttatcagcgattga

SEQ ID NO: 147657 - DNA, 774 bp, Homo sapiens
  Payload ID: 9214
  Gene Symbol: LGALS14
  Gene Name: lectin, galactoside-binding, soluble, 14
  Uniprot ID: Q8TCE9
  ENST ID: ENST00000392052
  CDS Start-End: 224-643
gctgcattacagacacagacctgcaaacatctatggttgtgacagagtttctttctgacacctgagtctttctcctgctgcacggaaagcttgctgggaggggcttggaatctggcatgaagccaaagggcatctctgagttgcagcatttaaatgatcccactcagagattcacacagaagactggacacaattccgaagagctgcccagaaggagagaacaatgtcatcactacccgtaccatacacactgcctgtttccttgcctgttggttcgtgcgtgataatcacagggacaccgatcctcacttttgtcaaggacccacagctggaggtgaatttctacactgggatggatgaggactcagatattgctttccaattccgactgcactttggtcatcctgcaatcatgaacagttgtgtgtttggcatatggagatatgaggagaaatgctactatttaccctttgaagatggcaaaccatttgagctgtgcatctatgtgcgtcacaaggaatacaaggtaatggtaaatggccaacgcatttacaactttgcccatcgattcccgccagcatctgtgaagatgctgcaagtcttcagagatatctccctgaccagagtgcttatcagcgattgagggagatgatcagactcctcattgttgaggaatccctctttctacctgaccatgggattcccagagcctactaacagaataatccctcctcaccccttcccctacacttgatcattaaaacagcaccaaac

SEQ ID NO: 147658 - DNA, 469 bp, Homo sapiens
  Payload ID: 9214
  Gene Symbol: LGALS14
  Gene Name: lectin, galactoside-binding, soluble, 14
  ENST ID: ENST00000601802
  CDS Start-End: 1-370
cgaagagctgcccagaaggagagaacaatgtcatcactaccccaaggacccacagctggaggtgaatttctacactgggatggatgaggactcagatattgctttccaattccgactgcactttggtcatcctgcaatcatgaacagttgtgtgtttggcatatggagatatgaggagaaatgctactatttaccctttgaagatggcaaaccatttgagctgtgcatctatgtgcgtcacaaggaatacaaggtaatggtaaatggccaacgcatttacaactttgcccatcgattcccgccagcatctgtgaagatgctgcaagtcttcagagatatctccctgaccagagtgcttatcagcgattgagggagatgatcagactcctcattgttgaggaatccctctttctacctgaccatgggattcccagagcctactaacagaataatccctcctcaccccttc

SEQ ID NO: 147659 - DNA, 624 bp, Homo sapiens
  Payload ID: 9215
  Gene Symbol: LGALS16
  Gene Name: lectin, galactoside-binding, soluble, 16
  Uniprot ID: A8MUM7
  ENST ID: ENST00000392051
  CDS Start-End: 69-497
tgctgcaactcagagattcactcagaagactggacacaattccgaaggtcgcccagaaggagaggacaatgtcatttctaactgtgccatacaaactgcctgtgtctttgtctgttggttcctgcgtgataatcaaagggacactgatcgactcttctatcaacgaaccacagctgcaggtggatttctacactgagatgaatgaggactcagaaattgccttccatttgcgagtgcacttaggccgtcgtgtggtcatgaacagtcgtgagtttgggatatggatgttggaggagaatttacactatgtgccctttgaggatggcaaaccatttgacttgcgcatctacgtgtgtcacaatgagtatgaggtaaaggtaaatggtgaatacatttatgcctttgtccatcgaatcccgccatcatatgtgaagatgattcaagtgtggagagatgtctccctggactcagtgcttgtcaacaatggacggagatgatcacactcctcattgttgaggaaaccctctttctacctgaccatgggattcctagagcctgctaacagaataatccctcctcaaccccttcccctacacttggtcattaaaacagcaccaaaccgta

SEQ ID NO: 147660 - DNA, 654 bp, Homo sapiens
  Payload ID: 9215
  Gene Symbol: LGALS16
  Gene Name: lectin, galactoside-binding, soluble, 16
  ENST ID: ENST00000594480
  CDS Start-End: 44-226
aagactggacacaattccgaaggtcgcccagaaggagaggacaatgtcatttctaactgaagggagactgcacctgaccctgcacctctcacttattctcaataccctggcaggtgccatacaaactgcctgtgtctttgtctgttggttcctgcgtgataatcaaagggacactgatcgactcttctatcaacgaaccacagctgcaggtggatttctacactgagatgaatgaggactcagaaattgccttccatttgcgagtgcacttaggccgtcgtgtggtcatgaacagtcgtgagtttgggatatggatgttggaggagaatttacactatgtgccctttgaggatggcaaaccatttgacttgcgcatctacgtgtgtcacaatgagtatgaggtaaaggtaaatggtgaatacatttatgcctttgtccatcgaatcccgccatcatatgtgaagatgattcaagtgtggagagatgtctccctggactcagtgcttgtcaacaatggacggagatgatcacactcctcattgttgaggaaaccctctttctacctgaccatgggattcctagagcctgctaacagaataatccctcctcaaccccttcccctacacttggtcattaaaacagcaccaaaccgta

SEQ ID NO: 147661 - DNA, 591 bp, Homo sapiens
  Payload ID: 9216
  Gene Symbol: LGALS2
  Gene Name: lectin, galactoside-binding, soluble, 2
  Uniprot ID: P05162
  ENST ID: ENST00000215886
  CDS Start-End: 176-574
tgctgggtactgggagatgcaggcggggagacacaaggtagaaggggcaaagtcctcacctaggaccttgagggagttaatgtgtaatattctaggatataagcttgaccacgagttgagaccctgagcacaggcctccaggagccgctgggagctgccgccaggagctgtcaccatgacgggggaacttgaggttaagaacatggacatgaagccggggtcaaccctgaagatcacaggcagcatcgccgatggcactgatggctttgtaattaatctgggccaggggacagacaagctgaacctgcatttcaaccctcgcttcagcgaatccaccattgtctgcaactcattggacggcagcaactgggggcaagaacaacgggaagatcacctgtgcttcagcccagggtcagaggtcaagttcacagtgacctttgagagtgacaaattcaaggtgaagctgccagatgggcacgagctgacttttcccaacaggctgggtcacagccacctgagctacctgagcgtaaggggcgggttcaacatgtcctctttcaagttaaaagaataaaagacttccagccgaga

SEQ ID NO: 147662 - DNA, 406 bp, Homo sapiens
  Payload ID: 9216
  Gene Symbol: LGALS2
  Gene Name: lectin, galactoside-binding, soluble, 2
  ENST ID: ENST00000416480
  CDS Start-End: 318-406
actttctagttgcgtgagtcctgggatccctaattccccacctgaaaaatggggtgagaacagaggttcccttgagaatgtactatgagcttataacgatgagggctgaagaaagtggtttgcaaagtgcagaatgcccttcagaaggtagccattgttaagaggacaaggttacagatgcaaggaagctgggctaagtgagggaggctgggagagctgtcaagcggctgcattgcggatataagcttgaccacgagttgagaccctgagcacaggcctccaggagccgctgggagctgccgccaggagctgtcaccatgacgggggaacttgaggttaagaacatggacatgaagccggggtcaaccctgaagatcacaggcagcatcgccgatggcactgatgg

SEQ ID NO: 147663 - DNA, 1146 bp, Homo sapiens
  Payload ID: 9217
  Gene Symbol: LGALS3
  Gene Name: lectin, galactoside-binding, soluble, 3
  Uniprot ID: P17931
  ENST ID: ENST00000254301
  CDS Start-End: 262-1014
aggtcgcgcccctcagtgcccgcgctctccccgtcgggagcttcctggtcgcccctgcggcggcggctcggggtgtctggccggcgcggggctcgcccagcctggtccggggagaggactggctgggcaggggcgccgccccgcctcgggagaggcgggccgggcggggctgggagtatttgaggctcggagccaccgccccgccggcgcccgcagcacctcctcgccagcagccgtccggagccagccaacgagcggaaaatggcagacaatttttcgctccatgatgcgttatctgggtctggaaacccaaaccctcaaggatggcctggcgcatgggggaaccagcctgctggggcagggggctacccaggggcttcctatcctggggcctaccccgggcaggcacccccaggggcttatcctggacaggcacctccaggcgcctaccctggagcacctggagcttatcccggagcacctgcacctggagtctacccagggccacccagcggccctggggcctacccatcttctggacagccaagtgccaccggagcctaccctgccactggcccctatggcgcccctgctgggccactgattgtgccttataacctgcctttgcctgggggagtggtgcctcgcatgctgataacaattctgggcacggtgaagcccaatgcaaacagaattgctttagatttccaaagagggaatgatgttgccttccactttaacccacgcttcaatgagaacaacaggagagtcattgtttgcaatacaaagctggataataactggggaagggaagaaagacagtcggttttcccatttgaaagtgggaaaccattcaaaatacaagtactggttgaacctgaccacttcaaggttgcagtgaatgatgctcacttgttgcagtacaatcatcgggttaaaaaactcaatgaaatcagcaaactgggaatttctggtgacatagacctcaccagtgcttcatataccatgatataatctgaaaggggcagattaaaaaaaaaaaaagaatctaaaccttacatgtgtaaaggtttcatgttcactgtgagtgaaaatttttacattcatcaatatccctcttgtaagtcatctacttaataaatatta

SEQ ID NO: 147664 - DNA, 916 bp, Homo sapiens
  Payload ID: 9217
  Gene Symbol: LGALS3
  Gene Name: lectin, galactoside-binding, soluble, 3
  ENST ID: ENST00000554715
  CDS Start-End: 46-747
cacctcctcgccagcagccgtccggagccagccaacgagcggaaaatggcagacaatttttcgctccatgatgcgttatctgggtctggaaacccaaaccctcaaggatggcctggcgcatgggggaaccagcctgctggggcagggggctacccaggggcttcctatcctggggcctaccccgggcaggcacccccaggggcttatcctggacaggcacctccaggcgcctaccctggagcacctggagcttatcccggagcacctgcacctggagtctacccagggccacccagcggccctggggcctacccatcttctggacagccaagtgccaccggagcctaccctgccactggcccctatggcgcccctgctgggccactgattgtgccttataacctgcctttgcctgggggagtggtgcctcgcatgctgataacaattctgggcacggtgaagcccaatgcaaacagaattgctttagatttccaaagagggaatgatgttgccttccactttaacccacgcttcaatgagaacaacaggagagtcattgtttgcaatacaaagctggataataactggggaagggaagaaagacagtcggttttcccatttgaaagtgggaaaccattcaaaagtctcgctctgtcgccaggctggagtacagtggcacgatcttggctcactacaacctccgcctcctgggttcaagcgatgctcctgcctcagcctcccaagtagctgggattataggcgtgcgctaccatgcccagctaacttttgtattttctgtagagacggggtttcaccatgttggccaggatggtcttgatctcttgacctcgtgatccgcccacctcagcttcccaaagtgctgggaggattacaggcatgagccaccatgcctggc

SEQ ID NO: 147665 - DNA, 319 bp, Homo sapiens
  Payload ID: 9217
  Gene Symbol: LGALS3
  Gene Name: lectin, galactoside-binding, soluble, 3
  ENST ID: ENST00000553493
  CDS Start-End: 54-319
aaaccaaatactcagctgcgttaggaattccttctgattcttgctgcaggaaaatggcagacaatttttcgctccatgatgcgttatctgggtctggaaacccaaaccctcaaggatggcctggcgcatgggggaaccagcctgctggggcagggggctacccaggggcttcctatcctggggcctaccccgggcaggcacccccaggggcttatcctggacaggcacctccaggcgcctaccctggagcacctggagcttatcccggagcacctgcacctggagtctacccagggccacccagcggccctggggccta

SEQ ID NO: 147666 - DNA, 2405 bp, Homo sapiens
  Payload ID: 9218
  Gene Symbol: LGALS3BP
  Gene Name: lectin, galactoside-binding, soluble, 3 binding protein
  Uniprot ID: Q08380
  ENST ID: ENST00000262776
  CDS Start-End: 310-2067
gactcccaccttgggcctctgccagcctggcactgatagccacaggcagagctgagacaaaagagaggggccctggggagtatcagcagcagccaatcccggaagacatctatgtcaggtggtttctggaaatcgaaagtagactcttttctgaagcatttcctgggatcagcctgaccacgctccatactgggagaggcttctgggtcaaaggaccagtctgcagagggatcctgtggctggaagcgaggaggctccacacggccgttgcagctaccgcagccaggatctgggcatccaggcacggccatgacccctccgaggctcttctgggtgtggctgctggttgcaggaacccaaggcgtgaacgatggtgacatgcggctggccgatgggggcgccaccaaccagggccgcgtggagatcttctacagaggccagtggggcactgtgtgtgacaacctgtgggacctgactgatgccagcgtcgtctgccgggccctgggcttcgagaacgccacccaggctctgggcagagctgccttcgggcaaggatcaggccccatcatgctggatgaggtccagtgcacgggaaccgaggcctcactggccgactgcaagtccctgggctggctgaagagcaactgcaggcacgagagagacgctggtgtggtctgcaccaatgaaaccaggagcacccacaccctggacctctccagggagctctcggaggcccttggccagatctttgacagccagcggggctgcgacctgtccatcagcgtgaatgtgcagggcgaggacgccctgggcttctgtggccacacggtcatcctgactgccaacctggaggcccaggccctgtggaaggagccgggcagcaatgtcaccatgagtgtggatgctgagtgtgtgcccatggtcagggaccttctcaggtacttctactcccgaaggattgacatcaccctgtcgtcagtcaagtgcttccacaagctggcctctgcctatggggccaggcagctgcagggctactgcgcaagcctctttgccatcctcctcccccaggacccctcgttccagatgcccctggacctgtatgcctatgcagtggccacaggggacgccctgctggagaagctctgcctacagttcctggcctggaacttcgaggccttgacgcaggccgaggcctggcccagtgtccccacagacctgctccaactgctgctgcccaggagcgacctggcggtgcccagcgagctggccctactgaaggccgtggacacctggagctggggggagcgtgcctcccatgaggaggtggagggcttggtggagaagatccgcttccccatgatgctccctgaggagctctttgagctgcagttcaacctgtccctgtactggagccacgaggccctgttccagaagaagactctgcaggccctggaattccacactgtgcccttccagttgctggcccggtacaaaggcctgaacctcaccgaggatacctacaagccccggatttacacctcgcccacctggagtgcctttgtgacagacagttcctggagtgcacggaagtcacaactggtctatcagtccagacgggggcctttggtcaaatattcttctgattacttccaagccccctctgactacagatactacccctaccagtccttccagactccacaacaccccagcttcctcttccaggacaagagggtgtcctggtccctggtctacctccccaccatccagagctgctggaactacggcttctcctgctcctcggacgagctccctgtcctgggcctcaccaagtctggcggctcagatcgcaccattgcctacgaaaacaaagccctgatgctctgcgaagggctcttcgtggcagacgtcaccgatttcgagggctggaaggctgcgattcccagtgccctggacaccaacagctcgaagagcacctcctccttcccctgcccggcagggcacttcaacggcttccgcacggtcatccgccccttctacctgaccaactcctcaggtgtggactagacggcgtggcccaagggtggtgagaaccggagaaccccaggacgccctcactgcaggctcccctcctcggcttccttcctctctgcaatgaccttcaacaaccggccaccagatgtcgccctactcacctgagcgctcagcttcaagaaattactggaaggcttccactagggtccaccaggagttctcccaccacctcaccagtttccaggtggtaagcaccaggacgccctcgaggttgctctgggatccccccacagcccctggtcagtctgcccttgtcactggtctgaggtcattaaaattacattgaggttcctacatttgtttgtacagaa

SEQ ID NO: 147667 - DNA, 1961 bp, Homo sapiens
  Payload ID: 9218
  Gene Symbol: LGALS3BP
  Gene Name: lectin, galactoside-binding, soluble, 3 binding protein
  ENST ID: ENST00000591778
  CDS Start-End: 119-736
gggagaggcttctgggtcaaaggaccagtctgcagagggatcctgtggctggaagcgaggaggctccacacggccgttgcagctaccgcagccaggatctgggcatccaggcacggccatgacccctccgaggctcttctgggtgtggctgctggttgcaggaacccaaggcgtgaacgatggtgacatgcggctggccgatgggggcgccaccaaccagggccgcgtggagatcttctacagaggccagtggggcactgtgtgtgacaacctgtgggacctgactgatgccagcgtcgtctgccgggccctgggcttcgagaacgccacccaggctctgggcagagctgccttcgggcaaggatcaggccccatcatgctggatgaggtccagtgcacgggaaccgaggcctcactggccgactgcaagtccctgggctggctgaagagcaactgcaggcacgagagagacgctggtgtggtctgcaccaatggtacttctactcccgaaggattgacatcaccctgtcgtcagtcaagtgcttccacaagctggcctctgcctatggggccaggcagctgcagggctactgcgcaagcctctttgccatcctcctcccccaggacccctcgttccagatgcccctggacctgtatgcctatgcagtggccacaggggacgccctgctggagaagctctgcctacagttcctggcctggaacttcgaggccttgacgcaggccgaggcctggcccagtgtccccacagacctgctccaactgctgctgcccaggagcgacctggcggtgcccagcgagctggccctactgaaggccgtggacacctggagctggggggagcgtgcctcccatgaggaggtggagggcttggtggagaagatccgcttccccatgatgctccctgaggagctctttgagctgcagttcaacctgtccctgtactggagccacgaggccctgttccagaagaagactctgcaggccctggaattccacactgtgcccttccagttgctggcccggtacaaaggcctgaacctcaccgaggatacctacaagccccggatttacacctcgcccacctggagtgcctttgtgacagacagttcctggagtgcacggaagtcacaactggtctatcagtccagacgggggcctttggtcaaatattcttctgattacttccaagccccctctgactacagatactacccctaccagtccttccagactccacaacaccccagcttcctcttccaggacaagagggtgtcctggtccctggtctacctccccaccatccagagctgctggaactacggcttctcctgctcctcggacgagctccctgtcctgggcctcaccaagtctggcggctcagatcgcaccattgcctacgaaaacaaagccctgatgctctgcgaagggctcttcgtggcagacgtcaccgatttcgagggctggaaggctgcgattcccagtgccctggacaccaacagctcgaagagcacctcctccttcccctgcccggcagggcacttcaacggcttccgcacggtcatccgccccttctacctgaccaactcctcaggtgtggactagacggcgtggcccaagggtggtgagaaccggagaaccccaggacgccctcactgcaggctcccctcctcggcttccttcctctctgcaatgaccttcaacaaccggccaccagatgtcgccctactcacctgagcgctcagcttcaagaaattactggaaggcttccactagggtccaccaggagttctcccaccacctcaccagtttccaggtggtaagcaccaggacgccctcgaggttgctctgggatccccccacagcccctggtcagtctgcccttgtcactggtctgaggtcattaaaattacattgaggttcctacatttgtttgtacagaa

SEQ ID NO: 147668 - DNA, 540 bp, Homo sapiens
  Payload ID: 9218
  Gene Symbol: LGALS3BP
  Gene Name: lectin, galactoside-binding, soluble, 3 binding protein
  ENST ID: ENST00000589906
  CDS Start-End: 109-540
tctgggtcaaaggaccagtctgcagagggatcctgtggctggaagcgaggaggctccacacggccgttgcagctaccgcagccaggatctgggcatccaggcacggccatgacccctccgaggctcttctgggtgtggctgctggttgcaggaacccaaggatcaggccccatcatgctggatgaggtccagtgcacgggaaccgaggcctcactggccgactgcaagtccctgggctggctgaagagcaactgcaggcacgagagagacgctggtgtggtctgcaccaatgaaaccaggagcacccacaccctggacctctccagggagctctcggaggcccttggccagatctttgacagccagcggggctgcgacctgtccatcagcgtgaatgtgcagggcgaggacgccctgggcttctgtggccacacggtcatcctgactgccaacctggaggcccaggccctgtggaaggagccgggcagcaatgtcaccatgagtgtggatgctgagtgtgtgcccatggtcagggacctt

SEQ ID NO: 147669 - DNA, 936 bp, Homo sapiens
  Payload ID: 9218
  Gene Symbol: LGALS3BP
  Gene Name: lectin, galactoside-binding, soluble, 3 binding protein
  ENST ID: ENST00000585407
  CDS Start-End: 136-768
tgaccacgctccatactgggagaggcttctgggtcaaaggaccagtctgcagagggatcctgtggctggaagcgaggaggctccacacggccgttgcagctaccgcagccaggatctgggcatccaggcacggccatgacccctccgaggctcttctgggtgtggctgctggttgcaggaacccaaggcgtgaacgatggtgacatgcggctggccgatgggggcgccaccaaccagggccgcgtggagatcttctacagaggccagtggggcactgtgtgtgacaacctgtgggacctgactgatgccagcgtcgtctgccgggccctgggcttcgagaacgccacccaggctctgggcagagctgccttcgggcaaggatcaggccccatcatgctggatgaggtccagtgcacgggaaccgaggcctcactggccgactgcaagtccctgggctggctgaagagcaactgcaggcacgagagagacgctggtgtggtctgcaccaatgaaaccaggagcacccacaccctggacctctccagggagctctcggaggcccttggccagatctttgacagccagcggggctgcgacctgtccatcagcgtgaatgtgcagggcgaggacgccctgggcttctgtggccacacggtcatcctgactgccaacctggaggcccaggccctgtggaaggagccgggcagcaatgtcaccatgagtgtggatgctgagtgtgtgcccatggtcagggaccttctcaggtgagccgtctcgtcctcaggctctggggccgccaggggctttgtcctcctcccctcttcaaaagcacagccccccacacacacacctgcacatactcatgcatgcacatgtacacacgcagtcacacatgcactcacgcagttgcacacacacgcatgctcactcccacac

SEQ ID NO: 147670 - DNA, 1736 bp, Homo sapiens
  Payload ID: 9218
  Gene Symbol: LGALS3BP
  Gene Name: lectin, galactoside-binding, soluble, 3 binding protein
  ENST ID: ENST00000586720
  CDS Start-End: 109-165
tctgggtcaaaggaccagtctgcagagggatcctgtggctggaagcgaggaggctccacacggccgttgcagctaccgcagccaggatctgggcatccaggcacggccatgacccctccgaggctcttctgggtgtggctgctggttgcaggaacccaagcgtgaatgtgcagggcgaggacgccctgggcttctgtggccacacggtcatcctgactgccaacctggaggcccaggccctgtggaaggagccgggcagcaatgtcaccatgagtgtggatgctgagtgtgtgcccatggtcagggaccttctcaggtacttctactcccgaaggattgacatcaccctgtcgtcagtcaagtgcttccacaagctggcctctgcctatggggccaggcagctgcagggctactgcgcaagcctctttgccatcctcctcccccaggacccctcgttccagatgcccctggacctgtatgcctatgcagtggccacaggggacgccctgctggagaagctctgcctacagttcctggcctggaacttcgaggccttgacgcaggccgaggcctggcccagtgtccccacagacctgctccaactgctgctgcccaggagcgacctggcggtgcccagcgagctggccctactgaaggccgtggacacctggagctggggggagcgtgcctcccatgaggaggtggagggcttggtggagaagatccgcttccccatgatgctccctgaggagctctttgagctgcagttcaacctgtccctgtactggagccacgaggccctgttccagaagaagactctgcaggccctggaattccacactgtgcccttccagttgctggcccggtacaaaggcctgaacctcaccgaggatacctacaagccccggatttacacctcgcccacctggagtgcctttgtgacagacagttcctggagtgcacggaagtcacaactggtctatcagtccagacgggggcctttggtcaaatattcttctgattacttccaagccccctctgactacagatactacccctaccagtccttccagactccacaacaccccagcttcctcttccaggacaagagggtgtcctggtccctggtctacctccccaccatccagagctgctggaactacggcttctcctgctcctcggacgagctccctgtcctgggcctcaccaagtctggcggctcagatcgcaccattgcctacgaaaacaaagccctgatgctctgcgaagggctcttcgtggcagacgtcaccgatttcgagggctggaaggctgcgattcccagtgccctggacaccaacagctcgaagagcacctcctccttcccctgcccggcagggcacttcaacggcttccgcacggtcatccgccccttctacctgaccaactcctcaggtgtggactagacggcgtggcccaagggtggtgagaaccggagaaccccaggacgccctcactgcaggctcccctcctcggcttccttcctctctgcaatgaccttcaacaaccggccaccagatgtcgccctactcacctgagcgctcagcttcaagaaattactggaaggcttccactagggtccaccaggagttctcccaccacctcaccagtttccaggtggtaagcaccaggacgccctcgaggttgctctgggatccccccacagcccctggtcagtctgcccttgtcactggtct

SEQ ID NO: 147671 - DNA, 668 bp, Homo sapiens
  Payload ID: 9218
  Gene Symbol: LGALS3BP
  Gene Name: lectin, galactoside-binding, soluble, 3 binding protein
  ENST ID: ENST00000588899
  CDS Start-End: 92-280
gtctgcagagggatcctgtggctggaagcgaggaggctccacacggccgttgcagctaccgcagccaggatctgggcatccaggcacggccatgacccctccgaggctcttctgggtgtggctgctggttgcaggaacccaaggtgagctgagcccctgggaaataccaaaagcagaagtgtggaaggctggtgcaccctggggctgctcagagcttcaaggagatattctgcctggggcccggggcccagcggttagccagatcttctctcctgcttgaagcaccaggcgtgaacgatggtgacatgcggctggccgatgggggcgccaccaaccagggccgcgtggagatcttctacagaggccagtggggcactgtgtgtgacaacctgtgggacctgactgatgccagcgtcgtctgccgggccctgggcttcgagaacgccacccaggctctgggcagagctgccttcgggcaaggatcaggccccatcatgctggatgaggtccagtgcacgggaaccgaggcctcactggccgactgcaagtccctgggctggctgaagagcaactgcaggcacgagagagacgctggtgtggtctgcaccaatggtgagcgggggcgcacctccctgcggaggccccagtgtgccctggggtcccgtggc

SEQ ID NO: 147672 - DNA, 768 bp, Homo sapiens
  Payload ID: 9218
  Gene Symbol: LGALS3BP
  Gene Name: lectin, galactoside-binding, soluble, 3 binding protein
  ENST ID: ENST00000587310
  CDS Start-End: 112-237
gcttctgggtcaaaggaccagtctgcagagggatcctgtggctggaagcgaggaggctccacacggccgttgcagctaccgcagccaggatctgggcatccaggcacggccatgacccctccgaggctcttctgggtgtggctgctggttgcaggaacccaagcaccaggtatccccagtgatgatgacttggaggttcccgggggctcacctgggttcaggcgtgaacgatggtgacatgcggctggccgatgggggcgccaccaaccagggccgcgtggagatcttctacagaggccagtggggcactgtgtgtgacaacctgtgggacctgactgatgccagcgtcgtctgccgggccctgggcttcgagaacgccacccaggctctgggcagagctgccttcgggcaaggatcaggccccatcatgctggatgaggtccagtgcacgggaaccgaggcctcactggccgactgcaagtccctgggctggctgaagagcaactgcaggcacgagagagacgctggtgtggtctgcaccaatgaaaccaggagcacccacaccctggacctctccagggagctctcggaggcccttggccagatctttgacagccagcggggctgcgacctgtccatcagcgtgaatgtgcagggcgaggacgccctgggcttctgtggccacacggtcatcctgactgccaacctggaggcccaggccctgtggaaggagccgggcagcaatgtcaccatgagtgtggatgctga

SEQ ID NO: 147673 - DNA, 2091 bp, Homo sapiens
  Payload ID: 9218
  Gene Symbol: LGALS3BP
  Gene Name: lectin, galactoside-binding, soluble, 3 binding protein
  ENST ID: ENST00000587251
  CDS Start-End: 124-465
atactgggagaggcttctgggtcaaaggaccagtctgcagagggatcctgtggctggaagcgaggaggctccacacggccgttgcagctaccgcagccaggatctgggcatccaggcacggccatgacccctccgaggctcttctgggtgtggctgctggttgcaggaacccaaggcgtgaacgatggtgacatgcggctggccgatgggggcgccaccaaccagggccgcgtggagatcttctacagaggccagtggggcactgtgtgtgacaacctgtgggacctgactgatgccagcgtcgtctgccgggccctgggcttcgagaacgccacccaggctctgggcagagctgccttcgggcaaggtagggcctgctgcctcactggccgactgcaagtccctgggctggctgaagagcaactgcaggcacgagagagacgctggtgtggtctgcaccaatgaaaccaggagcacccacaccctggacctctccagggagctctcggaggcccttggccagatctttgacagccagcggggctgcgacctgtccatcagcgtgaatgtgcagggcgaggacgccctgggcttctgtggccacacggtcatcctgactgccaacctggaggcccaggccctgtggaaggagccgggcagcaatgtcaccatgagtgtggatgctgagtgtgtgcccatggtcagggaccttctcaggtacttctactcccgaaggattgacatcaccctgtcgtcagtcaagtgcttccacaagctggcctctgcctatggggccaggcagctgcagggctactgcgcaagcctctttgccatcctcctcccccaggacccctcgttccagatgcccctggacctgtatgcctatgcagtggccacaggggacgccctgctggagaagctctgcctacagttcctggcctggaacttcgaggccttgacgcaggccgaggcctggcccagtgtccccacagacctgctccaactgctgctgcccaggagcgacctggcggtgcccagcgagctggccctactgaaggccgtggacacctggagctggggggagcgtgcctcccatgaggaggtggagggcttggtggagaagatccgcttccccatgatgctccctgaggagctctttgagctgcagttcaacctgtccctgtactggagccacgaggccctgttccagaagaagactctgcaggccctggaattccacactgtgcccttccagttgctggcccggtacaaaggcctgaacctcaccgaggatacctacaagccccggatttacacctcgcccacctggagtgcctttgtgacagacagttcctggagtgcacggaagtcacaactggtctatcagtccagacgggggcctttggtcaaatattcttctgattacttccaagccccctctgactacagatactacccctaccagtccttccagactccacaacaccccagcttcctcttccaggacaagagggtgtcctggtccctggtctacctccccaccatccagagctgctggaactacggcttctcctgctcctcggacgagctccctgtcctgggcctcaccaagtctggcggctcagatcgcaccattgcctacgaaaacaaagccctgatgctctgcgaagggctcttcgtggcagacgtcaccgatttcgagggctggaaggctgcgattcccagtgccctggacaccaacagctcgaagagcacctcctccttcccctgcccggcagggcacttcaacggcttccgcacggtcatccgccccttctacctgaccaactcctcaggtgtggactagacggcgtggcccaagggtggtgagaaccggagaaccccaggacgccctcactgcaggctcccctcctcggcttccttcctctctgcaatgaccttcaacaaccggccaccagatgtcgccctactcacctgagcgctcagcttcaagaaattactggaaggcttccactagggtccaccaggagttctcccaccacctcaccagtttccaggtggtaagcaccaggacgccctcgaggttgctct

SEQ ID NO: 147674 - DNA, 818 bp, Homo sapiens
  Payload ID: 9218
  Gene Symbol: LGALS3BP
  Gene Name: lectin, galactoside-binding, soluble, 3 binding protein
  ENST ID: ENST00000589527
  CDS Start-End: 42-818
gcctgccacacagcccaggatctgggcatccaggcacggccatgacccctccgaggctcttctgggtgtggctgctggttgcaggaacccaaggcgtgaacgatggtgacatgcggctggccgatgggggcgccaccaaccagggccgcgtggagatcttctacagaggccagtggggcactgtgtgtgacaacctgtgggacctgactgatgccagcgtcgtctgccgggccctgggcttcgagaacgccacccaggctctgggcagagctgccttcgggcaaggatcaggccccatcatgctggatgaggtccagtgcacgggaaccgaggcctcactggccgactgcaagtccctgggctggctgaagagcaactgcaggcacgagagagacgctggtgtggtctgcaccaatgaaaccaggagcacccacaccctggacctctccagggagctctcggaggcccttggccagatctttgacagccagcggggctgcgacctgtccatcagcgtgaatgtgcagggcgaggacgccctgggcttctgtggccacacggtcatcctgactgccaacctggaggcccaggccctgtggaaggagccgggcagcaatgtcaccatgagtgtggatgctgagtgtgtgcccatggtcagggaccttctcaggtacttctactcccgaaggattgacatcaccctgtcgtcagtcaagtgcttccacaagctggcctctgcctatggggccaggcagctgcagggctactgcgcaagcctctttgccatcctcctcccccaggacccctcgttccagatg

SEQ ID NO: 147675 - DNA, 581 bp, Homo sapiens
  Payload ID: 9218
  Gene Symbol: LGALS3BP
  Gene Name: lectin, galactoside-binding, soluble, 3 binding protein
  ENST ID: ENST00000588205
  CDS Start-End: 26-214
aggatctgggcatccaggcacggccatgacccctccgaggctcttctgggtgtggctgctggttgcaggaacccaaggtgagctgagcccctgggaaataccaaaagcagaagtgtggaaggctggtgcaccctggggctgctcagagcttcaaggagatattctgcctggggcccggggcccagcggttagccagatcttctctcctgcttgaagcaccaggcgtgaacgatggtgacatgcggctggccgatgggggcgccaccaaccagggccgcgtggagatcttctacagaggccagtggggcactgtgtgtgacaacctgtgggacctgactgatgccagcgtcgtctgccgggccctgggcttcgagaacgccacccaggctctgggcagagctgccttcgggcaaggatcaggccccatcatgctggatgaggtccagtgcacgggaaccgaggcctcactggccgactgcaagtccctgggctggctgaagagcaactgcaggcacgagagagacgctggtgtggtctgcaccaatgaaaccaggagcacccacaccctggacctctccagg

SEQ ID NO: 147676 - DNA, 1905 bp, Homo sapiens
  Payload ID: 9218
  Gene Symbol: LGALS3BP
  Gene Name: lectin, galactoside-binding, soluble, 3 binding protein
  ENST ID: ENST00000587311
  CDS Start-End: 124-270
atactgggagaggcttctgggtcaaaggaccagtctgcagagggatcctgtggctggaagcgaggaggctccacacggccgttgcagctaccgcagccaggatctgggcatccaggcacggccatgacccctccgaggctcttctgggtgtggctgctggttgcaggaacccaaggcgtgaacgatggtgacatgcggctggccgatgggggcgccaccaaccagggccgcgtggagatcttctacagaggcccttggccagatctttgacagccagcggggctgcgacctgtccatcagcgtgaatgtgcagggcgaggacgccctgggcttctgtggccacacggtcatcctgactgccaacctggaggcccaggccctgtggaaggagccgggcagcaatgtcaccatgagtgtggatgctgagtgtgtgcccatggtcagggaccttctcaggtacttctactcccgaaggattgacatcaccctgtcgtcagtcaagtgcttccacaagctggcctctgcctatggggccaggcagctgcagggctactgcgcaagcctctttgccatcctcctcccccaggacccctcgttccagatgcccctggacctgtatgcctatgcagtggccacaggggacgccctgctggagaagctctgcctacagttcctggcctggaacttcgaggccttgacgcaggccgaggcctggcccagtgtccccacagacctgctccaactgctgctgcccaggagcgacctggcggtgcccagcgagctggccctactgaaggccgtggacacctggagctggggggagcgtgcctcccatgaggaggtggagggcttggtggagaagatccgcttccccatgatgctccctgaggagctctttgagctgcagttcaacctgtccctgtactggagccacgaggccctgttccagaagaagactctgcaggccctggaattccacactgtgcccttccagttgctggcccggtacaaaggcctgaacctcaccgaggatacctacaagccccggatttacacctcgcccacctggagtgcctttgtgacagacagttcctggagtgcacggaagtcacaactggtctatcagtccagacgggggcctttggtcaaatattcttctgattacttccaagccccctctgactacagatactacccctaccagtccttccagactccacaacaccccagcttcctcttccaggacaagagggtgtcctggtccctggtctacctccccaccatccagagctgctggaactacggcttctcctgctcctcggacgagctccctgtcctgggcctcaccaagtctggcggctcagatcgcaccattgcctacgaaaacaaagccctgatgctctgcgaagggctcttcgtggcagacgtcaccgatttcgagggctggaaggctgcgattcccagtgccctggacaccaacagctcgaagagcacctcctccttcccctgcccggcagggcacttcaacggcttccgcacggtcatccgccccttctacctgaccaactcctcaggtgtggactagacggcgtggcccaagggtggtgagaaccggagaaccccaggacgccctcactgcaggctcccctcctcggcttccttcctctctgcaatgaccttcaacaaccggccaccagatgtcgccctactcacctgagcgctcagcttcaagaaattactggaaggcttccactagggtccaccaggagttctcccaccacctcaccagtttccaggtggtaagcaccaggacgccctcgaggttgctctgggatccccccacagcccctggtcagtctgcccttgtcactggtctgaggtcattaaaattacattgaggttcct

SEQ ID NO: 147677 - DNA, 618 bp, Homo sapiens
  Payload ID: 9218
  Gene Symbol: LGALS3BP
  Gene Name: lectin, galactoside-binding, soluble, 3 binding protein
  ENST ID: ENST00000588990
  CDS Start-End: 128-253
ctccatactgggagaggcttctgggtcaaaggaccagtctgcagagggatcctgtggctggaagcgaggaggctccacacggccgttgcagctaccgcagccaggatctgggcatccaggcacggccatgacccctccgaggctcttctgggtgtggctgctggttgcaggaacccaagcaccaggtatccccagtgatgatgacttggaggttcccgggggctcacctgggttcaggcgtgaacgatggtgacatgcggctggccgatgggggcgccaccaaccagggccgcgtggagatcttctacagaggccagtggggcactgtgtgtgacaacctgtgggacctgactgatgccagcgtcgtctgccgggccctgggcttcgagaacgccacccaggctctgggcagagctgccttcgggcaaggatcaggccccatcatgctggatgaggtccagtgcacgggaaccgaggcctcactggccgactgcaagtccctgggctggctgaagagcaactgcaggcacgagagagacgctggtgtggtctgcaccaatggtgagcgggggcgcacctccctgcggaggccccagtgtgccctggggtcccgtggcc

SEQ ID NO: 147678 - DNA, 1132 bp, Homo sapiens
  Payload ID: 9218
  Gene Symbol: LGALS3BP
  Gene Name: lectin, galactoside-binding, soluble, 3 binding protein
  ENST ID: ENST00000588198
  CDS Start-End: 148-543
ctgggatcagcctgaccacgctccatactgggagaggcttctgggtcaaaggaccagtctgcagagggatcctgtggctggaagcgaggaggctccacacggccgttgcagctaccgcagccaggatctgggcatccaggcacggccatgacccctccgaggctcttctgggtgtggctgctggttgcaggaacccaaggcgtgaacgatggtgacatgcggctggccgatgggggcgccaccaaccagggccgcgtggagatcttctacagaggccagtggggcactgtgtgtgacaacctgtgggacctgactgatgccagcgtcgtctgccgggccctgggcttcgagaacgccacccaggctctgggcagagctgccttcgggcaaggatcaggccccatcatgctggatgaggtccagtgcacgggaaccgaggcctcactggccgactgcaagtccctgggctggctgaagagcaactgcaggcacgagagagacgctggtgtggtctgcaccaatggagccttccagagtgaatgaggcagccacaaatccctcactttcagatgaagacactgaccccagagagtggcagtgccccggctcctaacgcagcccacttccctcccgccccttcttagaaaccaggagcacccacaccctggacctctccagggagctctcggaggcccttggccagatctttgacagccagcggggctgcgacctgtccatcagcgtgaatgtgcagggcgaggacgccctgggcttctgtggccacacggtcatcctgactgccaacctggaggcccaggccctgtggaaggagccgggcagcaatgtcaccatgagtgtggatgctgagtgtgtgcccatggtcagggaccttctcaggtacttctactcccgaaggattgacatcaccctgtcgtcagtcaagtgcttccacaagctggcctctgcctatggggccaggcagctgcagggctactgcgcaagcctctttgccatcctcctcccccaggacccctcgttccagatgcccctggacctgtatgcctatgcagtggccacaggggacgccctgctggagaagctctgcctacagttcctggcctggaacttcgag

SEQ ID NO: 147679 - DNA, 379 bp, Homo sapiens
  Payload ID: 9218
  Gene Symbol: LGALS3BP
  Gene Name: lectin, galactoside-binding, soluble, 3 binding protein
  ENST ID: ENST00000591274
  CDS Start-End: 114-379
gttgcagctaccgcagccagggggtgcccccagcccacgcttcatctagccaagtgttacacatccttccaggaccacactgcagaccaggatctgggcatccaggcacggccatgacccctccgaggctcttctgggtgtggctgctggttgcaggaacccaaggcgtgaacgatggtgacatgcggctggccgatgggggcgccaccaaccagggccgcgtggagatcttctacagaggccagtggggcactgtgtgtgacaacctgtgggacctgactgatgccagcgtcgtctgccgggccctgggcttcgagaacgccacccaggctctgggcagagctgccttcgggcaaggatcaggccccatcatgctgga

SEQ ID NO: 147680 - DNA, 893 bp, Homo sapiens
  Payload ID: 9218
  Gene Symbol: LGALS3BP
  Gene Name: lectin, galactoside-binding, soluble, 3 binding protein
  ENST ID: ENST00000589775
  CDS Start-End: 265-893
atactgggagaggcttctgggtcaaaggaccagtctgcagagggatcctgtggctggaagcgaggaggctccacacggccgttgcagctaccgcagccagtagagacagggtttcgccatcttggccaggctggtctcaaactcctgacctctggtgatccacccgcctcggcctcccaaagtgtagggattacaggtgtgagccaccgcgcccggccagggcacccctctctctacacaggatctgggcatccaggcacggccatgacccctccgaggctcttctgggtgtggctgctggttgcaggaacccaaggcgtgaacgatggtgacatgcggctggccgatgggggcgccaccaaccagggccgcgtggagatcttctacagaggccagtggggcactgtgtgtgacaacctgtgggacctgactgatgccagcgtcgtctgccgggccctgggcttcgagaacgccacccaggctctgggcagagctgccttcgggcaaggatcaggccccatcatgctggatgaggtccagtgcacgggaaccgaggcctcactggccgactgcaagtccctgggctggctgaagagcaactgcaggcacgagagagacgctggtgtggtctgcaccaatgaaaccaggagcacccacaccctggacctctccagggagctctcggaggcccttggccagatctttgacagccagcggggctgcgacctgtccatcagcgtgaatgtgcagggcgaggacgccctgggcttctgtggccacacggtcatcctgactgccaacctggaggcccaggccctgtggaaggagccgggcagcaatgtcaccatgagtgtggatgctgagtgtgtgcccatggtcagggaccttctcag

SEQ ID NO: 147681 - DNA, 1535 bp, Homo sapiens
  Payload ID: 9219
  Gene Symbol: LGALS4
  Gene Name: lectin, galactoside-binding, soluble, 4
  Uniprot ID: P56470
  ENST ID: ENST00000307751
  CDS Start-End: 479-1450
acgcaatcaacgtaggtcccttcacagttgctgggagaggcaggaatttgcagttcctccgcgttctcctcctccgctgcccacctgtcctgggtcattcctgcagcctgccctgccctgcctggtctcaccctccctctgccaacagaagtctgggcagggttttatgggctctgataaggccctggcagggccgaagttcatgagcacttcctctttgcaggagggcgtaggggaggggacccaggtgatttgggtcctggctggtcaccagggaagctggcaagggaagggagactagggtgcgctctaggagaagccgacagcctgagagtcccagaagaggagccctgtggaccctcccctgccagccactcccttaccctgggtataagagccaccaccgcctgccatccgccaccatctcccactcctgcagctcttctcacaggaccagccactagcgcagcctcgagcgatggcctatgtccccgcaccgggctaccagcccacctacaacccgacgctgccttactaccagcccatcccgggcgggctcaacgtgggaatgtctgtttacatccaaggagtggccagcgagcacatgaagcggttcttcgtgaactttgtggttgggcaggatccgggctcagacgtcgccttccacttcaatccgcggtttgacggctgggacaaggtggtcttcaacacgttgcagggcgggaagtggggcagcgaggagaggaagaggagcatgcccttcaaaaagggtgccgcctttgagctggtcttcatagtcctggctgagcactacaaggtggtggtaaatggaaatcccttctatgagtacgggcaccggcttcccctacagatggtcacccacctgcaagtggatggggatctgcaacttcaatcaatcaacttcatcggaggccagcccctccggccccagggacccccgatgatgccaccttaccctggtcccggacattgccatcaacagctgaacagcctgcccaccatggaaggacccccaaccttcaacccgcctgtgccatatttcgggaggctgcaaggagggctcacagctcgaagaaccatcatcatcaagggctatgtgcctcccacaggcaagagctttgctatcaacttcaaggtgggctcctcaggggacatagctctgcacattaatccccgcatgggcaacggtaccgtggtccggaacagccttctgaatggctcgtggggatccgaggagaagaagatcacccacaacccatttggtcccggacagttctttgatctgtccattcgctgtggcttggatcgcttcaaggtttacgccaatggccagcacctctttgactttgcccatcgcctctcggccttccagagggtggacacattggaaatccagggtgatgtcaccttgtcctatgtccagatctaatctattcctggggccataactcatgggaaaacagaattatcccctaggactcctttctaagcccctaataaaatgtctgagggtg

SEQ ID NO: 147682 - DNA, 661 bp, Homo sapiens
  Payload ID: 9219
  Gene Symbol: LGALS4
  Gene Name: lectin, galactoside-binding, soluble, 4
  ENST ID: ENST00000600070
  CDS Start-End: 1-656
tgcccttcaaaaagggtgccgcctttgagctggtcttcatagtcctggctgagcactacaaggtggtggtaaatggaaatcccttctatgagtacgggcaccggcttcccctacagatggtcacccacctgcaagtggatggggatctgcaacttcaatcaatcaacttcatcggaggccagcccctccggccccagggacccccgatgatgccaccttaccctaccatggaaggacccccaaccttcaacccgcctgtgccatatttcgggaggctgcaaggagggctcacagctcgaagaaccatcatcatcaagggctatgtgcctcccacaggcaagagctttgctatcaacttcaaggtgggctcctcaggggacatagctctgcacattaatccccgcatgggcaacggtaccgtggtccggaacagccttctgaatggctcgtggggatccgaggagaagaagatcacccacaacccatttggtcccggacagttctttgatctgtccattcgctgtggcttggatcgcttcaaggtttacgccaatggccagcacctctttgactttgcccatcgcctctcggccttccagagggtggacacattggaaatccagggtgatgtcaccttgtcctatgtccagatctaatctat

SEQ ID NO: 147683 - DNA, 691 bp, Homo sapiens
  Payload ID: 9219
  Gene Symbol: LGALS4
  Gene Name: lectin, galactoside-binding, soluble, 4
  ENST ID: ENST00000595291
  CDS Start-End: 1-117
aacttcaatcaatcaacttcatcggaggccagcccctccggccccagaggggttgcagcccaaggtgtactaacccagcacctagagaaacgccggagtctaatgggtgtgtcatagatatctgtcgactcttggagaataatatcgcttcttcctcacttcacagaccatggaaggacccccaaccttcaacccgcctgtgccatatttcgggaggctgcaaggagggctcacagctcgaagaaccatcatcatcaagggctatgtgcctcccacaggcaagagctttgctatcaacttcaaggtgggctcctcaggggacatagctctgcacattaatccccgcatgggcaacggtaccgtggtccggaacagccttctgaatggctcgtggggatccgaggagaagaagatcacccacaacccatttggtcccggacagttctttgatctgtccattcgctgtggcttggatcgcttcaaggtttacgccaatggccagcacctctttgactttgcccatcgcctctcggccttccagagggtggacacattggaaatccagggtgatgtcaccttgtcctatgtccagatctaatctattcctggggccataactcatgggaaaacagaattatcccctaggactcctttctaagcccctaataaaatgtctgagggtgtctcatga

SEQ ID NO: 147684 - DNA, 566 bp, Homo sapiens
  Payload ID: 9219
  Gene Symbol: LGALS4
  Gene Name: lectin, galactoside-binding, soluble, 4
  ENST ID: ENST00000594209
  CDS Start-End: 472-566
accatctcccactcctgcagctcttctcacaggaccagccactagcgcagcctcgagcgatggcctatgtccccgcaccgggctaccagcccacctacaacccggtgagatgccagctcaggccccactccgcccgcagctccgtccataagccctcacaccaattttccccactctgatcctggggggccccatctgactctgtggtctgatttacccaaagctgaccccgaccctcgatttactcctaccctgacctcaggctgtctgtgtccacgtctaactgttggccctcgtcatcttcaacctggtcctcccccatggtttcctctctcctgcttaagggactggggggcttttctgggaggggtaaaggctgcaacaggcagatggcttgtgagtcccctcaccaggcctcttctccagacgctgccttactaccagcccatcccgggcgggctcaacgtgggaatgtctgtttacatccaaggagtggccagcgagcacatgaagcggttcttcgtgaactttgtggttgggcaggatccgggctcagacgtcgcctt

SEQ ID NO: 147685 - DNA, 566 bp, Homo sapiens; identical to SEQ ID NO: 147684
  Payload ID: 9219
  Gene Symbol: LGALS4
  Gene Name: Lectin, galactoside-binding, soluble, 4
  ENST ID: ENST00000634874
  CDS Start-End: 472-566

SEQ ID NO: 147686 - DNA, 691 bp, Homo sapiens; identical to SEQ ID NO: 147683
  Payload ID: 9219
  Gene Symbol: LGALS4
  Gene Name: Lectin, galactoside-binding, soluble, 4
  ENST ID: ENST00000634958
  CDS Start-End: 1-117

SEQ ID NO: 147687 - DNA, 661 bp, Homo sapiens; identical to SEQ ID NO: 147682
  Payload ID: 9219
  Gene Symbol: LGALS4
  Gene Name: Lectin, galactoside-binding, soluble, 4
  ENST ID: ENST00000635267
  CDS Start-End: 1-656

SEQ ID NO: 147688 - DNA, 1535 bp, Homo sapiens; identical to SEQ ID NO: 147681
  Payload ID: 9219
  Gene Symbol: LGALS4
  Gene Name: Lectin, galactoside-binding, soluble, 4
  ENST ID: ENST00000634573
  CDS Start-End: 479-1450

SEQ ID NO: 147689 - DNA, 466 bp, Homo sapiens
  Payload ID: 9220
  Gene Symbol: LGALS7
  Gene Name: lectin, galactoside-binding, soluble, 7
  Uniprot ID: P47929
  ENST ID: ENST00000378626
  CDS Start-End: 1-411
atgtccaacgtcccccacaagtcctcactgcccgagggcatccgccctggcacggtgctgagaattcgcggcttggttcctcccaatgccagcaggttccatgtaaacctgctgtgcggggaggagcagggctccgatgccgcgctgcatttcaacccccggctggacacgtcggaggtggtcttcaacagcaaggagcaaggctcctggggccgcgaggagcgcgggccgggcgttcctttccagcgcgggcagcccttcgaggtgctcatcatcgcgtcagacgacggcttcaaggccgtggttggggacgcccagtaccaccacttccgccaccgcctgccgctggcgcgcgtgcgcctggtggaggtgggcggggacgtgcagctggactccgtgaggatcttctgagcagaagcccaggcgggcccggggccttggctggcaaataaagcgttagcccgca

SEQ ID NO: 147690 - DNA, 565 bp, Homo sapiens
  Payload ID: 9220
  Gene Symbol: LGALS7
  Gene Name: lectin, galactoside-binding, soluble, 7
  ENST ID: ENST00000599035
  CDS Start-End: 460-565
ctctttcaaaggagcaagtgggcagtgagtgtgccacggactggcctgggctgtggcctccgggtaacccccatcccgactgtcccctctacctctttgtggcttcctctggggccctctttgaggatctttctgtttgtctttgttgctctccccatctgtttccctgtctgtttctggtctctttcctgcctctccgccaccctttcctcttccactgatttctgccagtctcagccctggtcggctcctctgaggggtgacccaccttctgcctccctccttcggtctcaccggctcacagtggcccctgcaccccactcttgcagaacgtcccccacaagtcctcactgcccgagggcatccgccctggcacggtgctgagaattcgcggcttggttcctcccaatgccagcaggttccatgtaaacctgctgtgcggggaggagcagggctccgatgccgcgctgcatttcaacccccggctggacacgtcggaggtggtcttcaacagcaaggagcaaggctcctggggccgcgaggagcgcgggccgggcgttccttt

SEQ ID NO: 147691 - DNA, 483 bp, Homo sapiens
  Payload ID: 9220
  Gene Symbol: LGALS7
  Gene Name: Lectin, galactoside-binding, soluble, 7
  ENST ID: ENST00000634448
  CDS Start-End: 17-427
caacccggtcccagccatgtccaacgtcccccacaagtcctcgctgcccgagggcatccgccctggcacggtgctgagaattcgcggcttggttcctcccaatgccagcaggttccatgtaaacctgctgtgcggggaggagcagggctccgatgccgccctgcatttcaacccccggctggacacgtcggaggtggtcttcaacagcaaggagcaaggctcctggggccgcgaggagcgcgggccgggcgttcctttccagcgcgggcagcccttcgaggtgctcatcatcgcgtcagacgacggcttcaaggccgtggttggggacgcccagtaccaccacttccgccaccgcctgccgctggcgcgcgtgcgcctggtggaggtgggcggggacgtgcagctggactccgtgaggatcttctgagcagaagcccaggcgggcccggggccttggctggcaaataaagcgttagcccgcag

SEQ ID NO: 147692 - DNA, 483 bp, Homo sapiens
  Payload ID: 9221
  Gene Symbol: LGALS7B
  Gene Name: lectin, galactoside-binding, soluble, 7B
  Uniprot ID: P47929
  ENST ID: ENST00000314980
  CDS Start-End: 17-427
caacccggtcccagccatgtccaacgtcccccacaagtcctcactgcccgagggcatccgccctggcacggtgctgagaattcgcggcttggttcctcccaatgccagcaggttccatgtaaacctgctgtgcggggaggagcagggctccgatgccgccctgcatttcaacccccggctggacacgtcggaggtggtcttcaacagcaaggagcaaggctcctggggccgcgaggagcgcgggccgggcgttcctttccagcgcgggcagcccttcgaggtgctcatcatcgcgtcagacgacggcttcaaggccgtggttggggacgcccagtaccaccacttccgccaccgcctgccgctggcgcgcgtgcgcctggtggaggtgggcggggacgtgcagctggactccgtgaggatcttctgagcagaagcccaggcgggcccggggccttggctggcaaataaagcgttagcccgcag

SEQ ID NO: 147693 - DNA, 565 bp, Homo sapiens
  Payload ID: 9221
  Gene Symbol: LGALS7B
  Gene Name: Lectin, galactoside-binding, soluble, 7B
  ENST ID: ENST00000634993
  CDS Start-End: 460-565
ctctttcaaaggagcaagtgggcagtgagtgtgccacggactggcctgggctgtggcctccgggtaacccccatcccgactgtcccctctacctctttgtggcttcctctggggccctctttgaggatctttctgtttgtctttgttgctctccccatctgtttccctgtctgtttctggtctctttcctgcctctccgccaccctttcctcttccactgatttctgccagtctcagccctggtcggctcctctgaggggtgacccaccttctgcctccctcctttggtctcaccggctcacagtggcccctgcaccccactcttgcagaacgtcccccacaagtcctcgctgcccgagggcatccgccctggcacggtgctgagaattcgcggcttggttcctcccaatgccagcaggttccatgtaaacctgctgtgcggggaggagcagggctccgatgccgccctgcatttcaacccccggctggacacgtcggaggtggtcttcaacagcaaggagcaaggctcctggggccgcgaggagcgcgggccgggcgttccttt

SEQ ID NO: 147694 - DNA, 466 bp, Homo sapiens
  Payload ID: 9221
  Gene Symbol: LGALS7B
  Gene Name: Lectin, galactoside-binding, soluble, 7B
  ENST ID: ENST00000634800
  CDS Start-End: 1-411
atgtccaacgtcccccacaagtcctcgctgcccgagggcatccgccctggcacggtgctgagaattcgcggcttggttcctcccaatgccagcaggttccatgtaaacctgctgtgcggggaggagcagggctccgatgccgccctgcatttcaacccccggctggacacgtcggaggtggtcttcaacagcaaggagcaaggctcctggggccgcgaggagcgcgggccgggcgttcctttccagcgcgggcagcccttcgaggtgctcatcatcgcgtcagacgacggcttcaaggccgtggttggggacgcccagtaccaccacttccgccaccgcctgccgctggcgcgcgtgcgcctggtggaggtgggcggggacgtgcagctggactccgtgaggatcttctgagcagaagcccaggcgggcccggggccttggctggcaaataaagcgttagcccgca

SEQ ID NO: 147695 - DNA, 819 bp, Homo sapiens
  Payload ID: 9222
  Gene Symbol: LGALS8
  Gene Name: lectin, galactoside-binding, soluble, 8
  ENST ID: ENST00000238181
  CDS Start-End: 293-819
acacagaaggcggggcgcggggagggtggggagaccacagcagtgaggcgcgcgagccgggaagtgaacgaggactgactcctgtcgcttcccgtagccgcccacggacgccagagccgggaaccctgacggcacttagctgctgacaaacaacctgctccgtggagcgcctgaaacaccagtctttggggccagtgcctcagtttcaatccaggtaacctttaaatgaaacttgcctaaaatcttaggtcatacacagaagagactccaatcgacaagaagctggaaaagaatgatgttgtccttaaacaacctacagaatatcatctataacccggtaatcccgtttgttggcaccattcctgatcagctggatcctggaactttgattgtgatacgtgggcatgttcctagtgacgcagacagattccaggtggatctgcagaatggcagcagcatgaaacctcgagccgatgtggcctttcatttcaatcctcgtttcaaaagggccggctgcattgtttgcaatactttgataaatgaaaaatggggacgggaagagatcacctatgacacgcctttcaaaagagaaaagtcttttgagatcgtgattatggtgctgaaggacaaattccaggttccaaagtctggcacgccccagcttaggctgccattcgctgcaaggttgaacacccccatgggccctggacgaactgtcgtcgttaaaggagaagtgaatgcaaatgccaaaagctttaatgttgacctactagcaggaaaatcaaaggatattgctctacacttgaacccacgcctgaa

SEQ ID NO: 147696 - DNA, 1402 bp, Homo sapiens
  Payload ID: 9222
  Gene Symbol: LGALS8
  Gene Name: lectin, galactoside-binding, soluble, 8
  Uniprot ID: O00214
  ENST ID: ENST00000352231
  CDS Start-End: 201-1280
gatcctgtagaacttcggagattggggaagataatcggaagaggtagaagacaccgtccatgacacttcctggggaagcagatgtatgtataaggatggccagtgcctcagtttcaatccaggtaacctttaaatgaaacttgcctaaaatcttaggtcatacacagaagagactccaatcgacaagaagctggaaaagaatgatgttgtccttaaacaacctacagaatatcatctataacccggtaatcccgtttgttggcaccattcctgatcagctggatcctggaactttgattgtgatacgtgggcatgttcctagtgacgcagacagattccaggtggatctgcagaatggcagcagcatgaaacctcgagccgatgtggcctttcatttcaatcctcgtttcaaaagggccggctgcattgtttgcaatactttgataaatgaaaaatggggacgggaagagatcacctatgacacgcctttcaaaagagaaaagtcttttgagatcgtgattatggtgctgaaggacaaattccaggtggctgtaaatggaaaacatactctgctctatggccacaggatcggcccagagaaaatagacactctgggcatttatggcaaagtgaatattcactcaattggttttagcttcagctcggacttacaaagtacccaagcatctagtctggaactgacagagataagtagagaaaatgttccaaagtctggcacgccccagcttcctagtaatagaggaggagacatttctaaaatcgcacccagaactgtctacaccaagagcaaagattcgactgtcaatcacactttgacttgcaccaaaataccacctatgaactatgtgtcaaagaggctgccattcgctgcaaggttgaacacccccatgggccctggacgaactgtcgtcgttaaaggagaagtgaatgcaaatgccaaaagctttaatgttgacctactagcaggaaaatcaaaggatattgctctacacttgaacccacgcctgaatattaaagcatttgtaagaaattcttttcttcaggagtcctggggagaagaagagagaaatattacctctttcccatttagtcctgggatgtactttgagatgataatttattgtgatgttagagaattcaaggttgcagtaaatggcgtacacagcctggagtacaaacacagatttaaagagctcagcagtattgacacgctggaaattaatggagacatccacttactggaagtaaggagctggtagcctacctacacagctgctacaaaaaccaaaatacagaatggcttctgtgatactggccttgctgaaacgcatctcactgtcattctattgtttatattgttaaaatgagcttgtgcaccatt

SEQ ID NO: 147697 - DNA, 2437 bp, Homo sapiens
  Payload ID: 9222
  Gene Symbol: LGALS8
  Gene Name: lectin, galactoside-binding, soluble, 8
  Uniprot ID: O00214
  ENST ID: ENST00000341872
  CDS Start-End: 382-1335
tggacttggatccgaggcagacgaggaagctgagaaaaccctggcgttgaccccgtggacctgggcgccccgggaaggccagcgcttggtccaggcaggcggggcctgtgcggtgaccaccctggtcctgaaaagtcccagccccgagcgccctccctcctagacctggaggcctggaacagccagccgcccacggacgccagagccgggaaccctgacggcacttagctgctgacaaacaacctgctccgtggagcgcctgaaacaccagtctttggggccagtgcctcagtttcaatccaggtaacctttaaatgaaacttgcctaaaatcttaggtcatacacagaagagactccaatcgacaagaagctggaaaagaatgatgttgtccttaaacaacctacagaatatcatctataacccggtaatcccgtttgttggcaccattcctgatcagctggatcctggaactttgattgtgatacgtgggcatgttcctagtgacgcagacagattccaggtggatctgcagaatggcagcagcatgaaacctcgagccgatgtggcctttcatttcaatcctcgtttcaaaagggccggctgcattgtttgcaatactttgataaatgaaaaatggggacgggaagagatcacctatgacacgcctttcaaaagagaaaagtcttttgagatcgtgattatggtgctgaaggacaaattccaggtggctgtaaatggaaaacatactctgctctatggccacaggatcggcccagagaaaatagacactctgggcatttatggcaaagtgaatattcactcaattggttttagcttcagctcggacttacaaagtacccaagcatctagtctggaactgacagagataagtagagaaaatgttccaaagtctggcacgccccagcttaggctgccattcgctgcaaggttgaacacccccatgggccctggacgaactgtcgtcgttaaaggagaagtgaatgcaaatgccaaaagctttaatgttgacctactagcaggaaaatcaaaggatattgctctacacttgaacccacgcctgaatattaaagcatttgtaagaaattcttttcttcaggagtcctggggagaagaagagagaaatattacctctttcccatttagtcctgggatgtactttgagatgataatttattgtgatgttagagaattcaaggttgcagtaaatggcgtacacagcctggagtacaaacacagatttaaagagctcagcagtattgacacgctggaaattaatggagacatccacttactggaagtaaggagctggtagcctacctacacagctgctacaaaaaccaaaatacagaatggcttctgtgatactggccttgctgaaacgcatctcactgtcattctattgtttatattgttaaaatgagcttgtgcaccattaggtcctgctgggtgttctcagtccttgccatgaagtatggtggtgtctagcactgaatggggaaactgggggcagcaacacttatagccagttaaagccactctgccctctctcctactttggctgactcttcaagaatgccattcaacaagtatttatggagtacctactataatacagtagctaacatgtattgagcacagattttttttggtaaaactgtgaagagctaggatatatacttggtgaaacaaaccagtatgttccctgttctcttgagcttcgactcttctgtgcgctactgctgcgcactgctttttctacaggcattacatcaactcctaaggggtcctctgggattagttatgcagatattaaatcacccgaagacactaacttacagaagacacaactccttccccagtgatcactgtcataaccagtgctctaccgtatcccatcactgaggactgatgttgactgacatcattttctttatcgtaataaacatgtggctctattagctgcaagctttaccaagtaattggcatgacatctgagcacagaaattaaggcaaaaaaccaaagcaaaacaaatacatggtgctgaaattaacttgatgccaagcccaaggcagctgatttctgtgtatttgaacttagggcaaatcagagtctacacagacgcctacagaaagtttcaggaagaggcaagatgcattcaatttgaaagatatttatgggcaacaaagtaaggtcaggattagacttcaggcattcataaggcaggcactatcagaaagtgtacgccaactaagggacccacaaagcaggcagaggtaatgcagaaatctgttttgttcccatgaaatcaccaatcaaggcctccgttcttctaaagattagtccatcatcattagcaactgagatcaaagcactcttccactttacgtgattaaaatcaaacctgtatcagcaa

SEQ ID NO: 147698 - DNA, 4369 bp, Homo sapiens
  Payload ID: 9222
  Gene Symbol: LGALS8
  Gene Name: lectin, galactoside-binding, soluble, 8
  Uniprot ID: O00214
  ENST ID: ENST00000366584
  CDS Start-End: 567-1520
tagacctggaggcctggaacagccaggtggacgtcggcccacctttcttttctttccttcccattttcctaccacctcccaccccactccgccttccgggcaaaggcagccagatccacccaggacacattctttgtccttatccctctgtgctcgtcccacagcaagccagtcgcggtccaaggctccagaggctgtgcaggaggccgagctgggtggcgatcagcggcgggtccctgtccaaaacccagcagagccgccagggacgccccagacacagaaggcggggcgcggggagggtggggagaccacagcagtgaggcgcgcgagccgggaagtgaacgaggactgactcctgtcgcttcccgtagccgcccacggacgccagagccgggaaccctgacggcacttagctgctgacaaacaacctgctccgtggagcgcctgaaacaccagtctttggggccagtgcctcagtttcaatccaggtaacctttaaatgaaacttgcctaaaatcttaggtcatacacagaagagactccaatcgacaagaagctggaaaagaatgatgttgtccttaaacaacctacagaatatcatctataacccggtaatcccgtttgttggcaccattcctgatcagctggatcctggaactttgattgtgatacgtgggcatgttcctagtgacgcagacagattccaggtggatctgcagaatggcagcagcatgaaacctcgagccgatgtggcctttcatttcaatcctcgtttcaaaagggccggctgcattgtttgcaatactttgataaatgaaaaatggggacgggaagagatcacctatgacacgcctttcaaaagagaaaagtcttttgagatcgtgattatggtgctgaaggacaaattccaggtggctgtaaatggaaaacatactctgctctatggccacaggatcggcccagagaaaatagacactctgggcatttatggcaaagtgaatattcactcaattggttttagcttcagctcggacttacaaagtacccaagcatctagtctggaactgacagagataagtagagaaaatgttccaaagtctggcacgccccagcttaggctgccattcgctgcaaggttgaacacccccatgggccctggacgaactgtcgtcgttaaaggagaagtgaatgcaaatgccaaaagctttaatgttgacctactagcaggaaaatcaaaggatattgctctacacttgaacccacgcctgaatattaaagcatttgtaagaaattcttttcttcaggagtcctggggagaagaagagagaaatattacctctttcccatttagtcctgggatgtactttgagatgataatttattgtgatgttagagaattcaaggttgcagtaaatggcgtacacagcctggagtacaaacacagatttaaagagctcagcagtattgacacgctggaaattaatggagacatccacttactggaagtaaggagctggtagcctacctacacagctgctacaaaaaccaaaatacagaatggcttctgtgatactggccttgctgaaacgcatctcactgtcattctattgtttatattgttaaaatgagcttgtgcaccattaggtcctgctgggtgttctcagtccttgccatgaagtatggtggtgtctagcactgaatggggaaactgggggcagcaacacttatagccagttaaagccactctgccctctctcctactttggctgactcttcaagaatgccattcaacaagtatttatggagtacctactataatacagtagctaacatgtattgagcacagattttttttggtaaaactgtgaagagctaggatatatacttggtgaaacaaaccagtatgttccctgttctcttgagcttcgactcttctgtgcgctactgctgcgcactgctttttctacaggcattacatcaactcctaaggggtcctctgggattagttatgcagatattaaatcacccgaagacactaacttacagaagacacaactccttccccagtgatcactgtcataaccagtgctctaccgtatcccatcactgaggactgatgttgactgacatcattttctttatcgtaataaacatgtggctctattagctgcaagctttaccaagtaattggcatgacatctgagcacagaaattaaggcaaaaaaccaaagcaaaacaaatacatggtgctgaaattaacttgatgccaagcccaaggcagctgatttctgtgtatttgaacttagggcaaatcagagtctacacagacgcctacagaaagtttcaggaagaggcaagatgcattcaatttgaaagatatttatgggcaacaaagtaaggtcaggattagacttcaggcattcataaggcaggcactatcagaaagtgtacgccaactaagggacccacaaagcaggcagaggtaatgcagaaatctgttttgttcccatgaaatcaccaatcaaggcctccgttcttctaaagattagtccatcatcattagcaactgagatcaaagcactcttccactttacgtgattaaaatcaaacctgtatcagcaagttaaatggttccatttctgtgatttttctattatttgaggggagttggcagaagttccatgtatatgggatctttacaggtcagatcttgttacaggaaatttcaaaggtttgggagtggggagggaaaaaagctcagtcagtgaggatcattttatcacattagactggggcagaactctgccaggatttaggaatattttcagaacagattttagatattatttctatccatatattgaaaagaataccattgtcaatcttatttttttaaaagtactcagtgtagaaatcgctagcccttaattcttttccagcttttcatattaatgtatgcagagtctcaccaagctcaaagacactggttgggggtggagggtgccacagggaaagctgtagaaggcaagaagactcgagaatcccccagagttatttttctccataaagaccatcagagtgcttaactgagctgttggagactgtgaggcatttaggaaaaaaatagcccactcacatcattccttgtaagtcttaagttcattttcattttacgtggaggaaaaaaatttaaaaagctattagtatttattaatgaattttactgagacatttcttagaaatatgcacttctatactagcaagctctgtctctaaaatgcaagttggccttttgcttgccacatttctgcattaaacttctatattagcttcaaaggcttttaaactcaatgcgaacattctacgggatgttcttagatgcctttaaaaagggggcagatctaattttatttgaaccctcactttccaacttcaccatgacccagtactagagattagggcacttcaaagcattgaaaaaaatctactgatacttactttcttagacaagtagttcttagttaaccaccaatggaactgggttcattctgaatcctggaggagcttcctcgtgccacccagtgtttctgggccctctgtgtgagcagccaggtgtgagctgttttagaagcagcgtgttgccttcatctctcccgtttcccaaaagaacaaaggataaaggtgacagtcacactcctgggttaaaaaaagcattccagaaccacttctctttatgggcacaacaaagaaacgaaggctgaagttcgcctacccaaaatgaaaagtaggctttacagtcaaaagtacttctgttgattgctaaataacttcattttcttgaaatagagcaactttgagtgaaatctgcaacatggataccatgtatgtaagatactgctgtacagaagagttaaggcttacagtgcaaatgaggcgtcagctttgggtgctaaaattaacaagtctaatattattaccatcaatcaggaagagaataataaatgtttaaacaaacacagcagtctgtataaaaataccgtgtatcatttactctttctgcagctctatacgataggcaggagaggcttatgtggcagcacaagccaggtggggattttgtaaagaagtgataaaacatttgtaagtaatccaagtaggtgtattaaggcaccaaaagtaacatggcacccaacacccaaaaataaaaatatgaaatatgagtgtgaactctgagtagagtatgaaacaccacagaaagtcttagaaatagctctggagtggctctcccaggacagtttccagttgctgaatagtcttttggcactgatgttctacttcttcacattcatctaaaaaaaaaaaaaaaaaa

SEQ ID NO: 147699 - DNA, 1035 bp, Homo sapiens
  Payload ID: 9222
  Gene Symbol: LGALS8
  Gene Name: lectin, galactoside-binding, soluble, 8
  ENST ID: ENST00000406509
  CDS Start-End: 411-1035
ctgtagaacttcggagattggggaagataatcggaagaggtagaagacaccgtccatgacacttcctggggaagcagatgtatgtataaggatccgcccacggacgccagagccgggaaccctgacggcacttagctgctgacaaacaacctgctccgtggagcgcctgaaacaccagtctttggatggagtctcgttctgttgcccaggctggagtgcagtggcacaatctcggctcacttcaacctccgtctcccaggttcaagcaattctcctgtctcagcctcctgagtagctgggactacagggccagtgcctcagtttcaatccaggtaacctttaaatgaaacttgcctaaaatcttaggtcatacacagaagagactccaatcgacaagaagctggaaaagaatgatgttgtccttaaacaacctacagaatatcatctataacccggtaatcccgtttgttggcaccattcctgatcagctggatcctggaactttgattgtgatacgtgggcatgttcctagtgacgcagacagattccaggtggatctgcagaatggcagcagcatgaaacctcgagccgatgtggcctttcatttcaatcctcgtttcaaaagggccggctgcattgtttgcaatactttgataaatgaaaaatggggacgggaagagatcacctatgacacgcctttcaaaagagaaaagtcttttgagatcgtgattatggtgctgaaggacaaattccaggtggctgtaaatggaaaacatactctgctctatggccacaggatcggcccagagaaaatagacactctgggcatttatggcaaagtgaatattcactcaattggttttagcttcagctcggacttacaaagtacccaagcatctagtctggaactgacagagataagtagagaaaatgttccaaagtctggcacgccccagcttcctagtaatagaggaggagacatttctaaaatcgcacccagaactgtctacaccaagagcaaagattcgactgtca

SEQ ID NO: 147700 - DNA, 569 bp, Homo sapiens
  Payload ID: 9222
  Gene Symbol: LGALS8
  Gene Name: lectin, galactoside-binding, soluble, 8
  ENST ID: ENST00000430527
  CDS Start-End: 206-569
gacatgatcctgtagaacttcggagattggggaagataatcggaagaggtagaagacaccgtccatgacacttcctggggaagcagatgtatgtataaggatggccagtgcctcagtttcaatccaggtaacctttaaatgaaacttgcctaaaatcttaggtcatacacagaagagactccaatcgacaagaagctggaaaagaatgatgttgtccttaaacaacctacagaatatcatctataacccggtaatcccgtttgttggcaccattcctgatcagctggatcctggaactttgattgtgatacgtgggcatgttcctagtgacgcagacagattccaggtggatctgcagaatggcagcagcatgaaacctcgagccgatgtggcctttcatttcaatcctcgtttcaaaagggccggctgcattgtttgcaatactttgataaatgaaaaatggggacgggaagagatcacctatgacacgcctttcaaaagagaaaagtcttttgagatcgtgattatggtgctgaaggacaaattccaggacttacaaagtacccaag

SEQ ID NO: 147701 - DNA, 846 bp, Homo sapiens
  Payload ID: 9222
  Gene Symbol: LGALS8
  Gene Name: lectin, galactoside-binding, soluble, 8
  ENST ID: ENST00000454943
  CDS Start-End: 344-846
atagttctagaagcttgtttctcccacctgaaaagactggatttgggacatgatcctgtagaacttcggagattggggaagataatcggaagaggtagaagacaccgtccatgacacttcctggggaagcagatgtatgtataaggatccgcccacggacgccagagccgggaaccctgacggcacttagctgctgacaaacaacctgctccgtggagcgcctgaaacaccagtctttggggccagtgcctcagtttcaatccaggtaacctttaaatgaaacttgcctaaaatcttaggtcatacacagaagagactccaatcgacaagaagctggaaaagaatgatgttgtccttaaacaacctacagaatatcatctataacccggtaatcccgtttgttggcaccattcctgatcagctggatcctggaactttgattgtgatacgtgggcatgttcctagtgacgcagacagattccaggtggatctgcagaatggcagcagcatgaaacctcgagccgatgtggcctttcatttcaatcctcgtttcaaaagggccggctgcattgtttgcaatactttgataaatgaaaaatggggacgggaagagatcacctatgacacgcctttcaaaagagaaaagtcttttgagatcgtgattatggtgctgaaggacaaattccaggtggctgtaaatggaaaacatactctgctctatggccacaggatcggcccagagaaaatagacactctgggcatttatggcaaagtgaatattcactcaattggttttagcttcagctcggacttacaaagtacccaagcatctagtctggaactgac

SEQ ID NO: 147702 - DNA, 574 bp, Homo sapiens
  Payload ID: 9222
  Gene Symbol: LGALS8
  Gene Name: lectin, galactoside-binding, soluble, 8
  ENST ID: ENST00000434231
  CDS Start-End: 146-307
aaacaacctgctccgtggagcgcctgaaacaccagtctttggggccagtgcctcagtttcaatccaggtaacctttaaatgaaacttgcctaaaatcttaggtcatacacagaagagactccaatcgacaagaagctggaaaagaatgatgttgtccttaaacaacctacagaatatcatctataacccgattccaggtggatctgcagaatggcagcagcatgaaacctcgagccgatgtggcctttcatttcaatcctcgtttcaaaagggccggctgcattgtttgcaatactttgataaatgaaaaatggggacgggaagagatcacctatgacacgcctttcaaaagagaaaagtcttttgagatcgtgattatggtgctgaaggacaaattccaggtggctgtaaatggaaaacatactctgctctatggccacaggatcggcccagagaaaatagacactctgggcatttatggcaaagtgaatattcactcaattggttttagcttcagctcggacttacaaagtacccaagcatctagtctggaactgacagagataagtagaga

SEQ ID NO: 147703 - DNA, 6281 bp, Homo sapiens
  Payload ID: 9222
  Gene Symbol: LGALS8
  Gene Name: lectin, galactoside-binding, soluble, 8
  Uniprot ID: O00214
  ENST ID: ENST00000450372
  CDS Start-End: 382-1461
tggacttggatccgaggcagacgaggaagctgagaaaaccctggcgttgaccccgtggacctgggcgccccgggaaggccagcgcttggtccaggcaggcggggcctgtgcggtgaccaccctggtcctgaaaagtcccagccccgagcgccctccctcctagacctggaggcctggaacagccagccgcccacggacgccagagccgggaaccctgacggcacttagctgctgacaaacaacctgctccgtggagcgcctgaaacaccagtctttggggccagtgcctcagtttcaatccaggtaacctttaaatgaaacttgcctaaaatcttaggtcatacacagaagagactccaatcgacaagaagctggaaaagaatgatgttgtccttaaacaacctacagaatatcatctataacccggtaatcccgtttgttggcaccattcctgatcagctggatcctggaactttgattgtgatacgtgggcatgttcctagtgacgcagacagattccaggtggatctgcagaatggcagcagcatgaaacctcgagccgatgtggcctttcatttcaatcctcgtttcaaaagggccggctgcattgtttgcaatactttgataaatgaaaaatggggacgggaagagatcacctatgacacgcctttcaaaagagaaaagtcttttgagatcgtgattatggtgctgaaggacaaattccaggtggctgtaaatggaaaacatactctgctctatggccacaggatcggcccagagaaaatagacactctgggcatttatggcaaagtgaatattcactcaattggttttagcttcagctcggacttacaaagtacccaagcatctagtctggaactgacagagataagtagagaaaatgttccaaagtctggcacgccccagcttcctagtaatagaggaggagacatttctaaaatcgcacccagaactgtctacaccaagagcaaagattcgactgtcaatcacactttgacttgcaccaaaataccacctatgaactatgtgtcaaagaggctgccattcgctgcaaggttgaacacccccatgggccctggacgaactgtcgtcgttaaaggagaagtgaatgcaaatgccaaaagctttaatgttgacctactagcaggaaaatcaaaggatattgctctacacttgaacccacgcctgaatattaaagcatttgtaagaaattcttttcttcaggagtcctggggagaagaagagagaaatattacctctttcccatttagtcctgggatgtactttgagatgataatttattgtgatgttagagaattcaaggttgcagtaaatggcgtacacagcctggagtacaaacacagatttaaagagctcagcagtattgacacgctggaaattaatggagacatccacttactggaagtaaggagctggtagcctacctacacagctgctacaaaaaccaaaatacagaatggcttctgtgatactggccttgctgaaacgcatctcactgtcattctattgtttatattgttaaaatgagcttgtgcaccattaggtcctgctgggtgttctcagtccttgccatgaagtatggtggtgtctagcactgaatggggaaactgggggcagcaacacttatagccagttaaagccactctgccctctctcctactttggctgactcttcaagaatgccattcaacaagtatttatggagtacctactataatacagtagctaacatgtattgagcacagattttttttggtaaaactgtgaagagctaggatatatacttggtgaaacaaaccagtatgttccctgttctcttgagcttcgactcttctgtgcgctactgctgcgcactgctttttctacaggcattacatcaactcctaaggggtcctctgggattagttatgcagatattaaatcacccgaagacactaacttacagaagacacaactccttccccagtgatcactgtcataaccagtgctctaccgtatcccatcactgaggactgatgttgactgacatcattttctttatcgtaataaacatgtggctctattagctgcaagctttaccaagtaattggcatgacatctgagcacagaaattaaggcaaaaaaccaaagcaaaacaaatacatggtgctgaaattaacttgatgccaagcccaaggcagctgatttctgtgtatttgaacttagggcaaatcagagtctacacagacgcctacagaaagtttcaggaagaggcaagatgcattcaatttgaaagatatttatgggcaacaaagtaaggtcaggattagacttcaggcattcataaggcaggcactatcagaaagtgtacgccaactaagggacccacaaagcaggcagaggtaatgcagaaatctgttttgttcccatgaaatcaccaatcaaggcctccgttcttctaaagattagtccatcatcattagcaactgagatcaaagcactcttccactttacgtgattaaaatcaaacctgtatcagcaagttaaatggttccatttctgtgatttttctattatttgaggggagttggcagaagttccatgtatatgggatctttacaggtcagatcttgttacaggaaatttcaaaggtttgggagtggggagggaaaaaagctcagtcagtgaggatcattttatcacattagactggggcagaactctgccaggatttaggaatattttcagaacagattttagatattatttctatccatatattgaaaagaataccattgtcaatcttatttttttaaaagtactcagtgtagaaatcgctagcccttaattcttttccagcttttcatattaatgtatgcagagtctcaccaagctcaaagacactggttgggggtggagggtgccacagggaaagctgtagaaggcaagaagactcgagaatcccccagagttatttttctccataaagaccatcagagtgcttaactgagctgttggagactgtgaggcatttaggaaaaaaatagcccactcacatcattccttgtaagtcttaagttcattttcattttacgtggaggaaaaaaatttaaaaagctattagtatttattaatgaattttactgagacatttcttagaaatatgcacttctatactagcaagctctgtctctaaaatgcaagttggccttttgcttgccacatttctgcattaaacttctatattagcttcaaaggcttttaaactcaatgcgaacattctacgggatgttcttagatgcctttaaaaagggggcagatctaattttatttgaaccctcactttccaacttcaccatgacccagtactagagattagggcacttcaaagcattgaaaaaaatctactgatacttactttcttagacaagtagttcttagttaaccaccaatggaactgggttcattctgaatcctggaggagcttcctcgtgccacccagtgtttctgggccctctgtgtgagcagccaggtgtgagctgttttagaagcagcgtgttgccttcatctctcccgtttcccaaaagaacaaaggataaaggtgacagtcacactcctgggttaaaaaaagcattccagaaccacttctctttatgggcacaacaaagaaacgaaggctgaagttcgcctacccaaaatgaaaagtaggctttacagtcaaaagtacttctgttgattgctaaataacttcattttcttgaaatagagcaactttgagtgaaatctgcaacatggataccatgtatgtaagatactgctgtacagaagagttaaggcttacagtgcaaatgaggcgtcagctttgggtgctaaaattaacaagtctaatattattaccatcaatcaggaagagaataataaatgtttaaacaaacacagcagtctgtataaaaataccgtgtatcatttactctttctgcagctctatacgataggcaggagaggcttatgtggcagcacaagccaggtggggattttgtaaagaagtgataaaacatttgtaagtaatccaagtaggtgtattaaggcaccaaaagtaacatggcacccaacacccaaaaataaaaatatgaaatatgagtgtgaactctgagtagagtatgaaacaccacagaaagtcttagaaatagctctggagtggctctcccaggacagtttccagttgctgaatagtcttttggcactgatgttctacttcttcacattcatctaaaaaaaaaaaaaaaaaatcaaaattaaaatctgagtcagtccgcctgcctcggttctcattagtttaattcttaatgccttgcactttccggcaatcattcaatcaaaagagtgaaatgaagcacattaacaaagcaggaggcgccacggaccgcctccctccacaccgctccttccgccttcattccttgcccacaggcttgcactggaagctgaataagaatccccaaaactcaaacttcctagggatgccacccctttagtagctcacacctcccccctccaagagctaagaaacaaaggagaatgtacttttgtagcttagataagcaatgaatcagtaaaggactgatctacttgctccaccacccctcccttaataataacatttactgttatttcctgggcctaagactctatgttccagaactgtcacagctccccatgtcacactcactagcttgtgatctttgtcaaataactgaaatcttttaagcctctagtttcttcctttgtaaaacagagataaaatgttgtggtttttaagtgagataatccaagtaaagcacctaacatggagtagtgaatgaacatcggttgctactaaaagtggacatcctactgcatccttaatgccactaggcatttccatacaatctggggaccaaaacttcaatcatataaatgtatgaggttaattaaaaacactactgtaatctgcttgtatgatcacaaaccaccacaaaagaaaagatcgtgaagattacactgtaaacggactctcaaatgatcaggaggtggtcacttcgcaacttgctccctccacccaactcaaaacaggagctcgagcctgcctgtatttgagactggagctgcctgtatgaggactggatcaactgctagtcacgttatatccaaatctgcattatcattgggcacattttcacagaattttactgaattattccttaattgtttaatggttgggaatagtttgggaattaccttccatcaactctgctaagaaaggaatggattctggtagcaagacaatataattctcctttagtttttcagccagtgctaacacagtaatcaaagcagcaaatcgaacctgaaagggataaaagagcaaagaaataaaaagtagtgttactgtatttattatcttaagagctgtactgacttgagacaagctctaactttttaaacattagttcacatgcgtttattcacttcattatgttcattaagctttcatcttagaataccagtttcaccatttgggagctgtttgtaatatgtgcaaccttataaatagtgttttccaaactgtgtcccaggactgcaaatctttaatgtgaaatgtctttttataatctcttcctttaaaaaaaaccaataaaataaaatgccgcatgcaaactcaagtgtgtcaccagattttacttcattggcgctcgccagcccgccaggctggcaataaagtgcctccagccacctctggcaggtctcctcacccacagcccctgactggtcaccactataattgtatgaggggccaggacagtcgcttgggataaactcccatctcagcactgaataaaaaacattctgtgtcacaatatcctagttttggggctttaaaaacgtctaggtgttcctcacatgccttgtctataataaggaaagcaagcagtagttgggtattgttagcttttgaaacaaaagccctactggtcttctaattttggatattttaattaaagaatatctggacagtacaaagtgaattattaaaaaaccatttgtaactacctagattcaatcaggatttccttgatttgtgcaaagtaaaatattacaataaatttgatactgctacttgtataaaaacctatggtttaaaatgtgggggttcatcataatagtctcattgttagcatatcctaataaagaatttgaactaataaatcctattaataaaa

SEQ ID NO: 147704 - DNA, 6097 bp, Homo sapiens
  Payload ID: 9222
  Gene Symbol: LGALS8
  Gene Name: lectin, galactoside-binding, soluble, 8
  ENST ID: ENST00000416919
  CDS Start-End: 382-1284
tggacttggatccgaggcagacgaggaagctgagaaaaccctggcgttgaccccgtggacctgggcgccccgggaaggccagcgcttggtccaggcaggcggggcctgtgcggtgaccaccctggtcctgaaaagtcccagccccgagcgccctccctcctagacctggaggcctggaacagccagccgcccacggacgccagagccgggaaccctgacggcacttagctgctgacaaacaacctgctccgtggagcgcctgaaacaccagtctttggggccagtgcctcagtttcaatccaggtaacctttaaatgaaacttgcctaaaatcttaggtcatacacagaagagactccaatcgacaagaagctggaaaagaatgatgttgtccttaaacaacctacagaatatcatctataacccggtaatcccgtttgttggcaccattcctgatcagctggatcctggaactttgattgtgatacgtgggcatgttcctagtgacgcagacagattccaggtggatctgcagaatggcagcagcatgaaacctcgagccgatgtggcctttcatttcaatcctcgtttcaaaagggccggctgcattgtttgcaatactttgataaatgaaaaatggggacgggaagagatcacctatgacacgcctttcaaaagagaaaagtcttttgagatcgtgattatggtgctgaaggacaaattccaggttccaaagtctggcacgccccagcttcctagtaatagaggaggagacatttctaaaatcgcacccagaactgtctacaccaagagcaaagattcgactgtcaatcacactttgacttgcaccaaaataccacctatgaactatgtgtcaaagaggctgccattcgctgcaaggttgaacacccccatgggccctggacgaactgtcgtcgttaaaggagaagtgaatgcaaatgccaaaagctttaatgttgacctactagcaggaaaatcaaaggatattgctctacacttgaacccacgcctgaatattaaagcatttgtaagaaattcttttcttcaggagtcctggggagaagaagagagaaatattacctctttcccatttagtcctgggatgtactttgagatgataatttattgtgatgttagagaattcaaggttgcagtaaatggcgtacacagcctggagtacaaacacagatttaaagagctcagcagtattgacacgctggaaattaatggagacatccacttactggaagtaaggagctggtagcctacctacacagctgctacaaaaaccaaaatacagaatggcttctgtgatactggccttgctgaaacgcatctcactgtcattctattgtttatattgttaaaatgagcttgtgcaccattaggtcctgctgggtgttctcagtccttgccatgaagtatggtggtgtctagcactgaatggggaaactgggggcagcaacacttatagccagttaaagccactctgccctctctcctactttggctgactcttcaagaatgccattcaacaagtatttatggagtacctactataatacagtagctaacatgtattgagcacagattttttttggtaaaactgtgaagagctaggatatatacttggtgaaacaaaccagtatgttccctgttctcttgagcttcgactcttctgtgcgctactgctgcgcactgctttttctacaggcattacatcaactcctaaggggtcctctgggattagttatgcagatattaaatcacccgaagacactaacttacagaagacacaactccttccccagtgatcactgtcataaccagtgctctaccgtatcccatcactgaggactgatgttgactgacatcattttctttatcgtaataaacatgtggctctattagctgcaagctttaccaagtaattggcatgacatctgagcacagaaattaaggcaaaaaaccaaagcaaaacaaatacatggtgctgaaattaacttgatgccaagcccaaggcagctgatttctgtgtatttgaacttagggcaaatcagagtctacacagacgcctacagaaagtttcaggaagaggcaagatgcattcaatttgaaagatatttatgggcaacaaagtaaggtcaggattagacttcaggcattcataaggcaggcactatcagaaagtgtacgccaactaagggacccacaaagcaggcagaggtaatgcagaaatctgttttgttcccatgaaatcaccaatcaaggcctccgttcttctaaagattagtccatcatcattagcaactgagatcaaagcactcttccactttacgtgattaaaatcaaacctgtatcagcaagttaaatggttccatttctgtgatttttctattatttgaggggagttggcagaagttccatgtatatgggatctttacaggtcagatcttgttacaggaaatttcaaaggtttgggagtggggagggaaaaaagctcagtcagtgaggatcattttatcacattagactggggcagaactctgccaggatttaggaatattttcagaacagattttagatattatttctatccatatattgaaaagaataccattgtcaatcttatttttttaaaagtactcagtgtagaaatcgctagcccttaattcttttccagcttttcatattaatgtatgcagagtctcaccaagctcaaagacactggttgggggtggagggtgccacagggaaagctgtagaaggcaagaagactcgagaatcccccagagttatttttctccataaagaccatcagagtgcttaactgagctgttggagactgtgaggcatttaggaaaaaaatagcccactcacatcattccttgtaagtcttaagttcattttcattttacgtggaggaaaaaaatttaaaaagctattagtatttattaatgaattttactgagacatttcttagaaatatgcacttctatactagcaagctctgtctctaaaatgcaagttggccttttgcttgccacatttctgcattaaacttctatattagcttcaaaggcttttaaactcaatgcgaacattctacgggatgttcttagatgcctttaaaaagggggcagatctaattttatttgaaccctcactttccaacttcaccatgacccagtactagagattagggcacttcaaagcattgaaaaaaatctactgatacttactttcttagacaagtagttcttagttaaccaccaatggaactgggttcattctgaatcctggaggagcttcctcgtgccacccagtgtttctgggccctctgtgtgagcagccaggtgtgagctgttttagaagcagcgtgttgccttcatctctcccgtttcccaaaagaacaaaggataaaggtgacagtcacactcctgggttaaaaaaagcattccagaaccacttctctttatgggcacaacaaagaaacgaaggctgaagttcgcctacccaaaatgaaaagtaggctttacagtcaaaagtacttctgttgattgctaaataacttcattttcttgaaatagagcaactttgagtgaaatctgcaacatggataccatgtatgtaagatactgctgtacagaagagttaaggcttacagtgcaaatgaggcgtcagctttgggtgctaaaattaacaagtctaatattattaccatcaatcaggaagagaataataaatgtttaaacaaacacagcagtctgtataaaaataccgtgtatcatttactctttctgcagctctatacgataggcaggagaggcttatgtggcagcacaagccaggtggggattttgtaaagaagtgataaaacatttgtaagtaatccaagtaggtgtattaaggcaccaaaagtaacatggcacccaacacccaaaaataaaaatatgaaatatgagtgtgaactctgagtagagtatgaaacaccacagaaagtcttagaaatagctctggagtggctctcccaggacagtttccagttgctgaatagtcttttggcactgatgttctacttcttcacattcatctaaaaaaaaaaaaaaaaaatcaaaattaaaatctgagtcagtccgcctgcctcggttctcattagtttaattcttaatgccttgcactttccggcaatcattcaatcaaaagagtgaaatgaagcacattaacaaagcaggaggcgccacggaccgcctccctccacaccgctccttccgccttcattccttgcccacaggcttgcactggaagctgaataagaatccccaaaactcaaacttcctagggatgccacccctttagtagctcacacctcccccctccaagagctaagaaacaaaggagaatgtacttttgtagcttagataagcaatgaatcagtaaaggactgatctacttgctccaccacccctcccttaataataacatttactgttatttcctgggcctaagactctatgttccagaactgtcacagctccccatgtcacactcactagcttgtgatctttgtcaaataactgaaatcttttaagcctctagtttcttcctttgtaaaacagagataaaatgttgtggtttttaagtgagataatccaagtaaagcacctaacatggagtagtgaatgaacatcggttgctactaaaagtggacatcctactgcatccttaatgccactaggcatttccatacaatctggggaccaaaacttcaatcatataaatgtatgaggttaattaaaaacactactgtaatctgcttgtatgatcacaaaccaccacaaaagaaaagatcgtgaagattacactgtaaacggactctcaaatgatcaggaggtggtcacttcgcaacttgctccctccacccaactcaaaacaggagctcgagcctgcctgtatttgagactggagctgcctgtatgaggactggatcaactgctagtcacgttatatccaaatctgcattatcattgggcacattttcacagaattttactgaattattccttaattgtttaatggttgggaatagtttgggaattaccttccatcaactctgctaagaaaggaatggattctggtagcaagacaatataattctcctttagtttttcagccagtgctaacacagtaatcaaagcagcaaatcgaacctgaaagggataaaagagcaaagaaataaaaagtagtgttactgtatttattatcttaagagctgtactgacttgagacaagctctaactttttaaacattagttcacatgcgtttattcacttcattatgttcattaagctttcatcttagaataccagtttcaccatttgggagctgtttgtaatatgtgcaaccttataaatagtgttttccaaactgtgtcccaggactgcaaatctttaatgtgaaatgtctttttataatctcttcctttaaaaaaaaccaataaaataaaatgccgcatgcaaactcaagtgtgtcaccagattttacttcattggcgctcgccagcccgccaggctggcaataaagtgcctccagccacctctggcaggtctcctcacccacagcccctgactggtcaccactataattgtatgaggggccaggacagtcgcttgggataaactcccatctcagcactgaataaaaaacattctgtgtcacaatatcctagttttggggctttaaaaacgtctaggtgttcctcacatgccttgtctataataaggaaagcaagcagtagttgggtattgttagcttttgaaacaaaagccctactggtcttctaattttggatattttaattaaagaatatctggacagtacaaagtgaattattaaaaaaccatttgtaactacctagattcaatcaggatttccttgatttgtgcaaagtaaaatattacaataaatttgatactgctacttgtataaaaacctatggtttaaaatgtgggggttcatcataatagtctcattgttagcatatcctaataaagaatttgaactaataaatcctatt

SEQ ID NO: 147705 - DNA, 564 bp, Homo sapiens
  Payload ID: 9222
  Gene Symbol: LGALS8
  Gene Name: lectin, galactoside-binding, soluble, 8
  ENST ID: ENST00000442397
  CDS Start-End: 160-321
acttagctgctgacaaacaacctgctccgtggagcgcctgaaacaccagtctttggggccagtgcctcagtttcaatccaggtaacctttaaatgaaacttgcctaaaatcttaggtcatacacagaagagactccaatcgacaagaagctggaaaagaatgatgttgtccttaaacaacctacagaatatcatctataacccggtaatcccgtttgttggcaccattcctgatcagctggatcctggaactttgattgtgatacgtgggcatgttcctagtgacgcagacaggtggatctgcagaatggcagcagcatgaaacctcgagccgatgtggcctttcatttcaatcctcgtttcaaaagggccggctgcattgtttgcaatactttgataaatgaaaaatggggacgggaagagatcacctatgacacgcctttcaaaagagaaaagtcttttgagatcgtgattatggtgctgaaggacaaattccaggttccaaagtctggcacgccccagcttgtgagtatttttgcctgggttatttcatgtggaatatttt

SEQ ID NO: 147706 - DNA, 1349 bp, Homo sapiens
  Payload ID: 9222
  Gene Symbol: LGALS8
  Gene Name: lectin, galactoside-binding, soluble, 8
  Uniprot ID: O00214
  ENST ID: ENST00000527974
  CDS Start-End: 150-1229
acctgaaaagactggatttgggacatgatcctgtagaacttcggagggccagtgcctcagtttcaatccaggtaacctttaaatgaaacttgcctaaaatcttaggtcatacacagaagagactccaatcgacaagaagctggaaaagaatgatgttgtccttaaacaacctacagaatatcatctataacccggtaatcccgtttgttggcaccattcctgatcagctggatcctggaactttgattgtgatacgtgggcatgttcctagtgacgcagacagattccaggtggatctgcagaatggcagcagcatgaaacctcgagccgatgtggcctttcatttcaatcctcgtttcaaaagggccggctgcattgtttgcaatactttgataaatgaaaaatggggacgggaagagatcacctatgacacgcctttcaaaagagaaaagtcttttgagatcgtgattatggtgctgaaggacaaattccaggtggctgtaaatggaaaacatactctgctctatggccacaggatcggcccagagaaaatagacactctgggcatttatggcaaagtgaatattcactcaattggttttagcttcagctcggacttacaaagtacccaagcatctagtctggaactgacagagataagtagagaaaatgttccaaagtctggcacgccccagcttcctagtaatagaggaggagacatttctaaaatcgcacccagaactgtctacaccaagagcaaagattcgactgtcaatcacactttgacttgcaccaaaataccacctatgaactatgtgtcaaagaggctgccattcgctgcaaggttgaacacccccatgggccctggacgaactgtcgtcgttaaaggagaagtgaatgcaaatgccaaaagctttaatgttgacctactagcaggaaaatcaaaggatattgctctacacttgaacccacgcctgaatattaaagcatttgtaagaaattcttttcttcaggagtcctggggagaagaagagagaaatattacctctttcccatttagtcctgggatgtactttgagatgataatttattgtgatgttagagaattcaaggttgcagtaaatggcgtacacagcctggagtacaaacacagatttaaagagctcagcagtattgacacgctggaaattaatggagacatccacttactggaagtaaggagctggtagcctacctacacagctgctacaaaaaccaaaatacagaatggcttctgtgatactggccttgctgaaacgcatctcactgtcattctattgtttatattgttaaaatgagcttgtgcacca

SEQ ID NO: 147707 - DNA, 903 bp, Homo sapiens
  Payload ID: 9222
  Gene Symbol: LGALS8
  Gene Name: lectin, galactoside-binding, soluble, 8
  ENST ID: ENST00000525042
  CDS Start-End: 1-903
atgatgttgtccttaaacaacctacagaatatcatctataacccggtaatcccgtttgttggcaccattcctgatcagctggatcctggaactttgattgtgatacgtgggcatgttcctagtgacgcagacagattccaggtggatctgcagaatggcagcagcatgaaacctcgagccgatgtggcctttcatttcaatcctcgtttcaaaagggccggctgcattgtttgcaatactttgataaatgaaaaatggggacgggaagagatcacctatgacacgcctttcaaaagagaaaagtcttttgagatcgtgattatggtgctgaaggacaaattccaggttccaaagtctggcacgccccagcttcctagtaatagaggaggagacatttctaaaatcgcacccagaactgtctacaccaagagcaaagattcgactgtcaatcacactttgacttgcaccaaaataccacctatgaactatgtgtcaaagaggctgccattcgctgcaaggttgaacacccccatgggccctggacgaactgtcgtcgttaaaggagaagtgaatgcaaatgccaaaagctttaatgttgacctactagcaggaaaatcaaaggatattgctctacacttgaacccacgcctgaatattaaagcatttgtaagaaattcttttcttcaggagtcctggggagaagaagagagaaatattacctctttcccatttagtcctgggatgtactttgagatgataatttattgtgatgttagagaattcaaggttgcagtaaatggcgtacacagcctggagtacaaacacagatttaaagagctcagcagtattgacacgctggaaattaatggagacatccacttactggaagtaaggagctggtag

SEQ ID NO: 147708 - DNA, 1855 bp, Homo sapiens
  Payload ID: 9222
  Gene Symbol: LGALS8
  Gene Name: lectin, galactoside-binding, soluble, 8
  ENST ID: ENST00000323938
  CDS Start-End: 142-1014
aacctgctccgtggagcgcctgaaacaccagtctttggggccagtgcctcagtttcaatccaggtaacctttaaatgaaacttgcctaaaatcttaggtcatacacagaagagactccaatcgacaagaagctggaaaagaatgatgttgtccttaaacaacctacagaatatcatctataacccggtaatcccgtttgttggcaccattcctgatcagctggatcctggaactttgattgtgatacgtgggcatgttcctagtgacgcagacagggccggctgcattgtttgcaatactttgataaatgaaaaatggggacgggaagagatcacctatgacacgcctttcaaaagagaaaagtcttttgagatcgtgattatggtgctgaaggacaaattccaggtggctgtaaatggaaaacatactctgctctatggccacaggatcggcccagagaaaatagacactctgggcatttatggcaaagtgaatattcactcaattggttttagcttcagctcggacttacaaagtacccaagcatctagtctggaactgacagagataagtagagaaaatgttccaaagtctggcacgccccagcttaggctgccattcgctgcaaggttgaacacccccatgggccctggacgaactgtcgtcgttaaaggagaagtgaatgcaaatgccaaaagctttaatgttgacctactagcaggaaaatcaaaggatattgctctacacttgaacccacgcctgaatattaaagcatttgtaagaaattcttttcttcaggagtcctggggagaagaagagagaaatattacctctttcccatttagtcctgggatgtactttgagatgataatttattgtgatgttagagaattcaaggttgcagtaaatggcgtacacagcctggagtacaaacacagatttaaagagctcagcagtattgacacgctggaaattaatggagacatccacttactggaagtaaggagctggtagcctacctacacagctgctacaaaaaccaaaatacagaatggcttctgtgatactggccttgctgaaacgcatctcactgtcattctattgtttatattgttaaaatgagcttgtgcaccattaggtcctgctgggtgttctcagtccttgccatgaagtatggtggtgtctagcactgaatggggaaactgggggcagcaacacttatagccagttaaagccactctgccctctctcctactttggctgactcttcaagaatgccattcaacaagtatttatggagtacctactataatacagtagctaacatgtattgagcacagattttttttggtaaaactgtgaagagctaggatatatacttggtgaaacaaaccagtatgttccctgttctcttgagcttcgactcttctgtgcgctactgctgcgcactgctttttctacaggcattacatcaactcctaaggggtcctctgggattagttatgcagatattaaatcacccgaagacactaacttacagaagacacaactccttccccagtgatcactgtcataaccagtgctctaccgtatcccatcactgaggactgatgttgactgacatcattttctttatcgtaataaacatgtggctctattagctgcaagctttaccaagtaattggcatgacatctgagcacagaaattaaggcaaaaaaccaaagcaaaacaaatacatggtgctgaaattaacttgatgccaagcccaaggcagctgatttctgtgtatttgaacttagggcaaatcagagtctacacagacgcctacagaaagtttcaggaagaggcaagatg

SEQ ID NO: 147709 - DNA, 6420 bp, Homo sapiens
  Payload ID: 9222
  Gene Symbol: LGALS8
  Gene Name: lectin, galactoside-binding, soluble, 8
  Uniprot ID: O00214
  ENST ID: ENST00000526589
  CDS Start-End: 521-1600
agaacttcggagattggggaagataatcggaagaggtagaagacaccgtccatgacacttcctggggaagcagatgtatgtataaggataggtgtgtactgtcaaaaagcagcgcctccaagtctcttctggcactgtctggacttggatccgaggcagacgaggaagctgagaaaaccctggcgttgaccccgtggacctgggcgccccgggaaggccagcgcttggtccaggcaggcggggcctgtgcggtgaccaccctggtcctgaaaagtcccagccccgagcgccctccctcctagacctggaggcctggaacagccagccgcccacggacgccagagccgggaaccctgacggcacttagctgctgacaaacaacctgctccgtggagcgcctgaaacaccagtctttggggccagtgcctcagtttcaatccaggtaacctttaaatgaaacttgcctaaaatcttaggtcatacacagaagagactccaatcgacaagaagctggaaaagaatgatgttgtccttaaacaacctacagaatatcatctataacccggtaatcccgtttgttggcaccattcctgatcagctggatcctggaactttgattgtgatacgtgggcatgttcctagtgacgcagacagattccaggtggatctgcagaatggcagcagcatgaaacctcgagccgatgtggcctttcatttcaatcctcgtttcaaaagggccggctgcattgtttgcaatactttgataaatgaaaaatggggacgggaagagatcacctatgacacgcctttcaaaagagaaaagtcttttgagatcgtgattatggtgctgaaggacaaattccaggtggctgtaaatggaaaacatactctgctctatggccacaggatcggcccagagaaaatagacactctgggcatttatggcaaagtgaatattcactcaattggttttagcttcagctcggacttacaaagtacccaagcatctagtctggaactgacagagataagtagagaaaatgttccaaagtctggcacgccccagcttcctagtaatagaggaggagacatttctaaaatcgcacccagaactgtctacaccaagagcaaagattcgactgtcaatcacactttgacttgcaccaaaataccacctatgaactatgtgtcaaagaggctgccattcgctgcaaggttgaacacccccatgggccctggacgaactgtcgtcgttaaaggagaagtgaatgcaaatgccaaaagctttaatgttgacctactagcaggaaaatcaaaggatattgctctacacttgaacccacgcctgaatattaaagcatttgtaagaaattcttttcttcaggagtcctggggagaagaagagagaaatattacctctttcccatttagtcctgggatgtactttgagatgataatttattgtgatgttagagaattcaaggttgcagtaaatggcgtacacagcctggagtacaaacacagatttaaagagctcagcagtattgacacgctggaaattaatggagacatccacttactggaagtaaggagctggtagcctacctacacagctgctacaaaaaccaaaatacagaatggcttctgtgatactggccttgctgaaacgcatctcactgtcattctattgtttatattgttaaaatgagcttgtgcaccattaggtcctgctgggtgttctcagtccttgccatgaagtatggtggtgtctagcactgaatggggaaactgggggcagcaacacttatagccagttaaagccactctgccctctctcctactttggctgactcttcaagaatgccattcaacaagtatttatggagtacctactataatacagtagctaacatgtattgagcacagattttttttggtaaaactgtgaagagctaggatatatacttggtgaaacaaaccagtatgttccctgttctcttgagcttcgactcttctgtgcgctactgctgcgcactgctttttctacaggcattacatcaactcctaaggggtcctctgggattagttatgcagatattaaatcacccgaagacactaacttacagaagacacaactccttccccagtgatcactgtcataaccagtgctctaccgtatcccatcactgaggactgatgttgactgacatcattttctttatcgtaataaacatgtggctctattagctgcaagctttaccaagtaattggcatgacatctgagcacagaaattaaggcaaaaaaccaaagcaaaacaaatacatggtgctgaaattaacttgatgccaagcccaaggcagctgatttctgtgtatttgaacttagggcaaatcagagtctacacagacgcctacagaaagtttcaggaagaggcaagatgcattcaatttgaaagatatttatgggcaacaaagtaaggtcaggattagacttcaggcattcataaggcaggcactatcagaaagtgtacgccaactaagggacccacaaagcaggcagaggtaatgcagaaatctgttttgttcccatgaaatcaccaatcaaggcctccgttcttctaaagattagtccatcatcattagcaactgagatcaaagcactcttccactttacgtgattaaaatcaaacctgtatcagcaagttaaatggttccatttctgtgatttttctattatttgaggggagttggcagaagttccatgtatatgggatctttacaggtcagatcttgttacaggaaatttcaaaggtttgggagtggggagggaaaaaagctcagtcagtgaggatcattttatcacattagactggggcagaactctgccaggatttaggaatattttcagaacagattttagatattatttctatccatatattgaaaagaataccattgtcaatcttatttttttaaaagtactcagtgtagaaatcgctagcccttaattcttttccagcttttcatattaatgtatgcagagtctcaccaagctcaaagacactggttgggggtggagggtgccacagggaaagctgtagaaggcaagaagactcgagaatcccccagagttatttttctccataaagaccatcagagtgcttaactgagctgttggagactgtgaggcatttaggaaaaaaatagcccactcacatcattccttgtaagtcttaagttcattttcattttacgtggaggaaaaaaatttaaaaagctattagtatttattaatgaattttactgagacatttcttagaaatatgcacttctatactagcaagctctgtctctaaaatgcaagttggccttttgcttgccacatttctgcattaaacttctatattagcttcaaaggcttttaaactcaatgcgaacattctacgggatgttcttagatgcctttaaaaagggggcagatctaattttatttgaaccctcactttccaacttcaccatgacccagtactagagattagggcacttcaaagcattgaaaaaaatctactgatacttactttcttagacaagtagttcttagttaaccaccaatggaactgggttcattctgaatcctggaggagcttcctcgtgccacccagtgtttctgggccctctgtgtgagcagccaggtgtgagctgttttagaagcagcgtgttgccttcatctctcccgtttcccaaaagaacaaaggataaaggtgacagtcacactcctgggttaaaaaaagcattccagaaccacttctctttatgggcacaacaaagaaacgaaggctgaagttcgcctacccaaaatgaaaagtaggctttacagtcaaaagtacttctgttgattgctaaataacttcattttcttgaaatagagcaactttgagtgaaatctgcaacatggataccatgtatgtaagatactgctgtacagaagagttaaggcttacagtgcaaatgaggcgtcagctttgggtgctaaaattaacaagtctaatattattaccatcaatcaggaagagaataataaatgtttaaacaaacacagcagtctgtataaaaataccgtgtatcatttactctttctgcagctctatacgataggcaggagaggcttatgtggcagcacaagccaggtggggattttgtaaagaagtgataaaacatttgtaagtaatccaagtaggtgtattaaggcaccaaaagtaacatggcacccaacacccaaaaataaaaatatgaaatatgagtgtgaactctgagtagagtatgaaacaccacagaaagtcttagaaatagctctggagtggctctcccaggacagtttccagttgctgaatagtcttttggcactgatgttctacttcttcacattcatctaaaaaaaaaaaaaaaaaatcaaaattaaaatctgagtcagtccgcctgcctcggttctcattagtttaattcttaatgccttgcactttccggcaatcattcaatcaaaagagtgaaatgaagcacattaacaaagcaggaggcgccacggaccgcctccctccacaccgctccttccgccttcattccttgcccacaggcttgcactggaagctgaataagaatccccaaaactcaaacttcctagggatgccacccctttagtagctcacacctcccccctccaagagctaagaaacaaaggagaatgtacttttgtagcttagataagcaatgaatcagtaaaggactgatctacttgctccaccacccctcccttaataataacatttactgttatttcctgggcctaagactctatgttccagaactgtcacagctccccatgtcacactcactagcttgtgatctttgtcaaataactgaaatcttttaagcctctagtttcttcctttgtaaaacagagataaaatgttgtggtttttaagtgagataatccaagtaaagcacctaacatggagtagtgaatgaacatcggttgctactaaaagtggacatcctactgcatccttaatgccactaggcatttccatacaatctggggaccaaaacttcaatcatataaatgtatgaggttaattaaaaacactactgtaatctgcttgtatgatcacaaaccaccacaaaagaaaagatcgtgaagattacactgtaaacggactctcaaatgatcaggaggtggtcacttcgcaacttgctccctccacccaactcaaaacaggagctcgagcctgcctgtatttgagactggagctgcctgtatgaggactggatcaactgctagtcacgttatatccaaatctgcattatcattgggcacattttcacagaattttactgaattattccttaattgtttaatggttgggaatagtttgggaattaccttccatcaactctgctaagaaaggaatggattctggtagcaagacaatataattctcctttagtttttcagccagtgctaacacagtaatcaaagcagcaaatcgaacctgaaagggataaaagagcaaagaaataaaaagtagtgttactgtatttattatcttaagagctgtactgacttgagacaagctctaactttttaaacattagttcacatgcgtttattcacttcattatgttcattaagctttcatcttagaataccagtttcaccatttgggagctgtttgtaatatgtgcaaccttataaatagtgttttccaaactgtgtcccaggactgcaaatctttaatgtgaaatgtctttttataatctcttcctttaaaaaaaaccaataaaataaaatgccgcatgcaaactcaagtgtgtcaccagattttacttcattggcgctcgccagcccgccaggctggcaataaagtgcctccagccacctctggcaggtctcctcacccacagcccctgactggtcaccactataattgtatgaggggccaggacagtcgcttgggataaactcccatctcagcactgaataaaaaacattctgtgtcacaatatcctagttttggggctttaaaaacgtctaggtgttcctcacatgccttgtctataataaggaaagcaagcagtagttgggtattgttagcttttgaaacaaaagccctactggtcttctaattttggatattttaattaaagaatatctggacagtacaaagtgaattattaaaaaaccatttgtaactacctagattcaatcaggatttccttgatttgtgcaaagtaaaatattacaataaatttgatactgctacttgtataaaaacctatggtttaaaatgtgggggttcatcataatagtctcattgttagcatatcctaataaagaatttgaactaataaatcctattaataaaa

SEQ ID NO: 147710 - DNA, 799 bp, Homo sapiens
  Payload ID: 9222
  Gene Symbol: LGALS8
  Gene Name: lectin, galactoside-binding, soluble, 8
  ENST ID: ENST00000481485
  CDS Start-End: 481-799
attttgtctttacattttacataatttcagatacattttcctcatatcaaataattcagcattttttagtactaacatcatagtctgtaagccattcaaaaaatgtatttcacaaaataggctatctcatcctttgagctattgagatgaattaatttatactcctcctaagatccctctcgtcactaagattcttttattttatgacaaaaccatagttctagaagcttgtttctcccacctgaaaagactggatttgggacatgatcctgtagaacttcggagccgcccacggacgccagagccgggaaccctgacggcacttagctgctgacaaacaacctgctccgtggagcgcctgaaacaccagtctttggggccagtgcctcagtttcaatccaggtaacctttaaatgaaacttgcctaaaatcttaggtcatacacagaagagactccaatcgacaagaagctggaaaagaatgatgttgtccttaaacaacctacagaatatcatctataacccggtaatcccgtttgttggcaccattcctgatcagctggatcctggaactttgattgtgatacgtgggcatgttcctagtgacgcagacagattccaggtggatctgcagaatggcagcagcatgaaacctcgagccgatgtggcctttcatttcaatcctcgtttcaaaagggccggctgcattgtttgcaatactttgataaatgaaaaatggggacgggaagagatcacctatgacacgcctttcaaaagagaaaagtcttttgagatcgtga

SEQ ID NO: 147711 - DNA, 554 bp, Homo sapiens
  Payload ID: 9222
  Gene Symbol: LGALS8
  Gene Name: lectin, galactoside-binding, soluble, 8
  ENST ID: ENST00000529489
  CDS Start-End: 426-554
agatcatagggggtctggagggtgaaaaaaaagagtttggtgctcatggatggggctagtattggggtgtaggggagattaggtcaaagcaagaggattcaaaggagaaatgaattcctttagattggggaagataatcggaagaggtagaagacaccgtccatgacacttcctggggaagcagatgtatgtataaggatatggagtctcgttctgttgcccaggctggagtgcagtggcacaatctcggctcacttcaacctccgtctcccaggttcaagcaattctcctgtctcagcctcctgagtagctgggactacagggccagtgcctcagtttcaatccaggtaacctttaaatgaaacttgcctaaaatcttaggtcatacacagaagagactccaatcgacaagaagctggaaaagaatgatgttgtccttaaacaacctacagaatatcatctataacccggtaatcccgtttgttggcaccattcctgatcagctggatcctggaactttgattgtgatacgtgggcatgttcctagtgacgca

SEQ ID NO: 147712 - DNA, 1852 bp, Homo sapiens
  Payload ID: 9222
  Gene Symbol: LGALS8
  Gene Name: lectin, galactoside-binding, soluble, 8
  Uniprot ID: O00214
  ENST ID: ENST00000526634
  CDS Start-End: 264-1217
gacttcctttgaccgtacgtgaaacttaagtgatggctgcttgtgatgcatacgaagtgttcatgctggcgggacctgtccctggggatacttcgggggttgcgtgatttaatgcaagcagatggcttaaattgggtcactggcttgttattatacatgtggccagtgcctcagtttcaatccaggtaacctttaaatgaaacttgcctaaaatcttaggtcatacacagaagagactccaatcgacaagaagctggaaaagaatgatgttgtccttaaacaacctacagaatatcatctataacccggtaatcccgtttgttggcaccattcctgatcagctggatcctggaactttgattgtgatacgtgggcatgttcctagtgacgcagacagattccaggtggatctgcagaatggcagcagcatgaaacctcgagccgatgtggcctttcatttcaatcctcgtttcaaaagggccggctgcattgtttgcaatactttgataaatgaaaaatggggacgggaagagatcacctatgacacgcctttcaaaagagaaaagtcttttgagatcgtgattatggtgctgaaggacaaattccaggtggctgtaaatggaaaacatactctgctctatggccacaggatcggcccagagaaaatagacactctgggcatttatggcaaagtgaatattcactcaattggttttagcttcagctcggacttacaaagtacccaagcatctagtctggaactgacagagataagtagagaaaatgttccaaagtctggcacgccccagcttaggctgccattcgctgcaaggttgaacacccccatgggccctggacgaactgtcgtcgttaaaggagaagtgaatgcaaatgccaaaagctttaatgttgacctactagcaggaaaatcaaaggatattgctctacacttgaacccacgcctgaatattaaagcatttgtaagaaattcttttcttcaggagtcctggggagaagaagagagaaatattacctctttcccatttagtcctgggatgtactttgagatgataatttattgtgatgttagagaattcaaggttgcagtaaatggcgtacacagcctggagtacaaacacagatttaaagagctcagcagtattgacacgctggaaattaatggagacatccacttactggaagtaaggagctggtagcctacctacacagctgctacaaaaaccaaaatacagaatggcttctgtgatactggccttgctgaaacgcatctcactgtcattctattgtttatattgttaaaatgagcttgtgcaccattaggtcctgctgggtgttctcagtccttgccatgaagtatggtggtgtctagcactgaatggggaaactgggggcagcaacacttatagccagttaaagccactctgccctctctcctactttggctgactcttcaagaatgccattcaacaagtatttatggagtacctactataatacagtagctaacatgtattgagcacagattttttttggtaaaactgtgaagagctaggatatatacttggtgaaacaaaccagtatgttccctgttctcttgagcttcgactcttctgtgcgctactgctgcgcactgctttttctacaggcattacatcaactcctaaggggtcctctgggattagttatgcagatattaaatcacccgaagacactaacttacagaagacacaactccttccccagtgatcactgtcataaccagtgctctaccgtatcccatcactgaggactgatgttgactgacatcattttctttatcgtaataaacatg

SEQ ID NO: 147713 - DNA, 3018 bp, Homo sapiens
  Payload ID: 9223
  Gene Symbol: LGALS9
  Gene Name: lectin, galactoside-binding, soluble, 9
  Uniprot ID: O00182
  ENST ID: ENST00000302228
  CDS Start-End: 1469-2440
tgtttgttaaattatatgtagggacagggtcttccaacctttcccgagctggtctcaagctcctgggctgaagtgatcctcctgcctcagcctctcaaagtgctggtattataggcataagccaccacgccctgcccatttttctaagttggattattttacactccagtctgctgtgaatgagagttccagttgttgcgtatcgcaatcaatttgtgattgcctacaaatgatgtgccgtgatgaaattgtccctggtgtccgagaggatcgcaaagaatttcccttcctttctctcctttctgctccccttgtactgtctactccttaaactggtacttgatccaggaacataatggggatggacagtgcagatggcacacatggcctcagtctattggagcatctcaaaggaattagtctgcaaattctagtgcatctaggtggagcacaggaaggaagagaggtgcagactcacgtatggccctggggcacctgccatcctctcgcacccgtacagcccttacctgccagcacttaccctacccagcttgagttctgggccttctcaccagcacatcgctgggacctggtcgacttcaggtaagtttatttcatggctccctcccccacgacctgcacatgccatatgttccttcccagccccatgtcacttgaaatgttctatcatgtccaagacttctctcctcatcctaaagtgcagaaaataaggatggagaagagaaggagaagagaatcaagagagattcattgagagggaggatcagaagctcctgggcaccccatactgtagaataaaaatattcattatggtgtttttcttgcaaaatattcccctctacataattatgtttttacatgaataatataaatttaaacaggagaaatactttttgaagagtctgagaatcttcataaagttcaggcggccacgaattagctgtgtgacctggggcatgccccttagactctgagcctcagcttctctgtatgtaaaatgggttgaagccgcccttccccacaagcaccctgtgcacaggcaatgcccagccccattattttctggactccgtggccaagcatgcttaggacacacagccacatacttctgggcagtgtcatctggcaacttgctgtcatgtcagtgtggtcaagcattgtagacctctatgaaccaaatatgcttcaggcttgggttgagcacaggagagggaggagggaaaggtcactggggctgggagtgcctacttccctctgtgagtgtcaccccagtccacccagtaccatacctttctctctctggacccacttccttttgctgccggctcctccccattgaataacagccaagttgctttggtttctatttctttgttaagtcgttccctctacaaaggacttcctagtgggtgtgaaaggcagcggtggccacagaggcggcggagagatggccttcagcggttcccaggctccctacctgagtccagctgtccccttttctgggactattcaaggaggtctccaggacggacttcagatcactgtcaatgggaccgttctcagctccagtggaaccaggtttgctgtgaactttcagactggcttcagtggaaatgacattgccttccacttcaaccctcggtttgaagatggagggtacgtggtgtgcaacacgaggcagaacggaagctgggggcccgaggagaggaagacacacatgcctttccagaaggggatgccctttgacctctgcttcctggtgcagagctcagatttcaaggtgatggtgaacgggatcctcttcgtgcagtacttccaccgcgtgcccttccaccgtgtggacaccatctccgtcaatggctctgtgcagctgtcctacatcagcttccagcctcccggcgtgtggcctgccaacccggctcccattacccagacagtcatccacacagtgcagagcgcccctggacagatgttctctactcccgccatcccacctatgatgtacccccaccccgcctatccgatgcctttcatcaccaccattctgggagggctgtacccatccaagtccatcctcctgtcaggcactgtcctgcccagtgctcagaggttccacatcaacctgtgctctgggaaccacatcgccttccacctgaacccccgttttgatgagaatgctgtggtccgcaacacccagatcgacaactcctgggggtctgaggagcgaagtctgccccgaaaaatgcccttcgtccgtggccagagcttctcagtgtggatcttgtgtgaagctcactgcctcaaggtggccgtggatggtcagcacctgtttgaatactaccatcgcctgaggaacctgcccaccatcaacagactggaagtggggggcgacatccagctgacccatgtgcagacataggcggcttcctggccctggggccgggggctggggtgtggggcagtctgggtcctctcatcatccccacttcccaggcccagcctttccaaccctgcctgggatctgggctttaatgcagaggccatgtccttgtctggtcctgcttctggctacagccaccctggaacggagaaggcagctgacggggattgccttcctcagccgcagcagcacctggggctccagctgctggaatcctaccatcccaggaggcaggcacagccagggagaggggaggagtgggcagtgaagatgaagccccatgctcagtcccctcccatcccccacgcagctccaccccagtcccaagccaccagctgtctgctcctggtgggaggtggcctcctcagcccctcctctctgacctttaacctcactctcaccttgcaccgtgcaccaacccttcacccctcctggaaagcaggcctgatggcttcccactggcctccaccacctgaccagagtgttctcttcagaggactggctcctttcccagtgtccttaaaataaagaaatgaaaatgcttgttggcacattca

SEQ ID NO: 147714 - DNA, 1378 bp, Homo sapiens
  Payload ID: 9223
  Gene Symbol: LGALS9
  Gene Name: lectin, galactoside-binding, soluble, 9
  Uniprot ID: O00182
  ENST ID: ENST00000313648
  CDS Start-End: 119-859
tccccattgaataacagccaagttgctttggtttctatttctttgttaagtcgttccctctacaaaggacttcctagtgggtgtgaaaggcagcggtggccacagaggcggcggagagatggccttcagcggttcccaggctccctacctgagtccagctgtccccttttctgggactattcaaggaggtctccaggacggacttcagatcactgtcaatgggaccgttctcagctccagtggaaccaggtttgctgtgaactttcagactggcttcagtggaaatgacattgccttccacttcaaccctcggtttgaagatggagggtacgtggtgtgcaacacgaggcagaacggaagctgggggcccgaggagaggaagacacacatgcctttccagaaggggatgccctttgacctctgcttcctggtgcagagctcagatttcaaggtgatggtgaacgggatcctcttcgtgcagtacttccaccgcgtgcccttccaccgtgtggacaccatctccgtcaatggctctgtgcagctgtcctacatcagcttccagcctcccggcgtgtggcctgccaacccggctcccattacccagacagtcatccacacagtgcagagcgcccctggacagatgttctctactcccgccatcccacctatgatgtacccccaccccgcctatccgatgcctttcatcaccaccattctgggagggctgtacccatccaagtccatcctcctgtcaggcactgtcctgcccagtgctcagaggtgtggatcttgtgtgaagctcactgcctcaaggtggccgtggatggtcagcacctgtttgaatactaccatcgcctgaggaacctgcccaccatcaacagactggaagtggggggcgacatccagctgacccatgtgcagacataggcggcttcctggccctggggccgggggctggggtgtggggcagtctgggtcctctcatcatccccacttcccaggcccagcctttccaaccctgcctgggatctgggctttaatgcagaggccatgtccttgtctggtcctgcttctggctacagccaccctggaacggagaaggcagctgacggggattgccttcctcagccgcagcagcacctggggctccagctgctggaatcctaccatcccaggaggcaggcacagccagggagaggggaggagtgggcagtgaagatgaagccccatgctcagtcccctcccatcccccacgcagctccaccccagtcccaagccaccagctgtctgctcctggtgggaggtggcctcctcagcccctcctctctgacctttaacctcactctcaccttgcaccgtgcaccaacccttcacccct

SEQ ID NO: 147715 - DNA, 3114 bp, Homo sapiens
  Payload ID: 9223
  Gene Symbol: LGALS9
  Gene Name: lectin, galactoside-binding, soluble, 9
  Uniprot ID: O00182
  ENST ID: ENST00000395473
  CDS Start-End: 1469-2536
tgtttgttaaattatatgtagggacagggtcttccaacctttcccgagctggtctcaagctcctgggctgaagtgatcctcctgcctcagcctctcaaagtgctggtattataggcataagccaccacgccctgcccatttttctaagttggattattttacactccagtctgctgtgaatgagagttccagttgttgcgtatcgcaatcaatttgtgattgcctacaaatgatgtgccgtgatgaaattgtccctggtgtccgagaggatcgcaaagaatttcccttcctttctctcctttctgctccccttgtactgtctactccttaaactggtacttgatccaggaacataatggggatggacagtgcagatggcacacatggcctcagtctattggagcatctcaaaggaattagtctgcaaattctagtgcatctaggtggagcacaggaaggaagagaggtgcagactcacgtatggccctggggcacctgccatcctctcgcacccgtacagcccttacctgccagcacttaccctacccagcttgagttctgggccttctcaccagcacatcgctgggacctggtcgacttcaggtaagtttatttcatggctccctcccccacgacctgcacatgccatatgttccttcccagccccatgtcacttgaaatgttctatcatgtccaagacttctctcctcatcctaaagtgcagaaaataaggatggagaagagaaggagaagagaatcaagagagattcattgagagggaggatcagaagctcctgggcaccccatactgtagaataaaaatattcattatggtgtttttcttgcaaaatattcccctctacataattatgtttttacatgaataatataaatttaaacaggagaaatactttttgaagagtctgagaatcttcataaagttcaggcggccacgaattagctgtgtgacctggggcatgccccttagactctgagcctcagcttctctgtatgtaaaatgggttgaagccgcccttccccacaagcaccctgtgcacaggcaatgcccagccccattattttctggactccgtggccaagcatgcttaggacacacagccacatacttctgggcagtgtcatctggcaacttgctgtcatgtcagtgtggtcaagcattgtagacctctatgaaccaaatatgcttcaggcttgggttgagcacaggagagggaggagggaaaggtcactggggctgggagtgcctacttccctctgtgagtgtcaccccagtccacccagtaccatacctttctctctctggacccacttccttttgctgccggctcctccccattgaataacagccaagttgctttggtttctatttctttgttaagtcgttccctctacaaaggacttcctagtgggtgtgaaaggcagcggtggccacagaggcggcggagagatggccttcagcggttcccaggctccctacctgagtccagctgtccccttttctgggactattcaaggaggtctccaggacggacttcagatcactgtcaatgggaccgttctcagctccagtggaaccaggtttgctgtgaactttcagactggcttcagtggaaatgacattgccttccacttcaaccctcggtttgaagatggagggtacgtggtgtgcaacacgaggcagaacggaagctgggggcccgaggagaggaagacacacatgcctttccagaaggggatgccctttgacctctgcttcctggtgcagagctcagatttcaaggtgatggtgaacgggatcctcttcgtgcagtacttccaccgcgtgcccttccaccgtgtggacaccatctccgtcaatggctctgtgcagctgtcctacatcagcttccagaacccccgcacagtccctgttcagcctgccttctccacggtgccgttctcccagcctgtctgtttcccacccaggcccagggggcgcagacaaaaacctcccggcgtgtggcctgccaacccggctcccattacccagacagtcatccacacagtgcagagcgcccctggacagatgttctctactcccgccatcccacctatgatgtacccccaccccgcctatccgatgcctttcatcaccaccattctgggagggctgtacccatccaagtccatcctcctgtcaggcactgtcctgcccagtgctcagaggttccacatcaacctgtgctctgggaaccacatcgccttccacctgaacccccgttttgatgagaatgctgtggtccgcaacacccagatcgacaactcctgggggtctgaggagcgaagtctgccccgaaaaatgcccttcgtccgtggccagagcttctcagtgtggatcttgtgtgaagctcactgcctcaaggtggccgtggatggtcagcacctgtttgaatactaccatcgcctgaggaacctgcccaccatcaacagactggaagtggggggcgacatccagctgacccatgtgcagacataggcggcttcctggccctggggccgggggctggggtgtggggcagtctgggtcctctcatcatccccacttcccaggcccagcctttccaaccctgcctgggatctgggctttaatgcagaggccatgtccttgtctggtcctgcttctggctacagccaccctggaacggagaaggcagctgacggggattgccttcctcagccgcagcagcacctggggctccagctgctggaatcctaccatcccaggaggcaggcacagccagggagaggggaggagtgggcagtgaagatgaagccccatgctcagtcccctcccatcccccacgcagctccaccccagtcccaagccaccagctgtctgctcctggtgggaggtggcctcctcagcccctcctctctgacctttaacctcactctcaccttgcaccgtgcaccaacccttcacccctcctggaaagcaggcctgatggcttcccactggcctccaccacctgaccagagtgttctcttcagaggactggctcctttcccagtgtccttaaaataaagaaatgaaaatgcttgttggcacattca

SEQ ID NO: 147716 - DNA, 598 bp, Homo sapiens
  Payload ID: 9223
  Gene Symbol: LGALS9
  Gene Name: lectin, galactoside-binding, soluble, 9
  ENST ID: ENST00000577392
  CDS Start-End: 74-598
ttaagtcgttccctctacaaaggacttcctagtgggtgtgaaaggcagcggtggccacagaggcggcggagagatggccttcagcggttcccaggctccctacctgagtccagctgtccccttttctgggactattcaaggaggtctccaggacggacttcagatcactgtcaatgggaccgttctcagctccagtggaaccaggtttgctgtgaactttcagactggcttcagtggaaatgacattgccttccacttcaaccctcggtttgaagatggagggtacgtggtgtgcaacacgaggcagaacggaagctgggggcccgaggagaggaagacacacatgcctttccagaaggggatgccctttgacctctgcttcctggtgcagagctcagatttcaaggtgatggtgaacgggatcctcttcgtgcagtacttccaccgcgtgcccttccaccgtgtggacaccatctccgtcaatggctctgtgcagctgtcctacatcagcttccagccgatgcctttcatcaccaccattctgggagggctgtacccatccaagtccatcctcctgtcaggcactgtcctgcccagt

SEQ ID NO: 147717 - DNA, 754 bp, Homo sapiens
  Payload ID: 9223
  Gene Symbol: LGALS9
  Gene Name: lectin, galactoside-binding, soluble, 9
  ENST ID: ENST00000581710
  CDS Start-End: 1-412
ctttgacctctgcttcctggtgcagagctcagatttcaaggtgatggtgaacgggatcctcttcgtgcagtacttccaccgcgtgcccttccaccgtgtggacaccatctccgtcaatggctctgtgcagctgtcctacatcagcttccagacccagacagtcatccacacagtgcagagcgcccctggacagatgttctctactcccgccatcccacctatgatgtacccccaccccgcctatccgatgcctttcatcaccaccattctgggagggctgtacccatccaagtccatcctcctgtcaggcactgtcctgcccagtgctcagaggtgtggatcttgtgtgaagctcactgcctcaaggtggccgtggatggtcagcacctgtttgaatactaccatcgcctgaggaacctgcccaccatcaacagactggaagtggggggcgacatccagctgacccatgtgcagacataggcggcttcctggccctggggccgggggctggggtgtggggcagtctgggtcctctcatcatccccacttcccaggcccagcctttccaaccctgcctgggatctgggctttaatgcagaggccatgtccttgtctggtcctgcttctggctacagccaccctggaacggagaaggcagctgacggggattgccttcctcagccgcagcagcacctggggctccagctgctggaatcctaccatcccaggaggcaggcacagccagggagagggg

SEQ ID NO: 147718 - DNA, 1512 bp, Homo sapiens
  Payload ID: 9223
  Gene Symbol: LGALS9
  Gene Name: lectin, galactoside-binding, soluble, 9
  ENST ID: ENST00000467111
  CDS Start-End: 53-280
ggacttcctagtgggtgtgaaaggcagcggtggccacagaggcggcggagagatggccttcagcggttcccaggctccctacctgagtccagctgtccccttttctgggactattcaaggaggtctccaggacggacttcagatcactgtcaatgggaccgttctcagctccagtggaaccagatggagggtacgtggtgtgcaacacgaggcagaacggaagctgggggcccgaggagaggaagacacacatgcctttccagaaggggatgccctttgacctctgcttcctggtgcagagctcagatttcaaggtgatggtgaacgggatcctcttcgtgcagtacttccaccgcgtgcccttccaccgtgtggacaccatctccgtcaatggctctgtgcagctgtcctacatcagcttccagcctcccggcgtgtggcctgccaacccggctcccattacccagacagtcatccacacagtgcagagcgcccctggacagatgttctctactcccgccatcccacctatgatgtacccccaccccgcctatccgatgcctttcatcaccaccattctgggagggctgtacccatccaagtccatcctcctgtcaggcactgtcctgcccagtgctcagaggttccacatcaacctgtgctctgggaaccacatcgccttccacctgaacccccgttttgatgagaatgctgtggtccgcaacacccagatcgacaactcctgggggtctgaggagcgaagtctgccccgaaaaatgcccttcgtccgtggccagagcttctcagtgtggatcttgtgtgaagctcactgcctcaaggtggccgtggatggtcagcacctgtttgaatactaccatcgcctgaggaacctgcccaccatcaacagactggaagtggggggcgacatccagctgacccatgtgcagacataggcggcttcctggccctggggccgggggctggggtgtggggcagtctgggtcctctcatcatccccacttcccaggcccagcctttccaaccctgcctgggatctgggctttaatgcagaggccatgtccttgtctggtcctgcttctggctacagccaccctggaacggagaaggcagctgacggggattgccttcctcagccgcagcagcacctggggctccagctgctggaatcctaccatcccaggaggcaggcacagccagggagaggggaggagtgggcagtgaagatgaagccccatgctcagtcccctcccatcccccacgcagctccaccccagtcccaagccaccagctgtctgctcctggtgggaggtggcctcctcagcccctcctctctgacctttaacctcactctcaccttgcaccgtgcaccaacccttcacccctcctggaaagcaggcctgatggcttcccactggcctccaccacctgaccagagtgttctcttcagaggactggctcctttcccagtgtccttaaaataaagaaatgaaa

SEQ ID NO: 147719 - DNA, 851 bp, Homo sapiens
  Payload ID: 9223
  Gene Symbol: LGALS9
  Gene Name: lectin, galactoside-binding, soluble, 9
  ENST ID: ENST00000580779
  CDS Start-End: 100-327
aagttgctttggtttctatttctttgttaagtcgttccctctacaaaggacttcctagtgggtgtgaaaggcagcggtggccacagaggcggcggagagatggccttcagcggttcccaggctccctacctgagtccagctgtccccttttctgggactattcaaggaggtctccaggacggacttcagatcactgtcaatgggaccgttctcagctccagtggaaccagatggagggtacgtggtgtgcaacacgaggcagaacggaagctgggggcccgaggagaggaagacacacatgcctttccagaaggggatgccctttgacctctgcttcctggtgcagagctcagatttcaaggtgatggtgaacgggatcctcttcgtgcagtacttccaccgcgtgcccttccaccgtgtggacaccatctccgtcaatggctctgtgcagctgtcctacatcagcttccagaacccccgcacagtccctgttcagcctgccttctccacggtgccgttctcccagcctgtctgtttcccacccaggcccagggggcgcagacaaaaacctcccggcgtgtggcctgccaacccggctcccattacccagacagtcatccacacagtgcagagcgcccctggacagatgttctctactcccgccatcccacctatgatgtacccccaccccgcctatccgatgcctttcatcaccaccattctgggagggctgtacccatccaagtccatcctcctgtcaggcactgtcctgcccagtgctcagaggttccacatcaacctgtgctctgggaaccacatcgccttccacctgaacccccgttttgatgaga

SEQ ID NO: 147720 - DNA, 377 bp, Homo sapiens
  Payload ID: 9223
  Gene Symbol: LGALS9
  Gene Name: lectin, galactoside-binding, soluble, 9
  ENST ID: ENST00000578944
  CDS Start-End: 1-377
cctgttcagcctgccttctccacggtgccgttctcccagcctgtctgtttcccacccaggcccagggggcgcagacaaaaaacccagacagtcatccacacagtgcagagcgcccctggacagatgttctctactcccgccatcccacctatgatgtacccccaccccgcctatccgatgcctttcatcaccaccattctgggagggctgtacccatccaagtccatcctcctgtcaggcactgtcctgcccagtgctcagaggttccacatcaacctgtgctctgggaaccacatcgccttccacctgaacccccgttttgatgagaatgctgtggtccgcaacacccagatcgacaactcctgggggtctgagga

SEQ ID NO: 147721 - DNA, 594 bp, Homo sapiens
  Payload ID: 9223
  Gene Symbol: LGALS9
  Gene Name: lectin, galactoside-binding, soluble, 9
  ENST ID: ENST00000584661
  CDS Start-End: 250-594
aagtcgttccctctacaaaggacttcctagtgggtgtgaaaggcagcggtggccacagaggcggcggagagatggccttcagcggttcccaggctccctacctgagtccagtttgctgtgaactttcagactggcttcagtggaaatgacattgccttccacttcaaccctcggtttgaagatggagggtacgtggtgtgcaacacgaggcagaacggaagctgggggcccgaggagaggaagacacacatgcctttccagaaggggatgccctttgacctctgcttcctggtgcagagctcagatttcaaggtgatggtgaacgggatcctcttcgtgcagtacttccaccgcgtgcccttccaccgtgtggacaccatctccgtcaatggctctgtgcagctgtcctacatcagcttccagaacccccgcacagtccctgttcagcctgccttctccacggtgccgttctcccagcctgtctgtttcccacccaggcccagggggcgcagacaaaaacctcccggcgtgtggcctgccaacccggctcccattacccagacagtcatccacacagtgcagagcgcccctgga

SEQ ID NO: 147722 - DNA, 1243 bp, Homo sapiens
  Payload ID: 9224
  Gene Symbol: LGALS9B
  Gene Name: lectin, galactoside-binding, soluble, 9B
  Uniprot ID: Q3B8N2
  ENST ID: ENST00000324290
  CDS Start-End: 66-1133
cattccttctgcaaaggactgcctggcaggtgtgaaaggcagcggtggccacagaggcggtggagatggccttcagcggttcccaggctccctatctgagcccagccgtccccttttctgggactatccaagggggtctccaggacggatttcagatcactgtcaatggggccgttctcagctccagtggaaccaggtttgctgtggactttcagacgggcttcagtggaaacgacattgccttccacttcaaccctcggtttgaagacggagggtatgtggtgtgcaacacgaggcagaaaggaagatgggggcccgaggagaggaagatgcacatgcccttccagaaggggatgccctttgacctctgcttcctggtgcagagctcagatttcaaggtgatggtgaacgggagcctcttcgtgcagtacttccaccgcgtgcccttccaccgtgtggacaccatctccgtcaatggctctgtgcagctgtcctacatcagcttccagaatccccgcacagtccccgttcagcctgccttctccacggtgccgttctcccagcctgtctgtttcccacccaggcccagggggcgcagacaaaaacctcccagcgtgcggcctgccaacccagctcccattacccagacagtcatccacacggtgcagagcgcctctggacagatgttctctactcccgccatcccacctatgatgtacccccaccctgcctatccgatgcctttcatcaccaccattccgggagggctgtacccatccaagtccatcatcctgtcaggcactgtcctgcccagtgctcagaggttccacatcaacctgtgctctgggagccacatcgccttccacatgaacccccgttttgatgagaatgctgtggtccgtaacacccagatcaacaactcttgggggtctgaggagcgaagtctgccccgaaaaatgcccttcgtccgaggccagagcttctcggtgtggatcttgtgtgaagctcactgcctcaaggtggccgtggatggtcagcacgtgtttgaatactaccatcgcctgaggaacctgcccaccatcaacaaactggaagtgggtggcgacatccagctgacccacgtgcagacataggcggctccctggccctggggccgggggctggggtgtggggcagtcggggtcctctcatcatccccacttcccaggcccagcctttccaaccgtgcctgggatctgggctt

SEQ ID NO: 147723 - DNA, 1713 bp, Homo sapiens
  Payload ID: 9224
  Gene Symbol: LGALS9B
  Gene Name: lectin, galactoside-binding, soluble, 9B
  Uniprot ID: Q3B8N2
  ENST ID: ENST00000423676
  CDS Start-End: 65-1135
attccttctgcaaaggactgcctggcaggtgtgaaaggcagcggtggccacagaggcggtggagatggccttcagcggttcccaggctccctatctgagcccagccgtccccttttctgggactatccaagggggtctccaggacggatttcagatcactgtcaatggggccgttctcagctccagtggaaccaggtttgctgtggactttcagacgggcttcagtggaaacgacattgccttccacttcaaccctcggtttgaagacggagggtatgtggtgtgcaacacgaggcagaaaggaagatgggggcccgaggagaggaagatgcacatgcccttccagaaggggatgccctttgacctctgcttcctggtgcagagctcagatttcaaggtgatggtgaacgggagcctcttcgtgcagtacttccaccgcgtgcccttccaccgtgtggacaccatctccgtcaatggctctgtgcagctgtcctacatcagcttccagaatccccgcacagtccccgttcagcctgccttctccacggtgccgttctcccagcctgtctgtttcccacccaggcccagggggcgcagacaaaaacctcccagcgtgcggcctgccaacccagctcccattacccagacagtcatccacacggtgcagagcgcctctggacagatgttctctcagactcccgccatcccacctatgatgtacccccaccctgcctatccgatgcctttcatcaccaccattccgggagggctgtacccatccaagtccatcatcctgtcaggcactgtcctgcccagtgctcagaggttccacatcaacctgtgctctgggagccacatcgccttccacatgaacccccgttttgatgagaatgctgtggtccgtaacacccagatcaacaactcttgggggtctgaggagcgaagtctgccccgaaaaatgcccttcgtccgaggccagagcttctcggtgtggatcttgtgtgaagctcactgcctcaaggtggccgtggatggtcagcacgtgtttgaatactaccatcgcctgaggaacctgcccaccatcaacaaactggaagtgggtggcgacatccagctgacccacgtgcagacataggcggctccctggccctggggccgggggctggggtgtggggcagtcggggtcctctcatcatccccacttcccaggcccagcctttccaaccgtgcctgggatctgggctttaatgcagaggccatgtccttatctggtcctgcttctggctacagccaccctggaattgagaaggcagctgactgggattgtcttcctcagccgcagcagcacctggggcgccagctgctggaatcctacaatcccagaaggcgggcacagccagggagaggggaggagcgggcagtgaagatgaagccccatgctcagtcccctcccatcccccacgcagctccaccccagtctcaagccaccagctgtctgctcctggtgggagatggcctcctcagcccctcctctctgacctttaacctcactctcaccttgcaccctgcaccaacccttcacccctcctggaaagcaggtctgatggcttcccactggcctccaccaactgaccagagtgttctcttcaggggactggctcctttcccagtgtccttaaaataaagaaatgaaaatgcttgttggcacattca

SEQ ID NO: 147724 - DNA, 375 bp, Homo sapiens
  Payload ID: 9224
  Gene Symbol: LGALS9B
  Gene Name: lectin, galactoside-binding, soluble, 9B
  ENST ID: ENST00000584703
  CDS Start-End: 1-156
gagaggaagatgcacatgcccttccagaaggggatgccctttgacctctgcttcctggtgcagagctcagatttcaaggaacatggatggagctggaagccgttgcaggagcagaaaaccaaacaccgcaagttctcacttataagtaggagctgaacgatgagaacacatggacacaagtggggaaacaacacacactggggcctggtcggggacggagagcatcaggaagattagctaatggatgctgggcttgataccaaggtgatggtgaacgggagcctcttcgtgcagtacttccaccgcgtgcccttccaccgtgtggacaccatctccgtcaatggctctgtgcagctgtcctacatcagcttccag

SEQ ID NO: 147725 - DNA, 1115 bp, Homo sapiens
  Payload ID: 9224
  Gene Symbol: LGALS9B
  Gene Name: lectin, galactoside-binding, soluble, 9B
  ENST ID: ENST00000578481
  CDS Start-End: 70-177
aagtcattccttctgcaaaggactgcctggcaggtgtgaaaggcagcggtggccacagaggcggtggagatggccttcagcggttcccaggctccctatctgagcccagtttgctgtggactttcagacgggcttcagtggaaacgacattgccttccacttcaaccctcggtttgaagacggagggtatgtggtgtgcaacacgaggcagaaaggaagatgggggcccgaggagaggaagatgcacatgcccttccagaaggggatgccctttgacctctgcttcctggtgcagagctcagatttcaaggtgatggtgaacgggagcctcttcgtgcagtacttccaccgcgtgcccttccaccgtgtggacaccatctccgtcaatggctctgtgcagctgtcctacatcagcttccagaatccccgcacagtccccgttcagcctgccttctccacggtgccgttctcccagcctgtctgtttcccacccaggcccagggggcgcagacaaaaacctcccagcgtgcggcctgccaacccagctcccattacccagacagtcatccacacggtgcagagcgcctctggacagatgttctctcagactcccgccatcccacctatgatgtacccccaccctgcctatccgatgcctttcatcaccaccattccgggagggctgtacccatccaagtccatcatcctgtcaggcactgtcctgcccagtgctcagaggttccacatcaacctgtgctctgggagccacatcgccttccacatgaacccccgttttgatgagaatgctgtggtccgtaacacccagatcaacaactcttgggggtctgaggagcgaagtctgccccgaaaaatgcccttcgtccgaggccagagcttctcggtgtggatcttgtgtgaagctcactgcctcaaggtggccgtggatggtcagcacgtgtttgaatactaccatcgcctgaggaacctgcccaccatcaacaaactggaagtgggtggcgacatccagctgacccacgtgcagacataggcggctccctggccctggggccgggggctggggtgtggggcagtcggggtcctctcatcatccccac

SEQ ID NO: 147726 - DNA, 1730 bp, Homo sapiens
  Payload ID: 9225
  Gene Symbol: LGALS9C
  Gene Name: lectin, galactoside-binding, soluble, 9C
  Uniprot ID: Q6DKI2
  ENST ID: ENST00000328114
  CDS Start-End: 82-1152
ttactttgttaagtcattccttctgcaaaggactgcctggcaggtgtcaaaggcagtggtggccacagaggcggtggagagatggccttcagcggttgccaggctccctatctgagcccagccgtccccttttctgggactatccaagggggtctccaggacggatttcagatcactgtcaatggggccgttctcagctgcagtggaaccaggtttgctgtggactttcagacgggcttcagtggaaacgacattgccttccacttcaaccctcggtttgaagacggagggtatgtggtgtgcaacacgaggcagaaaggaacatgggggcccgaggagaggaagatgcacatgcccttccagaaggggatgccctttgacctctgcttcctggtgcagagctcagatttcaaggtgatggtgaacgggagcctcttcgtgcagtacttccaccgcgtgcccttccaccgtgtggacaccatctccgtcaatggctctgtgcagctgtcctacatcagcttccagaatccccgcgcagtccccgttcagcctgccttctccacggtgccgttctcccagcctgtctgtttcccacccaggcccagggggcgcagacaaaaacctcccagcgtgcggcctgccaacccagctcccattacccagacagtcatccacacggtgcagagtgcctctggacagatgttctctcagactcccgccatcccacctatgatgtacccccaccctgcctatccgatgcctttcatcaccaccattccgggagggctgtacccatccaagtccatcatcctgtcaggcactgtcctgcccagtgctcagaggttccacatcaacctgtgctctgggagccacatcgccttccacatgaacccccgttttgatgagaatgctgtggtccgtaacacccagatcaacaactcttgggggtctgaggagcgaagtctgccccgaaaaatgcccttcgtccgaggccagagcttctcggtgtggatcttgtgtgaagctcactgcctcaaggtggccgtggatggtcagcacgtgtttgaatactaccatcgcctgaggaacctgcccaccatcaacaaactggaagtgggtggcgacatccagctgacccacgtgcagacataggcggctccctggccctggggccgggggctggggtgtggggcagtctgggtcctctcatcatccccacttcccaggcccagcctttccaaccgtgcctgggatctgggctttaatgcagaggccatgtccttatctggtcctgcttctggctacagccaccctggaatcgagaaggcagctgactgggattgccttcctcagccgcagcagcacctggggcgccagctgctggaatcctacaatcccagaaggcgggcacagccagggagaggggaggagtgggcagtgaagatgaagccccatgctcagtcccctcccatcccccacgcagctccaccccagtctcaagccaccagctgtctgctcctggtgggagatggcctcctcagcccctcctctctgacctttaacctcactctcaccttgcaccctgcaccaacccttcacccctcctggaaagcaggcctgatggcttcccactggcctccaccaactgaccagagtgttctcttcaggggactggctcctttcccagtgtccttaaaataaagaaatgaaaatgcttgttggcacattca

SEQ ID NO: 147727 - DNA, 1515 bp, Homo sapiens
  Payload ID: 9225
  Gene Symbol: LGALS9C
  Gene Name: lectin, galactoside-binding, soluble, 9C
  ENST ID: ENST00000580674
  CDS Start-End: 56-283
aaaggactgcctggcaggtgtcaaaggcagtggtggccacagaggcggtggagagatggccttcagcggttgccaggctccctatctgagcccagccgtccccttttctgggactatccaagggggtctccaggacggatttcagatcactgtcaatggggccgttctcagctgcagtggaaccagacggagggtatgtggtgtgcaacacgaggcagaaaggaacatgggggcccgaggagaggaagatgcacatgcccttccagaaggggatgccctttgacctctgcttcctggtgcagagctcagatttcaaggtgatggtgaacgggagcctcttcgtgcagtacttccaccgcgtgcccttccaccgtgtggacaccatctccgtcaatggctctgtgcagctgtcctacatcagcttccagcctcccagcgtgcggcctgccaacccagctcccattacccagacagtcatccacacggtgcagagtgcctctggacagatgttctctactcccgccatcccacctatgatgtacccccaccctgcctatccgatgcctttcatcaccaccattccgggagggctgtacccatccaagtccatcatcctgtcaggcactgtcctgcccagtgctcagaggttccacatcaacctgtgctctgggagccacatcgccttccacatgaacccccgttttgatgagaatgctgtggtccgtaacacccagatcaacaactcttgggggtctgaggagcgaagtctgccccgaaaaatgcccttcgtccgaggccagagcttctcggtgtggatcttgtgtgaagctcactgcctcaaggtggccgtggatggtcagcacgtgtttgaatactaccatcgcctgaggaacctgcccaccatcaacaaactggaagtgggtggcgacatccagctgacccacgtgcagacataggcggctccctggccctggggccgggggctggggtgtggggcagtctgggtcctctcatcatccccacttcccaggcccagcctttccaaccgtgcctgggatctgggctttaatgcagaggccatgtccttatctggtcctgcttctggctacagccaccctggaatcgagaaggcagctgactgggattgccttcctcagccgcagcagcacctggggcgccagctgctggaatcctacaatcccagaaggcgggcacagccagggagaggggaggagtgggcagtgaagatgaagccccatgctcagtcccctcccatcccccacgcagctccaccccagtctcaagccaccagctgtctgctcctggtgggagatggcctcctcagcccctcctctctgacctttaacctcactctcaccttgcaccctgcaccaacccttcacccctcctggaaagcaggcctgatggcttcccactggcctccaccaactgaccagagtgttctcttcaggggactggctcctttcccagtgtccttaaaataaagaaatgaaa

SEQ ID NO: 147728 - DNA, 381 bp, Homo sapiens
  Payload ID: 9225
  Gene Symbol: LGALS9C
  Gene Name: lectin, galactoside-binding, soluble, 9C
  ENST ID: ENST00000578563
  CDS Start-End: 1-162
cccgaggagaggaagatgcacatgcccttccagaaggggatgccctttgacctctgcttcctggtgcagagctcagatttcaaggaacatggatggagctggaagccgttgcaggagcagaaaaccaaacaccgcaagttctcacttataagtaggagctgaacgatgagaacacatggacacaagcggggaaacaacacacactggggcctggtcggggacggagagcatcaggaagattagctaatggatgctgggcttgataccaaggtgatggtgaacgggagcctcttcgtgcagtacttccaccgcgtgcccttccaccgtgtggacaccatctccgtcaatggctctgtgcagctgtcctacatcagcttccag

SEQ ID NO: 147729 - DNA, 1602 bp, Homo sapiens
  Payload ID: 9225
  Gene Symbol: LGALS9C
  Gene Name: lectin, galactoside-binding, soluble, 9C
  ENST ID: ENST00000583322
  CDS Start-End: 60-1031
ctgcaaaggactgcctggcaggtgtcaaaggcagtggtggccacagaggcggtggagagatggccttcagcggttgccaggctccctatctgagcccagccgtccccttttctgggactatccaagggggtctccaggacggatttcagatcactgtcaatggggccgttctcagctgcagtggaaccaggtttgctgtggactttcagacgggcttcagtggaaacgacattgccttccacttcaaccctcggtttgaagacggagggtatgtggtgtgcaacacgaggcagaaaggaacatgggggcccgaggagaggaagatgcacatgcccttccagaaggggatgccctttgacctctgcttcctggtgcagagctcagatttcaaggtgatggtgaacgggagcctcttcgtgcagtacttccaccgcgtgcccttccaccgtgtggacaccatctccgtcaatggctctgtgcagctgtcctacatcagcttccagcctcccagcgtgcggcctgccaacccagctcccattacccagacagtcatccacacggtgcagagtgcctctggacagatgttctctactcccgccatcccacctatgatgtacccccaccctgcctatccgatgcctttcatcaccaccattccgggagggctgtacccatccaagtccatcatcctgtcaggcactgtcctgcccagtgctcagaggttccacatcaacctgtgctctgggagccacatcgccttccacatgaacccccgttttgatgagaatgctgtggtccgtaacacccagatcaacaactcttgggggtctgaggagcgaagtctgccccgaaaaatgcccttcgtccgaggccagagcttctcggtgtggatcttgtgtgaagctcactgcctcaaggtggccgtggatggtcagcacgtgtttgaatactaccatcgcctgaggaacctgcccaccatcaacaaactggaagtgggtggcgacatccagctgacccacgtgcagacataggcggctccctggccctggggccgggggctggggtgtggggcagtctgggtcctctcatcatccccacttcccaggcccagcctttccaaccgtgcctgggatctgggctttaatgcagaggccatgtccttatctggtcctgcttctggctacagccaccctggaatcgagaaggcagctgactgggattgccttcctcagccgcagcagcacctggggcgccagctgctggaatcctacaatcccagaaggcgggcacagccagggagaggggaggagtgggcagtgaagatgaagccccatgctcagtcccctcccatcccccacgcagctccaccccagtctcaagccaccagctgtctgctcctggtgggagatggcctcctcagcccctcctctctgacctttaacctcactctcaccttgcaccctgcaccaacccttcacccctcctggaaagcaggcctgatggcttcccactggcctccaccaactgaccagagtgttctcttcaggggactggctcctttcccagtgtccttaaaataaagaaatgaaaatgcttgttggc

SEQ ID NO: 147730 - DNA, 1104 bp, Homo sapiens
  Payload ID: 9225
  Gene Symbol: LGALS9C
  Gene Name: lectin, galactoside-binding, soluble, 9C
  ENST ID: ENST00000584941
  CDS Start-End: 58-762
gcaaaggactgcctggcaggtgtcaaaggcagtggtggccacagaggcggtggagagatggccttcagcggttgccaggctccctatctgagcccagccgtccccttttctgggactatccaagggggtctccaggacggatttcagatcactgtcaatggggccgttctcagctgcagtggaaccaggtttgctgtggactttcagacgggcttcagtggaaacgacattgccttccacttcaaccctcggtttgaagacggagggtatgtggtgtgcaacacgaggcagaaaggaacatgggggcccgaggagaggaagatgcacatgcccttccagaaggggatgccctttgacctctgcttcctggtgcagagctcagatttcaaggtgatggtgaacgggagcctcttcgtgcagtacttccaccgcgtgcccttccaccgtgtggacaccatctccgtcaatggctctgtgcagctgtcctacatcagcttccagacccagacagtcatccacacggtgcagagtgcctctggacagatgttctctactcccgccatcccacctatgatgtacccccaccctgcctatccgatgcctttcatcaccaccattccgggagggctgtacccatccaagtccatcatcctgtcaggcactgtcctgcccagtgctcagaggtgtggatcttgtgtgaagctcactgcctcaaggtggccgtggatggtcagcacgtgtttgaatactaccatcgcctgaggaacctgcccaccatcaacaaactggaagtgggtggcgacatccagctgacccacgtgcagacataggcggctccctggccctggggccgggggctggggtgtggggcagtctgggtcctctcatcatccccacttcccaggcccagcctttccaaccgtgcctgggatctgggctttaatgcagaggccatgtccttatctggtcctgcttctggctacagccaccctggaatcgagaaggcagctgactgggattgccttcctcagccgcagcagcacctggggcgccagctgctggaatcctacaatcccagaaggcgggcacagccagggagagggg

SEQ ID NO: 147731 - DNA, 1506 bp, Homo sapiens
  Payload ID: 9225
  Gene Symbol: LGALS9C
  Gene Name: lectin, galactoside-binding, soluble, 9C
  ENST ID: ENST00000577691
  CDS Start-End: 100-327
aagttgctttggtttctattactttgttaagtcattccttctgcaaaggactgcctggcaggtgtcaaaggcagtggtggccacagaggcggtggagagatggccttcagcggttgccaggctccctatctgagcccagccgtccccttttctgggactatccaagggggtctccaggacggatttcagatcactgtcaatggggccgttctcagctgcagtggaaccagacggagggtatgtggtgtgcaacacgaggcagaaaggaacatgggggcccgaggagaggaagatgcacatgcccttccagaaggggatgccctttgacctctgcttcctggtgcagagctcagatttcaaggtgatggtgaacgggagcctcttcgtgcagtacttccaccgcgtgcccttccaccgtgtggacaccatctccgtcaatggctctgtgcagctgtcctacatcagcttccagaatccccgcgcagtccccgttcagcctgccttctccacggtgccgttctcccagcctgtctgtttcccacccaggcccagggggcgcagacaaaaacctcccagcgtgcggcctgccaacccagctcccattacccagacagtcatccacacggtgcagagtgcctctggacagatgttctctactcccgccatcccacctatgatgtacccccaccctgcctatccgatgcctttcatcaccaccattccgggagggctgtacccatccaagtccatcatcctgtcaggcactgtcctgcccagtgctcagaggtgtggatcttgtgtgaagctcactgcctcaaggtggccgtggatggtcagcacgtgtttgaatactaccatcgcctgaggaacctgcccaccatcaacaaactggaagtgggtggcgacatccagctgacccacgtgcagacataggcggctccctggccctggggccgggggctggggtgtggggcagtctgggtcctctcatcatccccacttcccaggcccagcctttccaaccgtgcctgggatctgggctttaatgcagaggccatgtccttatctggtcctgcttctggctacagccaccctggaatcgagaaggcagctgactgggattgccttcctcagccgcagcagcacctggggcgccagctgctggaatcctacaatcccagaaggcgggcacagccagggagaggggaggagtgggcagtgaagatgaagccccatgctcagtcccctcccatcccccacgcagctccaccccagtctcaagccaccagctgtctgctcctggtgggagatggcctcctcagcccctcctctctgacctttaacctcactctcaccttgcaccctgcaccaacccttcacccctcctggaaagcaggcctgatggcttcccactggcctccaccaactgaccagagtgttctcttcaggggactggctcctttcccagtgtccttaaaataaagaaatgaaaatgcttgttggcac

SEQ ID NO: 147732 - DNA, 1117 bp, Homo sapiens
  Payload ID: 9225
  Gene Symbol: LGALS9C
  Gene Name: lectin, galactoside-binding, soluble, 9C
  ENST ID: ENST00000579773
  CDS Start-End: 72-179
aagtcattccttctgcaaaggactgcctggcaggtgtcaaaggcagtggtggccacagaggcggtggagagatggccttcagcggttgccaggctccctatctgagcccagtttgctgtggactttcagacgggcttcagtggaaacgacattgccttccacttcaaccctcggtttgaagacggagggtatgtggtgtgcaacacgaggcagaaaggaacatgggggcccgaggagaggaagatgcacatgcccttccagaaggggatgccctttgacctctgcttcctggtgcagagctcagatttcaaggtgatggtgaacgggagcctcttcgtgcagtacttccaccgcgtgcccttccaccgtgtggacaccatctccgtcaatggctctgtgcagctgtcctacatcagcttccagaatccccgcgcagtccccgttcagcctgccttctccacggtgccgttctcccagcctgtctgtttcccacccaggcccagggggcgcagacaaaaacctcccagcgtgcggcctgccaacccagctcccattacccagacagtcatccacacggtgcagagtgcctctggacagatgttctctcagactcccgccatcccacctatgatgtacccccaccctgcctatccgatgcctttcatcaccaccattccgggagggctgtacccatccaagtccatcatcctgtcaggcactgtcctgcccagtgctcagaggttccacatcaacctgtgctctgggagccacatcgccttccacatgaacccccgttttgatgagaatgctgtggtccgtaacacccagatcaacaactcttgggggtctgaggagcgaagtctgccccgaaaaatgcccttcgtccgaggccagagcttctcggtgtggatcttgtgtgaagctcactgcctcaaggtggccgtggatggtcagcacgtgtttgaatactaccatcgcctgaggaacctgcccaccatcaacaaactggaagtgggtggcgacatccagctgacccacgtgcagacataggcggctccctggccctggggccgggggctggggtgtggggcagtctgggtcctctcatcatccccac

SEQ ID NO: 147733 - DNA, 1378 bp, Homo sapiens
  Payload ID: 9225
  Gene Symbol: LGALS9C
  Gene Name: lectin, galactoside-binding, soluble, 9C
  ENST ID: ENST00000581545
  CDS Start-End: 119-859
tccccattgaataacagccaagttgctttggtttctattactttgttaagtcattccttctgcaaaggactgcctggcaggtgtcaaaggcagtggtggccacagaggcggtggagagatggccttcagcggttgccaggctccctatctgagcccagccgtccccttttctgggactatccaagggggtctccaggacggatttcagatcactgtcaatggggccgttctcagctgcagtggaaccaggtttgctgtggactttcagacgggcttcagtggaaacgacattgccttccacttcaaccctcggtttgaagacggagggtatgtggtgtgcaacacgaggcagaaaggaacatgggggcccgaggagaggaagatgcacatgcccttccagaaggggatgccctttgacctctgcttcctggtgcagagctcagatttcaaggtgatggtgaacgggagcctcttcgtgcagtacttccaccgcgtgcccttccaccgtgtggacaccatctccgtcaatggctctgtgcagctgtcctacatcagcttccagcctcccagcgtgcggcctgccaacccagctcccattacccagacagtcatccacacggtgcagagtgcctctggacagatgttctctactcccgccatcccacctatgatgtacccccaccctgcctatccgatgcctttcatcaccaccattccgggagggctgtacccatccaagtccatcatcctgtcaggcactgtcctgcccagtgctcagaggtgtggatcttgtgtgaagctcactgcctcaaggtggccgtggatggtcagcacgtgtttgaatactaccatcgcctgaggaacctgcccaccatcaacaaactggaagtgggtggcgacatccagctgacccacgtgcagacataggcggctccctggccctggggccgggggctggggtgtggggcagtctgggtcctctcatcatccccacttcccaggcccagcctttccaaccgtgcctgggatctgggctttaatgcagaggccatgtccttatctggtcctgcttctggctacagccaccctggaatcgagaaggcagctgactgggattgccttcctcagccgcagcagcacctggggcgccagctgctggaatcctacaatcccagaaggcgggcacagccagggagaggggaggagtgggcagtgaagatgaagccccatgctcagtcccctcccatcccccacgcagctccaccccagtctcaagccaccagctgtctgctcctggtgggagatggcctcctcagcccctcctctctgacctttaacctcactctcaccttgcaccctgcaccaacccttcacccct

SEQ ID NO: 147734 - DNA, 615 bp, Homo sapiens
  Payload ID: 9225
  Gene Symbol: LGALS9C
  Gene Name: lectin, galactoside-binding, soluble, 9C
  ENST ID: ENST00000582333
  CDS Start-End: 91-615
tggtttctattactttgttaagtcattccttctgcaaaggactgcctggcaggtgtcaaaggcagtggtggccacagaggcggtggagagatggccttcagcggttgccaggctccctatctgagcccagccgtccccttttctgggactatccaagggggtctccaggacggatttcagatcactgtcaatggggccgttctcagctgcagtggaaccaggtttgctgtggactttcagacgggcttcagtggaaacgacattgccttccacttcaaccctcggtttgaagacggagggtatgtggtgtgcaacacgaggcagaaaggaacatgggggcccgaggagaggaagatgcacatgcccttccagaaggggatgccctttgacctctgcttcctggtgcagagctcagatttcaaggtgatggtgaacgggagcctcttcgtgcagtacttccaccgcgtgcccttccaccgtgtggacaccatctccgtcaatggctctgtgcagctgtcctacatcagcttccagccgatgcctttcatcaccaccattccgggagggctgtacccatccaagtccatcatcctgtcaggcactgtcctgcccagt

SEQ ID NO: 147735 - DNA, 3926 bp, Homo sapiens
  Payload ID: 9226
  Gene Symbol: LGALSL
  Gene Name: lectin, galactoside-binding-like
  Uniprot ID: Q3ZCW2
  ENST ID: ENST00000238875
  CDS Start-End: 455-973
gccaccgtccaatggccgaggggcagggcccgctgagcaagccgcggcagccccgccgggtccccgccctgttcccggttcccgagccgggccccggaggcctttaaatgctgcccagggccgacgcggcacggccctcgccacttttcttggtcgggcagcggcagcggcagcggcagcaagcagccccgtcggcccgggtccggggccgttctgggccgcggcaagcaccttcgccctcccagctcgcgctgcctccctcccctcccctcctcccaggctctgcctgccaggtcggcgccgggccccgggcgcgcgcgcgcgcgccccctcgtgtgtgcgcgcgcccgccgccagctcggacccgcgcccccgcccccgccccgcgcaggacagccccgggatccccgcccgcgcgccgcgtcccacgtaccccgccgcgccgggcaagaagatggcgggatcagtggccgacagcgatgccgtggtgaaactagatgatggccatttaaacaactctttgagctctccagttcaagcggacgtgtacttcccacgactgatagttccattttgtgggcacattaaaggtggcatgagaccaggcaagaaggtgttagtgatgggcatcgtagacctcaacccagagagctttgcaatcagcttgacctgtggggactcagaagaccctcctgccgatgtggcaatcgaactcaaagctgtgttcacagatcggcagctactcagaaattcttgtatatctggggagaggggtgaagaacagtcagcaatcccttactttccattcattccagaccagccattcagggtggaaattctttgtgagcacccacgtttccgagtgtttgtggatggacaccaactttttgatttttaccatcgcattcaaacgttatctgcaattgacaccataaagataaatggagacctccagatcaccaagcttggctgatttaaaccacctctatttcaaataggatcacgtgccacaactatctgactgttggtctggaagaagtgtcctagcaagatctggagacttaaaaagaaaacaaaaacaaatggcaagtttcacttaagggtggtttgcccttaagaagaaagctgttgggacaaagacaccgagccattatacccagaataaaataatacatttatgctggattttattcagaccaaactaaaatggatttgtgatgatttgtgatttggtagcaaattattcatcttttcaaagcaaggcaatgcttagaaacagaagtgctaaagacacttaaaaagccaacaacaacggtacagtgaaatcaatgcatttctgcactaaagtggaattgtgtagcacaaccaatattttagtcagggtatttacatagaatgtaggttgttcaaggtttgactttttttttgttttttgtttttgtttttgtttttgttttgcacagcataatgttaattcagattgttgaagctttcttgtagttatttatttatactcaatgtatgtattaaagaatgaacaatgtctcaagaacagcaagttgtaaacttttgaatgtataaatatcttaggtccaaggggagaaaattacatattacaattatgaaacaggtgaatttctgctttaaagaattgagattctccatacccctaaacttaggatctcttgatataaactgctgtaagtgcttttgggaaacctttgcaaaaccattttgataaaactgctttccaagttattgttggttatgtaaaattctatttacattgctttttctccttactgggaattagcacattattggcttccttaagactaattatttctctcttgatttatataatagctcattaagttgttattaatcaaaaacacaaagaggtgattgcttagacaatttttaaagtgactatagtataaacttttaaaagaataatatgaaaatgactgtggaatgcagtgtaaagcagaagcaaacggccctgaataacttacttggaagtaatttatatcaacttaagctgttagctcattgtataacttttcttatgtgaccctcaccaatatccctaagtaatgcctttggaagcttcagagtagaagatgcttcctactgtgttggctctgaggagatagtaggattagataggatccagattaggaaatgatccagttagtttatctgaaaggttaactcccaggactccaggtctttgaatccagccagtagagtgaatgcttccaattaagctgtaggtgttaccctgcacttacggaactgatcaaacaggtgactccaacaggaggttgcagtactgtaaacgtcaccgcaaggcaagggatgcttaaagtcctgggttctggactttaaaagctacattggccctggagggagggacccttggcattgctttgatcaggtagtgagggaagacagggttctggggtgggggtgtatttatatataatttaggttttgtttgtacagcatactgtgtcttgtaatgacacatccttgtcctgctttccttttttgagttttttttttttttttacacaacatgcagaggcactgaagtgaccatgtcattttcaagtgtcaagaatgtagacagtgtttcagtaccaaagtctaaaataaactaaaattatgaattttttataggtgatacatttggattcttctcaactttgaaactgtttagcacagttccattgtattatataagaagacactgtatccaacaagactggctgtacattgaaaagctttatgtaccagccaacttatttaaccatattcagcctgttccgtgggggctgttctgtggttccaggtattttcaagcctgtgattaacttctcatggcttgtcacttaaaagtccctaaatttgagagacttaaagggcaccttgaaatacatttgtggagttttgatccaacttatggtggaagagccccataggaagactgttttgagtggccaaccattcccacccactgcataattcagcagaaactagaggagcagggcgtgtactgattggaattgacacgcttattctgtctacctatcagctaactcattagcagccaagcccttaggcagcttagtgtgaaaatacaatgttaactgtttgtttctctgtgaggttagtgggaaccgcttggataagcctattgggattaatctaaatgatgtgatgatttgattcaggtatagcccaaattagtaaggggctttagctgtaaactgaaaacaatattcacaccctctcctgggcctgtaaggtctaaggtgagaatttcaggatggaaaatgcaatgtaaagcttccacaggaaagtattcgggtatgtaaggtgttatttctgaccagagccctagttctgcaataaccaaaaccaaggagtataaataacaatcaggctctgggggaatagaaagcaggctttagacaatctgtccatttctacagtaaaattggagtgagtgtgtatatctacttaaaacttaatagaagtgacttctactttttgggctattccagaagtattttaaaattattatttaaaattttgaagccccatttcaaatcttgccgaccttagttcaaagccccctgagagatcacttttagaattgaggatttgttaaaatggcaagtcatttcatttgtgttaaaaagaaaatacccaaaaggaaggagggagccctgtttgccttgagataaacggccttggcattttctggcattaatgtagaaataatgttcctatgatgacatattttcaaagaaacactttcttatttactgtgtggtgtaaaatgttgctaaatgtgttgttacattatgtcactgctgaaagtaatttgcactataataaaggaattttctacaaaa

SEQ ID NO: 147736 - DNA, 3298 bp, Homo sapiens
  Payload ID: 9226
  Gene Symbol: LGALSL
  Gene Name: lectin, galactoside-binding-like
  ENST ID: ENST00000409537
  CDS Start-End: 5-307
gaagatggcgggatcagtggccgacagcgatgccgtggtgaaactagatgatggccatttaaacaactctttgagctctccagttcaagcggacgtgtacttcccacgactgatagttccattttgtgggcacattaaaggtggcatgagaccaggcaagaaggtgttagtgatgggcatcgtagacctcaacccagagaggtggaaattctttgtgagcacccacgtttccgagtgtttgtggatggacaccaactttttgatttttaccatcgcattcaaacgttatctgcaattgacaccataaagataaatggagacctccagatcaccaagcttggctgatttaaaccacctctatttcaaataggatcacgtgccacaactatctgactgttggtctggaagaagtgtcctagcaagatctggagacttaaaaagaaaacaaaaacaaatggcaagtttcacttaagggtggtttgcccttaagaagaaagctgttgggacaaagacaccgagccattatacccagaataaaataatacatttatgctggattttattcagaccaaactaaaatggatttgtgatgatttgtgatttggtagcaaattattcatcttttcaaagcaaggcaatgcttagaaacagaagtgctaaagacacttaaaaagccaacaacaacggtacagtgaaatcaatgcatttctgcactaaagtggaattgtgtagcacaaccaatattttagtcagggtatttacatagaatgtaggttgttcaaggtttgactttttttttgttttttgtttttgtttttgtttttgttttgcacagcataatgttaattcagattgttgaagctttcttgtagttatttatttatactcaatgtatgtattaaagaatgaacaatgtctcaagaacagcaagttgtaaacttttgaatgtataaatatcttaggtccaaggggagaaaattacatattacaattatgaaacaggtgaatttctgctttaaagaattgagattctccatacccctaaacttaggatctcttgatataaactgctgtaagtgcttttgggaaacctttgcaaaaccattttgataaaactgctttccaagttattgttggttatgtaaaattctatttacattgctttttctccttactgggaattagcacattattggcttccttaagactaattatttctctcttgatttatataatagctcattaagttgttattaatcaaaaacacaaagaggtgattgcttagacaatttttaaagtgactatagtataaacttttaaaagaataatatgaaaatgactgtggaatgcagtgtaaagcagaagcaaacggccctgaataacttacttggaagtaatttatatcaacttaagctgttagctcattgtataacttttcttatgtgaccctcaccaatatccctaagtaatgcctttggaagcttcagagtagaagatgcttcctactgtgttggctctgaggagatagtaggattagataggatccagattaggaaatgatccagttagtttatctgaaaggttaactcccaggactccaggtctttgaatccagccagtagagtgaatgcttccaattaagctgtaggtgttaccctgcacttacggaactgatcaaacaggtgactccaacaggaggttgcagtactgtaaacgtcaccgcaaggcaagggatgcttaaagtcctgggttctggactttaaaagctacattggccctggagggagggacccttggcattgctttgatcaggtagtgagggaagacagggttctggggtgggggtgtatttatatataatttaggttttgtttgtacagcatactgtgtcttgtaatgacacatccttgtcctgctttccttttttgagttttttttttttttttacacaacatgcagaggcactgaagtgaccatgtcattttcaagtgtcaagaatgtagacagtgtttcagtaccaaagtctaaaataaactaaaattatgaattttttataggtgatacatttggattcttctcaactttgaaactgtttagcacagttccattgtattatataagaagacactgtatccaacaagactggctgtacattgaaaagctttatgtaccagccaacttatttaaccatattcagcctgttccgtgggggctgttctgtggttccaggtattttcaagcctgtgattaacttctcatggcttgtcacttaaaagtccctaaatttgagagacttaaagggcaccttgaaatacatttgtggagttttgatccaacttatggtggaagagccccataggaagactgttttgagtggccaaccattcccacccactgcataattcagcagaaactagaggagcagggcgtgtactgattggaattgacacgcttattctgtctacctatcagctaactcattagcagccaagcccttaggcagcttagtgtgaaaatacaatgttaactgtttgtttctctgtgaggttagtgggaaccgcttggataagcctattgggattaatctaaatgatgtgatgatttgattcaggtatagcccaaattagtaaggggctttagctgtaaactgaaaacaatattcacaccctctcctgggcctgtaaggtctaaggtgagaatttcaggatggaaaatgcaatgtaaagcttccacaggaaagtattcgggtatgtaaggtgttatttctgaccagagccctagttctgcaataaccaaaaccaaggagtataaataacaatcaggctctgggggaatagaaagcaggctttagacaatctgtccatttctacagtaaaattggagtgagtgtgtatatctacttaaaacttaatagaagtgacttctactttttgggctattccagaagtattttaaaattattatttaaaattttgaagccccatttcaaatcttgccgaccttagttcaaagccccctgagagatcacttttagaattgaggatttgttaaaatggcaagtcatttcatttgtgttaaaaagaaaatacccaaaaggaaggagggagccctgtttgccttgagataaacggccttggcattttctggcattaatgtagaaataatgttcctatgatgacatattttcaaagaaacactttcttatttactgtgtggtgtaaaatgttgctaaatgtgttgttacattatgtcactgctgaaagtaatttgcactataataaaggaattttctacaaaa

SEQ ID NO: 147737 - DNA, 548 bp, Homo sapiens
  Payload ID: 9226
  Gene Symbol: LGALSL
  Gene Name: lectin, galactoside-binding-like
  ENST ID: ENST00000420552
  CDS Start-End: 26-259
gtaccccgccgcgccgggcaagaagatggcgggatcagtggccgacagcgatgccgtggtgaaactagatgatggccatttaaacaactctttgagctctccagttcaagcggacgtgtacttcccacgactgatagttccattttgtgggcacattaaaggtggcatgagaccaggcaagaaggtgttagtgatgggcatcgtagacctcaacccagagagtgggatgattttcttttcagctttgcaatcagcttgacctgtggggactcagaagaccctcctgccgatgtggcaatcgaactcaaagctgtgttcacagatcggcagctactcagaaattcttgtatatctggggagaggggtgaagaacagtcagcaatcccttactttccattcattccagaccagccattcagggtggaaattctttgtgagcacccacgtttccgagtgtttgtggatggacaccaactttttgatttttaccatcgcattcaaacgttatctgcaattgacaccataaagataaatggagacctccagat

SEQ ID NO: 147738 - DNA, 607 bp, Homo sapiens
  Payload ID: 9226
  Gene Symbol: LGALSL
  Gene Name: lectin, galactoside-binding-like
  ENST ID: ENST00000464281
  CDS Start-End: 233-607
acctgaccggctcgggccctcacttctccagccccggccctgcccaccctctggccggctctgcctgccaggtcggcgccgggccccgggcgcgcgcgcgcgcgccccctcgtgtgtgcgcgcgcccgccgccagctcggacccgcgcccccgcccccgccccgcgcaggacagccccgggatccccgcccgcgcgccgcgtcccacgtaccccgccgcgccgggcaagaagatggcgggatcagtggccgacagcgatgccgtggtgaaactagatgatggccatttaaacaactctttgagctctccagttcaagcggacgtgtacttcccacgactgatagttccattttgtgggcacattaaaggtggcatgagaccaggcaagaaggtgttagtgatgggcatcgtagacctcaacccagagagctttgcaatcagcttgacctgtggggactcagaagaccctcctgccgatgtggcaatcgaactcaaagctgtgttcacagatcggcagctactcagaaattcttgtatatctggggagaggggtgaagaacagtcagcaatcccttactttccattcattccagaccagccattcagg

SEQ ID NO: 147739 - DNA, 469 bp, Homo sapiens
  Payload ID: 9226
  Gene Symbol: LGALSL
  Gene Name: lectin, galactoside-binding-like
  ENST ID: ENST00000462737
  CDS Start-End: 100-261
agctcggacccgcgcccccgcccccgccccgcgcaggacagccccgggatccccgcccgcgcgccgcgtcccacgtaccccgccgcgccgggcaagaagatggcgggatcagtggccgacagcgatgccgtggtgctttgcaatcagcttgacctgtggggactcagaagaccctcctgccgatgtggcaatcgaactcaaagctgtgttcacagatcggcagctactcagaaattcttgtatatctggggagaggggtgaagaacagtcagcaatcccttactttccattcattccagaccagccattcagggtggaaattctttgtgagcacccacgtttccgagtgtttgtggatggacaccaactttttgatttttaccatcgcattcaaacgttatctgcaattgacaccataaagataaatggagacctccagatcaccaagcttggctgatttaaaccacct

SEQ ID NO: 147740 - DNA, 1800 bp, Homo sapiens
  Payload ID: 9227
  Gene Symbol: LMAN2
  Gene Name: lectin, mannose-binding 2
  Uniprot ID: Q12907
  ENST ID: ENST00000303127
  CDS Start-End: 206-1276
cttggagcctctaaggagatgaaactgcactcaaccaggatgagaggctgcccggccaatgcagctgccgccccgtctgctgcggaggctttgctttttgactccctggcgacagtaaagttgaagagcttccggccggaggccaatagatgggacccccggaaggcggaagttctagggcggaagtggccgagaggagaggagaatggcggcggaaggctggatttggcgttggggctggggccggcggtgcctgggaaggcctgggcttctcggccccggccctggccccactacacctctctttcttcttttgttgttggggtctgtgactgcggatataactgacggcaacagtgaacatctcaagcgggagcattcgctcattaagccctaccaaggggtcggttccagctctatgcccctctgggacttccagggcagcactatgctcacgagccagtacgtacgtctgacccctgacgagcgcagcaaagagggctctatctggaaccaccagccgtgcttcctcaaagactgggaaatgcacgtccacttcaaagtccacggcacagggaagaagaacctccatggagacggcatcgccttgtggtacacccgggaccgcctcgtgccagggcctgtgtttggaagcaaagataacttccacggcttagccatcttcctggacacctaccccaatgatgagaccactgagcgcgtgttcccgtacatctcggtgatggtgaacaatggctccctgtcctacgaccacagcaaggatgggcgctggaccgagctggcgggctgcacggctgacttccgcaaccgcgatcacgacaccttcctggctgtgcgctactcccggggccgtctgacggtgatgaccgacctggaggacaagaacgagtggaagaactgcattgacatcacgggagtgcgcctgcccaccggctactacttcggggcctccgccggcaccggcgacctgtctgacaatcatgacatcatctccatgaagctgttccagctgatggtggagcacacgcccgacgaggagagcatcgactggaccaagatcgagcccagcgtcaacttcctcaagtcgcccaaagacaacgtggacgaccccacggggaacttccgcagcgggcccctgacggggtggcgggtgttcctgctgctgctgtgcgctctcctgggcatcgttgtctgcgccgtggtgggggccgtggtgttccagaagcggcaggagcggaacaagcgcttctactgagtggcgcctccggcggggcctgtccctgggcccaggagccaatgtgaacttttttttttaccgggattataaaagaacaacaagatgaccttatttcttaactgtttcaaataaatgattaaagtattttcatacattttgcttcttgcccagcagggacaggtggcagagccgaggcttagggtctggcaccccccacagctggagacggaggctctcctggggctggtgtctcaggagcaggggtctgtgtctacagatgggctgtggcccctgcaggcagctgttgaacactggagggtcccccggaccacactggggtgggctcctgaggacgtggggaagtgattttgttttgtggtgtgtggcacgtgtggcgacggataaggcctgaactgggaaacccaggccttcctgttcaccctgagctgcttcctgagacagatgctcaagtgaggctgcaggcgcggtgtggtggggccgagtgtgaccgtttgctaaataaagtgaaatacccaacctca

SEQ ID NO: 147741 - DNA, 1149 bp, Homo sapiens
  Payload ID: 9227
  Gene Symbol: LMAN2
  Gene Name: lectin, mannose-binding 2
  ENST ID: ENST00000515209
  CDS Start-End: 1-978
atggcggcggaaggctggatttggcgttggggctggggccggcggtgcctgggaaggcctgggcttctcggccccggccctggccccactacacctctctttcttcttttgttgttggggtctgtgactgcggatataactgacggcaacagtgaacatctcaagcgggagcattcgctcattaagccctaccaaggggtcggttccagctctatgcccctctgggacttccagggcagcactatgctcacgagccagtacgtacgtctgacccctgacgagcgcagcaaagagggctctatctggaaccaccagccgtgcttcctcaaagactgggaaatgcacgtccacttcaaagtccacggcacagggaagaagaacctccatggagacggcatcgccttgtggtacacccgggaccgcctcgtgccagggcctgtgtttggaagcaaagataacttccacggcttagccatcttcctggacacctaccccaatgatgagaccactgagcgcgtgttcccgtacatctcggtgatggtgaacaatggctccctgtcctacgaccacagcaaggatgggcgctggaccgagctggcgggctgcacggctgacttccgcaaccgcgatcacgacaccttcctggctgtgcgctactcccggggccgtctgacggtgatgaccgacctggaggacaagaacgagtggaagaactgcattgacatcacgggagtgcgcctgcccaccggctactacttcggggcctccgccggcaccggcgacctgtctgacaatcatgacatcatctccatgaagctgttccagctgatggtggagcacacgcccgacgaggagagcatcgactggaccaagatcgagcccagcgtcaacttcctcaagtcgcccaaagctcccccgtttcttctcccccagacaacgtggacgaccccacggggaacttccgcagcgggcccctgacggggtggcgggtgttcctgctgctgctgtgcgctctcctgggcatcgttgtctgcgccgtggtgggggccgtggtgttccagaagcggcaggagcggaacaagcgcttctactgagtggcgcctccggcggggcctgtccctgggcccaggagccaatgtgaactttttt

SEQ ID NO: 147742 - DNA, 616 bp, Homo sapiens
  Payload ID: 9227
  Gene Symbol: LMAN2
  Gene Name: lectin, mannose-binding 2
  ENST ID: ENST00000514458
  CDS Start-End: 6-616
ggagaatggcggcggaaggctggatttggcgttggggctggggccggcggtgcctgggaaggcctgggcttctcggccccggccctggccccactacacctctctttcttcttttgttgttggggtctgtgactgcggatataactgacggcaacagtgaacatctcaagcgggagcattcgctcattaagccctaccaaggggtcggttccagctctatgcccctctgggacttccagggcagcactatgctcacgagccagtacgtacgtctgacccctgacgagcgcagcaaagagggctctatctggaaccaccagccgtgcttcctcaaagactgggaaatgcacgtccacttcaaagtccacggcacagggaagaagaacctccatggagacggcatcgccttgtggtacacccgggaccgcctcgtgccagggcctgtgtttggaagcaaagataacttccacggcttagccatcttcctggacacctaccccaatgatgagaccactgagcatcgactggaccaagatcgagcccagcgtcaacttcctcaagtcgcccaaagacaacgtggacgaccccacggggaacttccgcagcgggcccctga

SEQ ID NO: 147743 - DNA, 876 bp, Homo sapiens
  Payload ID: 9227
  Gene Symbol: LMAN2
  Gene Name: lectin, mannose-binding 2
  ENST ID: ENST00000502560
  CDS Start-End: 13-876
gaggagaggagaatggcggcggaaggctggatttggcgttggggctggggccggcggtgcctgggaaggcctgggcttctcggccccggccctggccccactacacctctctttcttcttttgttgttggggtctgtgactgcggatataactgacggcaacagtgaacatctcaagcgggagcattcgctcattaagccctaccaaggggtcggttccagctctatgcccctctgggacttccagggcagcactatgctcacgagccagtacgtacgtctgacccctgacgagcgcagcaaagagggctctatctggaaccaccagccgtgcttcctcaaagactgggaaatgcacgtccacttcaaagtccacggcacagggaagaagaacctccatggagacggcatcgccttgtggtacacccgggaccgcctcgtgccagataacttccacggcttagccatcttcctggacacctaccccaatgatgagaccactgagcgcgtgttcccgtacatctcggtgatggtgaacaatggctccctgtcctacgaccacagcaaggatgggcgctggaccgagctggcgggctgcacggctgacttccgcaaccgcgatcacgacaccttcctggctgtgcgctactcccggggccgtctgacggtgatgaccgacctggaggacaagaacgagtggaagaactgcattgacatcacgggagtgcgcctgcccaccggctactacttcggggcctccgccggcaccggcgacctgtctgacaatcatgacatcatctccatgaagctgttccagctgatggtggagcacacgcccgacgaggagagcatcgactggaccaagatcgagcccagc

SEQ ID NO: 147744 - DNA, 823 bp, Homo sapiens
  Payload ID: 9227
  Gene Symbol: LMAN2
  Gene Name: lectin, mannose-binding 2
  ENST ID: ENST00000513877
  CDS Start-End: 249-823
gactgcggatataactgacggcaacagtgaacatctcaagcgggagcattcgctcattaagccctaccaaggtgaagcccttggggcgggaatgagtgaagagtgagggcgaggctgaacagggctaggggaaggcgtgccctttctcctgagcagagcatctctgtgggtttcctgcctctggtgaggccagtcctggcgtggcctcttagcacctgtctcttcccacaggggtcggttccagctctatgcccctctgggacttccagggcagcactatgctcacgagccagtacgtacgtctgacccctgacgagcgcagcaaagagggctctatctggaaccaccagccgtgcttcctcaaagactgggaaatgcacgtccacttcaaagtccacggcacagggaagaagaacctccatggagacggcatcgccttgtggtacacccgggaccgcctcgtgccagggcctgtgtttggaagcaaagataacttccacggcttagccatcttcctggacacctaccccaatgatgagaccactgagcgcgtgttcccgtacatctcggtgatggtgaacaatggctccctgtcctacgaccacagcaaggatgggcgctggaccgagctggcgggctgcacggctgacttccgcaaccgcgatcacgacaccttcctggctgtgcgctactcccggggccgtctgacggtgatgaccgacctggaggacaagaacgagtggaagaactgcattgacatcacgggagtgcgcctgcccaccggctactacttcggggcctccgccggcaccggcgacctgtc

SEQ ID NO: 147745 - DNA, 2397 bp, Homo sapiens
  Payload ID: 9228
  Gene Symbol: LMAN2L
  Gene Name: lectin, mannose-binding 2-like
  Uniprot ID: Q9H0V9
  ENST ID: ENST00000264963
  CDS Start-End: 24-1070
atgaagggtcgttggtgggaaagatggcggcgactctgggaccccttgggtcgtggcagcagtggcggcgatgtttgtcggctcgggatgggtccaggatgttactccttcttcttttgttggggtctgggcaggggccacagcaagtcggggcgggtcaaacgttcgagtacttgaaacgggagcactcgctgtcgaagccctaccagggtgtgggcacaggcagttcctcactgtggaatctgatgggcaatgccatggtgatgacccagtatatccgccttaccccagatatgcaaagtaaacagggtgccttgtggaaccgggtgccatgtttcctgagagactgggagttgcaggtgcacttcaaaatccatggacaaggaaagaagaatctgcatggggatggcttggcaatctggtacacaaaggatcggatgcagccagggcctgtgtttggaaacatggacaaatttgtggggctgggagtatttgtagacacctaccccaatgaggagaagcagcaagagcgggtattcccctacatctcagccatggtgaacaacggctccctcagctatgatcatgagcgggatgggcggcctacagagctgggaggctgcacagccattgtccgcaatcttcattacgacaccttcctggtgattcgctacgtcaagaggcatttgacgataatgatggatattgatggcaagcatgagtggagggactgcattgaagtgcccggagtccgcctgccccgcggctactacttcggcacctcctccatcactggggatctctcagataatcatgatgtcatttccttgaagttgtttgaactgacagtggagagaaccccagaagaggaaaagctccatcgagatgtgttcttgccctcagtggacaatatgaagctgcctgagatgacagctccactgccgcccctgagtggcctggccctcttcctcatcgtctttttctccctggtgttttctgtatttgccatagtcattggtatcatactctacaacaaatggcaggaacagagccgaaagcgcttctactgagccctcctgctgccaccacttttgtgactgtcacccatgaggtatggaaggagcaggcactggcctgagcatgcagcctggagagtgttcttgtctctagcagctggttggggactatattctgtcactggagttttgaatgcagggaccccgcattcccatggttgtgcatggggacatctaactctggtctgggaagccacccaccccagggcaatgctgctgtgatgtgcctttccctgcagtccttccatgtgggagcagaggtgtgaagagaatttacgtggttgtgatgccaaaatcacagaacagaatttcatagcccaggctgccgtgttgtttgactcagaaggcccttctacttcagttttgaatccacaaagaattaaaaactggtaacaccacaggctttctgaccatccattcgttgggttttgcatttgacccaaccctctgcctacctgaggagctttctttggaaaccaggatggaaacttcttccctgccttaccttcctttcactccattcattgtcctctctgtgtgcaacctgagctgggaaaggcatttggatgcctctctgttggggcctggggctgcagaacacacctgcgtttcactggccttcattaggtggccctagggagatggctttctgctttggatcactgttccctagcatgggtcttgggtctattggcatgtccatggccttcccaatcaagtctcttcaggccctcagtgaagtttggctaaaggttggtgtaaaaatcaagagaagcctggaagacatcatggatgccatggattagctgtgcaactgaccagctccaggtttgatcaaaccaaaagcaacatttgtcatgtggtctgaccatgtggagatgtttctggacttgctagagcctgcttagctgcatgttttgtagttacgatttttggaatcccactttgagtgctgaaagtgtaaggaagctttcttcttacaccttgggcttggatattgcccagagaagaaatttggctttttttttcttaatggacaagagacagttgctgttctcatgttccaagtctgagagcaacagaccctcatcatctgtgcctggaagagttcactgtcattgagcagcacagcctgagtgctggcctctgtcaacccttattccactgccttatttgacaaggggttacatgctgctcaccttactgccctgggattaaatcagttacaggccagagtctccttggagggcctggaactctgagtcctcctatgaacctctgtagcctaaatgaaattcttaaaatcaccgatggaaccaaa

SEQ ID NO: 147746 - DNA, 2020 bp, Homo sapiens
  Payload ID: 9228
  Gene Symbol: LMAN2L
  Gene Name: lectin, mannose-binding 2-like
  Uniprot ID: Q9H0V9
  ENST ID: ENST00000377079
  CDS Start-End: 25-1104
gatgaagggtcgttggtgggaaagatggcggcgactctgggaccccttgggtcgtggcagcagtggcggcgatgtttgtcggctcgggatgggtccaggatgttactccttcttcttttgttggggtctgggcaggggccacagcaagtcggggcgggtcaaacgttcgagtacttgaaacgggagcactcgctgtcgaagccctaccagggtgtgggcacaggcagttcctcactgtggaatctgatgggcaatgccatggtgatgacccagtatatccgccttaccccagatatgcaaagtaaacagggtgccttgtggaaccgggtgccatgtttcctgagagactgggagttgcaggtgcacttcaaaatccatggacaaggaaagaagaatctgcatggggatggcttggcaatctggtacacaaaggatcggatgcagccagggcctgtgtttggaaacatggacaaatttgtggggctgggagtatttgtagacacctaccccaatgaggagaagcagcaagaggcccagaagaggcgatattctccaggagtccagcgggtattcccctacatctcagccatggtgaacaacggctccctcagctatgatcatgagcgggatgggcggcctacagagctgggaggctgcacagccattgtccgcaatcttcattacgacaccttcctggtgattcgctacgtcaagaggcatttgacgataatgatggatattgatggcaagcatgagtggagggactgcattgaagtgcccggagtccgcctgccccgcggctactacttcggcacctcctccatcactggggatctctcagataatcatgatgtcatttccttgaagttgtttgaactgacagtggagagaaccccagaagaggaaaagctccatcgagatgtgttcttgccctcagtggacaatatgaagctgcctgagatgacagctccactgccgcccctgagtggcctggccctcttcctcatcgtctttttctccctggtgttttctgtatttgccatagtcattggtatcatactctacaacaaatggcaggaacagagccgaaagcgcttctactgagccctcctgctgccaccacttttgtgactgtcacccatgaggtatggaaggagcaggcactggcctgagcatgcagcctggagagtgttcttgtctctagcagctggttggggactatattctgtcactggagttttgaatgcagggaccccgcattcccatggttgtgcatggggacatctaactctggtctgggaagccacccaccccagggcaatgctgctgtgatgtgcctttccctgcagtccttccatgtgggagcagaggtgtgaagagaatttacgtggttgtgatgccaaaatcacagaacagaatttcatagcccaggctgccgtgttgtttgactcagaaggcccttctacttcagttttgaatccacaaagaattaaaaactggtaacaccacaggctttctgaccatccattcgttgggttttgcatttgacccaaccctctgcctacctgaggagctttctttggaaaccaggatggaaacttcttccctgccttaccttcctttcactccattcattgtcctctctgtgtgcaacctgagctgggaaaggcatttggatgcctctctgttggggcctggggctgcagaacacacctgcgtttcactggccttcattaggtggccctagggagatggctttctgctttggatcactgttccctagcatgggtcttgggtctattggcatgtccatggccttcccaatcaagtctcttcaggccctcagtgaagtttggctaaaggttggtgtaaaaatcaagagaagcctggaagacatcatggatgccatggattagctgtgcaactgaccagctccaggtttgatcaaaccaaaagcaacatttgtcatgtggtctgaccatgtggagatgtttctggacttgctagagcctgcttagct

SEQ ID NO: 147747 - DNA, 1163 bp, Homo sapiens
  Payload ID: 9228
  Gene Symbol: LMAN2L
  Gene Name: lectin, mannose-binding 2-like
  ENST ID: ENST00000434865
  CDS Start-End: 24-395
atgaagggtcgttggtgggaaagatggcggcgactctgggaccccttgggtcgtggcagcagtggcggcgatgtttgtcggctcgggatgggtccaggatgttactccttcttcttttgttggggtctgggcaggggccacagcaagtcggggcgggtcaaacgttcgagtacttgaaacgggagcactcgctgtcgaagccctaccaggccatgtttcctgagagactgggagttgcaggtgcacttcaaaatccatggacaaggaaagaagaatctgcatggggatggcttggcaatctggtacacaaaggatcggatgcagccagggcctgtgtttggaaacatggacaaatttgtggggctgggagtatttgtagacacctaccccaatgaggagaagcagcaagagcgggtattcccctacatctcagccatggtgaacaacggctccctcagctatgatcatgagcgggatgggcggcctacagagctgggaggctgcacagccattgtccgcaatcttcattacgacaccttcctggtgattcgctacgtcaagaggcatttgacgataatgatggatattgatggcaagcatgagtggagggactgcattgaagtgcccggagtccgcctgccccgcggctactacttcggcacctcctccatcactggggatctctcagataatcatgatgtcatttccttgaagttgtttgaactgacagtggagagaaccccagaagaggaaaagctccatcgagatgtgttcttgccctcagtggacaatatgaagctgcctgagatgacagctccactgccgcccctgagtggcctggccctcttcctcatcgtctttttctccctggtgttttctgtatttgccatagtcattggtatcatactctacaacaaatggcaggaacagagccgaaagcgcttctactgagccctcctgctgccaccacttttgtgactgtcacccatgaggtatggaaggagcaggcactggcctgagcatgcagcctggagagtgttcttgtctctagcagctggttggggactatattctgtcactggagttttgaatgcagggaccccgcattcccatggttgtgcatggggacatctaactctggtctgggaagccacccaccccag

SEQ ID NO: 147748 - DNA, 1061 bp, Homo sapiens
  Payload ID: 9228
  Gene Symbol: LMAN2L
  Gene Name: lectin, mannose-binding 2-like
  ENST ID: ENST00000449221
  CDS Start-End: 25-396
gatgaagggtcgttggtgggaaagatggcggcgactctgggaccccttgggtcgtggcagcagtggcggcgatgtttgtcggctcgggatgggtccaggatgttactccttcttcttttgttggggtctgggcaggggccacagcaagtcggggcgggtcaaacgttcgagtacttgaaacgggagcactcgctgtcgaagccctaccaggccatgtttcctgagagactgggagttgcaggtgcacttcaaaatccatggacaaggaaagaagaatctgcatggggatggcttggcaatctggtacacaaaggatcggatgcagccagggcctgtgtttggaaacatggacaaatttgtggggctgggagtatttgtagacacctaccccaatgaggagaagcagcaagaggcccagaagaggcgatattctccaggagtccagcgggtattcccctacatctcagccatggtgaacaacggctccctcagctatgatcatgagcgggatgggcggcctacagagctgggaggctgcacagccattgtccgcaatcttcattacgacaccttcctggtgattcgctacgtcaagaggcatttgacgataatgatggatattgatggcaagcatgagtggagggactgcattgaagtgcccggagtccgcctgccccgcggctactacttcggcacctcctccatcactggggatctctcagataatcatgatgtcatttccttgaagttgtttgaactgacagtggagagaaccccagaagaggaaaagctccatcgagatgtgttcttgccctcagtggacaatatgaagctgcctgagatgacagctccactgccgcccctgagtggcctggccctcttcctcatcgtctttttctccctggtgttttctgtatttgccatagtcattggtatcatactctacaacaaatggcaggaacagagccgaaagcgcttctactgagccctcctgctgccaccacttttgtgactgtcacccatgaggtatggaaggagcaggcactggcctgagcatgcag

SEQ ID NO: 147749 - DNA, 1008 bp, Homo sapiens
  Payload ID: 9228
  Gene Symbol: LMAN2L
  Gene Name: lectin, mannose-binding 2-like
  ENST ID: ENST00000440610
  CDS Start-End: 25-360
gatgaagggtcgttggtgggaaagatggcggcgactctgggaccccttgggtcgtggcagcagtggcggcgatgtttgtcggctcgggatgggtccaggatgttactccttcttcttttgttggggtctgggcaggggccacagcaagtcggggcgggtcaaacgttcgagtacttgaaacgggagcactcgctgtcgaagccctaccaggccatgtttcctgagagactgggagttgcaggtgcacttcaaaatccatggacaaggaaagaagaatctgcatggggatggcttggcaatctggtacacaaaggatcggatgcagccagcgggtattcccctacatctcagccatggtgaacaacggctccctcagctatgatcatgagcgggatgggcggcctacagagctgggaggctgcacagccattgtccgcaatcttcattacgacaccttcctggtgattcgctacgtcaagaggcatttgacgataatgatggatattgatggcaagcatgagtggagggactgcattgaagtgcccggagtccgcctgccccgcggctactacttcggcacctcctccatcactggggatctctcagataatcatgatgtcatttccttgaagttgtttgaactgacagtggagagaaccccagaagaggaaaagctccatcgagatgtgttcttgccctcagtggacaatatgaagctgcctgagatgacagctccactgccgcccctgagtggcctggccctcttcctcatcgtctttttctccctggtgttttctgtatttgccatagtcattggtatcatactctacaacaaatggcaggaacagagccgaaagcgcttctactgagccctcctgctgccaccacttttgtgactgtcacccatgaggtatggaaggagcaggcactggcctgagcatgcagcctggagagtgttcttgtctctagcagctggttggggactatattctgtcactggagttttga

SEQ ID NO: 147750 - DNA, 2410 bp, Homo sapiens
  Payload ID: 9228
  Gene Symbol: LMAN2L
  Gene Name: lectin, mannose-binding 2-like
  ENST ID: ENST00000434524
  CDS Start-End: 2-325
gatggcggcgactctgggaccccttgggtcgtggcagcagtggcggcgatgtttgtcggctcgggatgggtccaggatgttactccttcttcttttgttggggtctgggcaggggccacagcaagtcggggcgggtcaaacgttcgagtacttgaaacgggagcactcgctgtcgaagccctaccagggtgtgggcacaggcagttcctcactgtggaatctgatgggcaatgccatggtgatgacccagtatatccgccttaccccagatatgcaaagtaaacagggtgccttgtggaaccgggtgctgcattgtcttccttgaggtatggcgacaagaagtgaatgcagtattcctggtgtggctgcactgtgattttgtacaagtccatgtttcctgagagactgggagttgcaggtgcacttcaaaatccatggacaaggaaagaagaatctgcatggggatggcttggcaatctggtacacaaaggatcggatgcagccagggcctgtgtttggaaacatggacaaatttgtggggctgggagtatttgtagacacctaccccaatgaggagaagcagcaagagcgggtattcccctacatctcagccatggtgaacaacggctccctcagctatgatcatgagcgggatgggcggcctacagagctgggaggctgcacagccattgtccgcaatcttcattacgacaccttcctggtgattcgctacgtcaagaggcatttgacgataatgatggatattgatggcaagcatgagtggagggactgcattgaagtgcccggagtccgcctgccccgcggctactacttcggcacctcctccatcactggggatctctcagataatcatgatgtcatttccttgaagttgtttgaactgacagtggagagaaccccagaagaggaaaagctccatcgagatgtgttcttgccctcagtggacaatatgaagctgcctgagatgacagctccactgccgcccctgagtggcctggccctcttcctcatcgtctttttctccctggtgttttctgtatttgccatagtcattggtatcatactctacaacaaatggcaggaacagagccgaaagcgcttctactgagccctcctgctgccaccacttttgtgactgtcacccatgaggtatggaaggagcaggcactggcctgagcatgcagcctggagagtgttcttgtctctagcagctggttggggactatattctgtcactggagttttgaatgcagggaccccgcattcccatggttgtgcatggggacatctaactctggtctgggaagccacccaccccagggcaatgctgctgtgatgtgcctttccctgcagtccttccatgtgggagcagaggtgtgaagagaatttacgtggttgtgatgccaaaatcacagaacagaatttcatagcccaggctgccgtgttgtttgactcagaaggcccttctacttcagttttgaatccacaaagaattaaaaactggtaacaccacaggctttctgaccatccattcgttgggttttgcatttgacccaaccctctgcctacctgaggagctttctttggaaaccaggatggaaacttcttccctgccttaccttcctttcactccattcattgtcctctctgtgtgcaacctgagctgggaaaggcatttggatgcctctctgttggggcctggggctgcagaacacacctgcgtttcactggccttcattaggtggccctagggagatggctttctgctttggatcactgttccctagcatgggtcttgggtctattggcatgtccatggccttcccaatcaagtctcttcaggccctcagtgaagtttggctaaaggttggtgtaaaaatcaagagaagcctggaagacatcatggatgccatggattagctgtgcaactgaccagctccaggtttgatcaaaccaaaagcaacatttgtcatgtggtctgaccatgtggagatgtttctggacttgctagagcctgcttagctgcatgttttgtagttacgatttttggaatcccactttgagtgctgaaagtgtaaggaagctttcttcttacaccttgggcttggatattgcccagagaagaaatttggctttttttttcttaatggacaagagacagttgctgttctcatgttccaagtctgagagcaacagaccctcatcatctgtgcctggaagagttcactgtcattgagcagcacagcctgagtgctggcctctgtcaacccttattccactgccttatttgacaaggggttacatgctgctcaccttactgccctgggattaaatcagttacaggccagagtctccttggagggcctggaactctgagtcctcctatgaa

SEQ ID NO: 147751 - DNA, 1400 bp, Homo sapiens
  Payload ID: 9228
  Gene Symbol: LMAN2L
  Gene Name: lectin, mannose-binding 2-like
  ENST ID: ENST00000446780
  CDS Start-End: 25-534
gatgaagggtcgttggtgggaaagatggcggcgactctgggaccccttgggtcgtggcagcagtggcggcgatgtttgtcggctcgggatgggtccaggatgttactccttcttcttttgttggggtctgggcaggggccacagcaagtcggggcgggtcaaacgttcgagtacttgaaacgggagcactcgctgtcgaagccctaccagggtgtgggcacaggcagttcctcactgtggaatctgatgggcaatgccatggtgatgacccagtatatccgccttaccccagatatgcaaagtaaacagggtgccttgtggaaccgggtgccatgtttcctgagagactgggagttgcaggtgcacttcaaaatccatggacaaggaaagaagaatctgcatggggatggcttggcaatctggtacacaaaggatcggatgcagccaggcccagaagaggcgatattctccaggagtccagcgggtattcccctacatctcagccatggtgaacaacggctccctcagctatgatcatgagcgggatgggcggcctacagagctgggaggctgcacagccattgtccgcaatcttcattacgacaccttcctggtgattcgctacgtcaagaggcatttgacgataatgatggatattgatggcaagcatgagtggagggactgcattgaagtgcccggagtccgcctgccccgcggctactacttcggcacctcctccatcactggggatctctcagataatcatgatgtcatttccttgaagttgtttgaactgacagtggagagaaccccagaagaggaaaagctccatcgagatgtgttcttgccctcagtggacaatatgaagctgcctgagatgacagctccactgccgcccctgagtggcctggccctcttcctcatcgtctttttctccctggtgttttctgtatttgccatagtcattggtatcatactctacaacaaatggcaggaacagagccgaaagcgcttctactgagccctcctgctgccaccacttttgtgactgtcacccatgaggtatggaaggagcaggcactggcctgagcatgcagcctggagagtgttcttgtctctagcagctggttggggactatattctgtcactggagttttgaatgcagggaccccgcattcccatggttgtgcatggggacatctaactctggtctgggaagccacccaccccagggcaatgctgctgtgatgtgcctttccctgcagtccttccatgtgggagcagaggtgtgaagagaatttacgtggttgtgatgccaaaatcacagaacagaatttcatagcccaggctgccgtgttgtttgactcagaaggcccttctacttcagttttgaatccac

SEQ ID NO: 147752 - DNA, 5521 bp, Homo sapiens
  Payload ID: 9229
  Gene Symbol: LMAN1
  Gene Name: lectin, mannose-binding, 1
  Uniprot ID: P49257
  ENST ID: ENST00000251047
  CDS Start-End: 719-2251
cattatccctctcaccaaaaccaaaccaaaccaaagtcagtttcatttgaatgcactcttgccatggtttcaaaatttggaaagctcttggaattaaattttgagatgtaaaggctggctgacaaattcacagaaaccctctttccgacaccaacttataaatcctaaggcatcctacaaccccgtgggtgctggtttctagtttgcaacgctctaacatagcttggtagagctcagtgggctgggaccataagcattcgggattgtgccactgaaaaactgatgtcacatcaaaaggaacacctttcttctaatatactaaaaaggttttgtacaggctgggtccagaggtcttagggctagccaattcctgctcccaggtattctaagaagccggagaaagctccctgcaggtaaggacccatcggcgcttcccgcactctgccgcgcgggaagcgaaggttggagtcctttccccacccccggagggtgggcggggccgaaggaccgcaccgccccagacccgccccctgcgcgtggccccgcccacagctgctcctggccgtgcggccgcgcggaaagcggaggccgggggcggggctcaccccttgcccttgggggtcccccgggctctgccaatcagcgagcgccctgttggccatccgcagccatccgcgcccctccctctcccgccctcctccgcgttccagaatccaagatggcgggatccaggcaaaggggtctccgggccagagttcggccgctgttctgcgccttgctgctgtcactcggtcgcttcgtccggggcgacggcgtgggaggagaccccgcggtcgcgttgccacatcgccgtttcgagtacaaatacagcttcaaggggccgcacctggtgcagagcgacgggaccgtgcccttctgggcccacgcggggaatgctattccaagttcagatcaaattcgagtagcaccatctttaaaaagccaaagaggctcagtgtggacaaagacaaaagcggcctttgagaactgggaagttgaggtgacatttcgagtgactggaagaggtcgaattggagctgatggcctagcaatttggtatgcagaaaatcaaggcttggagggccctgtgtttggatcagctgatctgtggaatggtgttggaatattttttgattcttttgacaatgatggaaagaaaaataatcctgctatagtaattataggcaacaatggacaaatccattatgaccatcaaaatgacggggctagtcaagctttggcaagttgccagagggacttccgcaacaaaccctatcctgtccgagcaaagattacctattaccagaacacactgacagtaatgatcaataatggctttacaccagataaaaatgattatgaattttgtgccaaagtggaaaatatgattatccctgcacaagggcattttggaatatctgctgcaactggaggtcttgcagatgaccatgatgtcctttcttttctgactttccagttgactgaacctggaaaagagccgcccacaccagataaagaaatttcggaaaaggaaaaagaaaagtatcaggaggaatttgagcactttcaacaagaattggataaaaaaaaagaggaattccagaagggccaccccgacctccaagggcagcctgcggaggaaatatttgagagtgtaggagatcgagagctaagacaagtctttgaaggacagaatcgtattcatcttgaaatcaagcagctgaaccggcagttagatatgattcttgatgaacagagaagatatgtctcttccttaacagaggaaatctctaaaagaggagcaggaatgcctgggcagcatgggcagattactcaacaagaactggatactgttgtgaaaactcagcatgagattctgagacaagtaaatgaaatgaaaaattccatgagtgaaaccgtcagactggtcagtggaatgcagcaccctggctctgctggaggcgtctatgagacaacacagcacttcattgacatcaaagagcacctgcacatagtaaagagggacatagataacttagtgcagcgaaatatgccatcaaatgaaaagccgaaatgcccagaactaccaccatttccatcatgtttgtctacggtccacttcattatatttgttgtggtgcaaactgtattattcattggttatatcatgtataggtctcagcaagaagcagctgccaaaaaattcttttgactaccattttcctgtgtacttcatctatttgtgtacaaaatgatgtcgttttgagggaatttaagtatttaaattgcttcatagtctaaattattaattttcttaataaaataactgtttaaacattgatttgcagttaagaataaaccttaaagcaaagacaaccacattttaatttgttcacagtatgtaaatctgtctaaatttcagtgaatttctggtcagtatgatgcagcctctgagcagaatattgaccagtaagagggtaaataaagtgggggcaacccctggatatgaatgttaccccctaagtctccaatattgcaggtttccctgtataacgtaaacacacttgccctcatgcctcccagaatatgaggtctaattaagaagtcccatcaggtttattttgtaaccaaagtcttttttagaggtcagacttcctaatcaaaggcctgggcctgcagtcctttcatcttaatgcaacttcctttgaaatcaaagaatattttgtctgagagctttaaggatctggtaatagacttcaaaatgttaagtgaaatttttttttcctctatttatcaatgatatatttcacttttaaaggaaattttagaggaaaattaatagctgctttttgcctaaaaaaccttgtgggtggaaacattcctctgagaatggcttttataggtattttgcctggtaatgtattcattcatgattgcccatattcttgaatgtcttcattccaatggggtcaggtcaatattatgaaaataatttttatatttatatttgtaacttaaggaatttatttctccctttactacagcatgtaaattcagctcaaattgcatgatctgaggatttaaattcacaaaacctgccactacattctggtttacattagttacttcatgctggctggggttagtgaccatttgcatactcttttaaatcaaggaggctgtagtagaagcagttttaagattcttgaaggcaaaatttgaaaaacagtgaatacttctaattgtttccttttagtgccagaactaaggacattgtgaagcacttgttagtaaacttaaccttgaaatgtcagactggaaggagtttttatagtctttgtgcatacttctaggtattacagaaacagtctgtaaatgacattttaagatgcaaatttaattctgttcacagctgatttatactgatttttgctgccttcaaaatactcttttacttcttttagctaaaatggttgtctttcatttgccatagaattccaaacaatactatcttataaaatagtactgttgaattattccaagcctccctaggtttgctctcaaatgtcatttacagattgggctaacgacctaaaatctatatataaagactttctgaagaactctgtattatagcaataccaaacgagtgctgtgtgtgcaaacagtctggcgttgctttttatgttgatatttatcctagaacactgaaagagaatatgccagtgataactcactttacttcagtcatttcaacacagaaaatgcttctctagcatttttcttttgtagtgttaacattttgaaattcatgtttcagaggcttcatcatcacagaatttactcttgctccatgaaaaaaaattaaataccttcagaggaatatttaagttgtaaactatgaaacttgagaaatcctcttgagataaaaggctgccaaatccagtattataaagtccatggtcatatgtgcctgtgcattaaaggaataccagatctatgcagtatacatttttcaggctgaaattcaaggggaatcattctgattattcttactacaaatggagatggctattatgaaacagcatgagcatgagccttttatcttttatacttagtgatatactttgcttgaaaatcactcagcaaagtagttcacatgatgtgtatcatatttgaagtgtggtttttctcaaaatcattgactttaaggagctcatttctgaacaaaaaggtttgctctgtggaaaaatcaatcactgccaggattctttcatttctgtactattttgtataattgaatttgttcacttctctcacaccagcaagtgttttacaggtgccttggattaaaacaaaattgattttaaaatttttatgtaagtcattgtgtctatgatgccacttttaaaaggaaaatgcaattgcgtaatggcttatatccttatttaatgtacctatttgtgttctaataattgtttgaatgttttattcagcttaaaactttaccatgaagtcataaacagtaaacaatgttttgttatgtattaaggggatatcagtgtttctcaaagtatgatccatggaccatctgggtcatggcgcctggtttcagacaacctgaatcaaatcttaggggtggggctttgggatgtcattgttcaataggcacctcaggagattctgagcacaccaatgtttgagaaccactaaaatgaggagtgggaaaaaaaaaataggtgttttgttaatttagagctgagctgagaagataatatatttttattgtcaatgacattaacagatatgcactgattcttttatacctacaatttacttaatgttccttttattaaaacgcgtggttcatgagcaactacagactgaatccagattattacctgttgctttcagtattttcgtgatggcttttaatcttatgaaatcatcttgagatcattcatggtcaagccatgaaaactcccatcttcaagcctgcctgctaaagcttctttgccttcctgattgtgattatggtaacaatttatatcagacagttgtactttttgataacttagggaaaacagaaatgacttgaacaagggattgcctgcctcactgcattgcagagatacaatttttgtaaagaacacaaatagcagttgtgaatattaaggtgtgattatctttccctgtccatgtgcttattgaaagaagatagtgaacaaatgattatattgaggatttttttaatttataagatctaatgtgaaatccacacttggaactttttagatctgtctgttgcttgtttaatatatttcttttatgacattacttaaagtttaaaagggttttctatccactgtcaatttcaattggataacattttgtcaagttttttttttcctgattatttgatgctagctggaattcaagaaatggcattgaccttattcaaataaagaaatattttagtaaa

SEQ ID NO: 147753 - DNA, 1873 bp, Homo sapiens
  Payload ID: 9230
  Gene Symbol: LMAN1L
  Gene Name: lectin, mannose-binding, 1 like
  Uniprot ID: Q9HAT1
  ENST ID: ENST00000309664
  CDS Start-End: 140-1720
agatagagggagaggacagtgccaaaacccagctcctggccagtccccagctcctccctgcctggccctatcccaggatcccctccccggcctcccagctatgatctaccccggggcccagacttcaggcgccttcacgatgccggcggtcagtggtccaggtcccttattctgccttctcctcctgctcctggacccccacagccctgagacggggtgtcctcctctacgcaggtttgagtacaagctcagcttcaaaggcccaaggctggcattgcctggggctggaatacccttctggagccatcatggagacgccatcctgggcctggaggaagtgcggctgacgccatccatgaggaaccggagtggcgccgtgtggagcagggcctctgtccccttctctgcctgggaagtagaggtgcagatgagggtgacgggactggggcgccggggagcccagggcatggccgtgtggtacacccggggcaggggccatgtaggctctgtccttggggggctggcttcgtgggacggcatcgggatcttctttgactctccggcagaggatactcaggacagtcctgccatccgtgtgctggccagcgacgggcacatcccctctgagcagcctggggatggagctagccaagggctgggctcctgtcattgggacttccggaaccggccacaccccttcagagcacggatcacctactgggggcagaggctgcgcatgtccttgaacagtggcctcactcccagtgatccaggtgagttctgtgtggatgtggggcccctgcttttggtccctggaggtttctttggggtctcagcagccaccggcaccctggcagatgatcatgatgtcctgtccttcctgaccttcagcctgagtgagcccagcccagaggttccccctcagcccttcctggagatgcagcagctccgcctggcgaggcagctggaagggctgtgggcaaggctgggcttgggcaccagggaggatgtaactccaaaatcagactctgaagctcaaggagaaggggaaaggctctttgacctggaggagacgctgggcagacaccgccggatcctgcaggctctgcggggtctctccaagcagctggcccaggctgagagacaatggaagaagcagctggggcccccaggccaagccaggcctgacggaggctgggccctggatgcttcctgccagattccatccaccccagggaggggtggccacctctccatgtcactcaataaggactctgccaaggtcggtgccctgctccatggacagtggactctgctccaggccctgcaagagatgagggatgcagctgtccgcatggctgcagaagcccaggtctcctacctgcctgtgggcattgagcatcatttcttagagctggaccacatcctgggcctcctgcaggaggagcttcggggcccggcgaaggcagcagccaaggccccccgcccacctggccagcccccaagggcctcctcgtgcctgcagcctggcatcttcctgttctacctcctcattcagactgtaggcttcttcggctacgtgcacttcaggcaggagctgaacaagagccttcaggagtgtctgtccacaggcagccttcctctgggtcctgcaccacacacccccagggccctggggattctgaggaggcagcctctccctgccagcatgcctgcctgacccacctcagagcctgctttgcatcactgggaagcaggcagtgtcttgggtgggggcttggtcagtatcctctccgtctgggtgcccagctcccacgcacacctgagctttcggcatgctcccacctcgttaaaggtgatttccctctcccca

SEQ ID NO: 147754 - DNA, 1699 bp, Homo sapiens
  Payload ID: 9230
  Gene Symbol: LMAN1L
  Gene Name: lectin, mannose-binding, 1 like
  Uniprot ID: Q9HAT1
  ENST ID: ENST00000379709
  CDS Start-End: 3-1547
cgatgccggcggtcagtggtccaggtcccttattctgccttctcctcctgctcctggacccccacagccctgagacggggtgtcctcctctacgcaggtttgagtacaagctcagcttcaaaggcccaaggctggcattgcctggggctggaatacccttctggagccatcatggagacgccatcctgggcctggaggaagtgcggctgacgccatccatgaggaaccggagtggcgccgtgtggagcagggcctctgtccccttctctgcctgggaagtagaggtgcagatgagggtgacgggactggggcgccggggagcccagggcatggccgtgtggtacacccggggcaggggccatgtaggctctgtccttggggggctggcttcgtgggacggcatcgggatcttctttgactctccggcagaggatactcaggacagtcctgccatccgtgtgctggccagcgacgggcacatcccctctgagcagcctggggatggagctagccaagggctgggctcctgtcattgggacttccggaaccggccacaccccttcagagcacggatcacctactgggggcagaggctgcgcatgtccttgaacagtggcctcactcccagtgatccaggtgagttctgtgtggatgtggggcccctgcttttggtccctggaggtttctttggggtctcagcagccaccggcaccctggcaggtgaggatcccactggacaggttccccctcagcccttcctggagatgcagcagctccgcctggcgaggcagctggaagggctgtgggcaaggctgggcttgggcaccagggaggatgtaactccaaaatcagactctgaagctcaaggagaaggggaaaggctctttgacctggaggagacgctgggcagacaccgccggatcctgcaggctctgcggggtctctccaagcagctggcccaggctgagagacaatggaagaagcagctggggcccccaggccaagccaggcctgacggaggctgggccctggatgcttcctgccagattccatccaccccagggaggggtggccacctctccatgtcactcaataaggactctgccaaggtcggtgccctgctccatggacagtggactctgctccaggccctgcaagagatgagggatgcagctgtccgcatggctgcagaagcccaggtctcctacctgcctgtgggcattgagcatcatttcttagagctggaccacatcctgggcctcctgcaggaggagcttcggggcccggcgaaggcagcagccaaggccccccgcccacctggccagcccccaagggcctcctcgtgcctgcagcctggcatcttcctgttctacctcctcattcagactgtaggcttcttcggctacgtgcacttcaggcaggagctgaacaagagccttcaggagtgtctgtccacaggcagccttcctctgggtcctgcaccacacacccccagggccctggggattctgaggaggcagcctctccctgccagcatgcctgcctgacccacctcagagcctgctttgcatcactgggaagcaggcagtgtcttgggtgggggcttggtcagtatcctctccgtctgggtgcccagctcccacgcacacctgagctttcggcatgctcccacctcgttaaaggtgatttccctctcccc

SEQ ID NO: 147755 - DNA, 521 bp, Homo sapiens
  Payload ID: 9230
  Gene Symbol: LMAN1L
  Gene Name: lectin, mannose-binding, 1 like
  ENST ID: ENST00000567848
  CDS Start-End: 1-372
ctgcaggctctgcggggtctctccaagcagctggcccaggctgagagacaatggaagaagcagctggggcccccaggccaagccaggcctgacggaggctgggccctggatgcttcctgccagattccatccaccccagggaggggtggccacctctccatgtcactcaataaggactctgccaaggtcggtgccctgctccatggacagtggactctgctccaggccctgcaagagatgaggcaggagctgaacaagagccttcaggagtgtctgtccacaggcagccttcctctgggtcctgcaccacacacccccagggccctggggattctgaggaggcagcctctccctgccagcatgcctgcctgacccacctcagagcctgctttgcatcactgggaagcaggcagtgtcttgggtgggggcttggtcagtatcctctccgtctgggtgcccagctcccacgcacacctgagctttcggcatgctcccacctcgttaaaggtgatttccctctc

SEQ ID NO: 147756 - DNA, 555 bp, Homo sapiens
  Payload ID: 9230
  Gene Symbol: LMAN1L
  Gene Name: lectin, mannose-binding, 1 like
  ENST ID: ENST00000562810
  CDS Start-End: 229-555
atgatctaccccggggcccagacttcaggcgccttcacgatgccggcggtttgagtacaagctcagcttcaaaggcccaaggctggcattgcctggggctggaatacccttctggagccatcatggagacacatgctcacacactaagtcccaggcacacagaaggcaatgtggaccagcacaaacctccactctcccggctccatcccagcgggcctgtggctggccatgagaactgggggctacctggagggaagcatcctcatcccagacgccatcctgggcctggaggaagtgcggctgacgccatccatgaggaaccggagtggcgccgtgtggagcagggcctctgtccccttctctgcctgggaagtagaggtgcagatgagggtgacgggactggggcgccggggagcccagggcatggccgtgtggtacacccggggcaggggccatgtaggctctgtccttggggggctggcttcgtgggacggcatcgggatcttctttgactctccggcagaggatactcaggacagtcctgccatccgtgtg

SEQ ID NO: 147757 - DNA, 1626 bp, Homo sapiens
  Payload ID: 9231
  Gene Symbol: LEFTY1
  Gene Name: left-right determination factor 1
  Uniprot ID: O75610
  ENST ID: ENST00000272134
  CDS Start-End: 81-1181
acatccagctgcctgagaccctcctgcagccttctcaagggacagccccactctgcctcttgctcctccagggcagcaccatgcagcccctgtggctctgctgggcactctgggtgttgcccctggccagccccggggccgccctgaccggggagcagctcctgggcagcctgctgcggcagctgcagctcaaagaggtgcccaccctggacagggccgacatggaggagctggtcatccccacccacgtgagggcccagtacgtggccctgctgcagcgcagccacggggaccgctcccgcggaaagaggttcagccagagcttccgagaggtggccggcaggttcctggcgttggaggccagcacacacctgctggtgttcggcatggagcagcggctgccgcccaacagcgagctggtgcaggccgtgctgcggctcttccaggagccggtccccaaggccgcgctgcacaggcacgggcggctgtccccgcgcagcgcccgggcccgggtgaccgtcgagtggctgcgcgtccgcgacgacggctccaaccgcacctccctcatcgactccaggctggtgtccgtccacgagagcggctggaaggccttcgacgtgaccgaggccgtgaacttctggcagcagctgagccggccccggcagccgctgctgctacaggtgtcggtgcagagggagcatctgggcccgctggcgtccggcgcccacaagctggtccgctttgcctcgcagggggcgccagccgggcttggggagccccagctggagctgcacaccctggaccttggggactatggagctcagggcgactgtgaccctgaagcaccaatgaccgagggcacccgctgctgccgccaggagatgtacattgacctgcaggggatgaagtgggccgagaactgggtgctggagcccccgggcttcctggcttatgagtgtgtgggcacctgccggcagcccccggaggccctggccttcaagtggccgtttctggggcctcgacagtgcatcgcctcggagactgactcgctgcccatgatcgtcagcatcaaggagggaggcaggaccaggccccaggtggtcagcctgcccaacatgagggtgcagaagtgcagctgtgcctcggatggtgcgctcgtgccaaggaggctccagccataggcgcctagtgtagccatcgagggacttgacttgtgtgtgtttctgaagtgttcgagggtaccaggagagctggcgatgactgaactgctgatggacaaatgctctgtgctctctagtgagccctgaatttgcttcctctgacaagttacctcacctaatttttgcttctcaggaatgagaatctttggccactggagagcccttgctcagttttctctattcttattattcactgcactatattctaagcacttacatgtggagatactgtaacctgagggcagaaagcccaatgtgtcattgtttacttgtcctgtcactggatctgggctaaagtcctccaccaccactctggacctaagacctggggttaagtgtgggttgtgcatccccaatccagataataaagactttgtaaaacatgaataaaacacattttattcta

SEQ ID NO: 147758 - DNA, 512 bp, Homo sapiens
  Payload ID: 9231
  Gene Symbol: LEFTY1
  Gene Name: left-right determination factor 1
  ENST ID: ENST00000492457
  CDS Start-End: 321-512
acatagcaaagcagctcagagttggatctaggggaaagcgctggaatccacgctccgcttccccacgcagcctcgcctgtggccccagcagcgccctctgcacatgggaggtcgggcagcttagcggagctccccggccagggactcaggcctcaccaggggcccgcgtgtccagcctgacgtgggccatctgaatcgaaatacacccatcttgctcaagacgaggcctagagagtcagtcactttaacgacaggtgaccttggaggtggccggcaggttcctggcgttggaggccagcacacacctgctggtgttcggcatggagcagcggctgccgcccaacagcgagctggtgcaggccgtgctgcggctcttccaggagccggtccccaaggccgcgctgcacaggcacgggcggctgtccccgcgcagcgcccgggcccgggtgaccgtcgagtggctgcgcgtccgcgacgacggctccaaccgcacctccctcatcgactccagg

SEQ ID NO: 147759 - DNA, 2287 bp, Homo sapiens
  Payload ID: 9232
  Gene Symbol: LEFTY2
  Gene Name: left-right determination factor 2
  Uniprot ID: O00292
  ENST ID: ENST00000366820
  CDS Start-End: 350-1450
cagggctggggtaaggccaggaaaattcaacaggcactaaaaatattgtcaagctgctgacagcacagccagaggccccaggcctgggtggcatccagacagccctgtcctttctagacagccccctcctccaggctcagggacctgtctggctgtgagctcccaggaggtcccaggggtgtgacctccctccctccctccctccctcttcccttcaccccaggccagcccagggccagctataaagctggcccagcctggctctcagcacacccagctgcctgagaccctccttcaacctccctagaggacagccccactctgcctcctgctcccccagggcagcaccatgtggcccctgtggctctgctgggcactctgggtgctgcccctggctggccccggggcggccctgaccgaggagcagctcctgggcagcctgctgcggcagctgcagctcagcgaggtgcccgtactggacagggccgacatggagaagctggtcatccccgcccacgtgagggcccagtatgtagtcctgctgcggcgcagccacggggaccgctcccgcggaaagaggttcagccagagcttccgagaggtggccggcaggttcctggcgtcggaggccagcacacacctgctggtgttcggcatggagcagcggctgccgcccaacagcgagctggtgcaggccgtgctgcggctcttccaggagccggtccccaaggccgcgctgcacaggcacgggcggctgtccccgcgcagcgcccaggcccgggtgaccgtcgagtggctgcgcgtccgcgacgacggctccaaccgcacctccctcatcgactccaggctggtgtccgtccacgagagcggctggaaggccttcgacgtgaccgaggccgtgaacttctggcagcagctgagccggccccggcagccgctgctgctacaggtgtcggtgcagagggagcatctgggcccgctggcgtccggcgcccacaagctggtccgctttgcctcgcagggggcgccagccgggcttggggagccccagctggagctgcacaccctggacctcagggactatggagctcagggcgactgtgaccctgaagcaccaatgaccgagggcacccgctgctgccgccaggagatgtacattgacctgcaggggatgaagtgggccaagaactgggtgctggagcccccgggcttcctggcttacgagtgtgtgggcacctgccagcagcccccggaggccctggccttcaattggccatttctggggccgcgacagtgtatcgcctcggagactgcctcgctgcccatgatcgtcagcatcaaggagggaggcaggaccaggccccaggtggtcagcctgcccaacatgagggtgcagaagtgcagctgtgcctcggatggggcgctcgtgccaaggaggctccagccataggcgcctggtgtatccattgagccctctaactgaacgtgtgcatagaggtggtcttaatgtaggtcttaactttatacttagcaagttactccatcccaatttagtgctcctgtgtgaccttcgccctgtgtccttccatttcctgtctttcccgtccatcacccatcctaagcacttacgtgagtaaataatgcagctcagatgctgagctctagtaggaaatgctggcatgctgattacaagatacagctgagcaatgcacacattttcagctgggagtttctgttctctggcaaattcttcactgagtctggaacaataataccctatgattagaactggggaaacagaactgaattgctgtgttatatgaggaattaaaaccttcaaatctctatttcccccaaatactgacccattctggacttttgtaaacatacctaggcccctgttcccctgagagggtgctaagaggaaggatgaagggcttcaggctgggggcagtggacagggaattgggatacctggattctggttctgacagggccacaagctaggatctctaacaaacgcagaaggctttggctcgtcatttcctcttaaaaaggaggagctgggcttcagctctaagaacttcattgccctggggatcagacagcccctacctacccctgcccactcctctggagactgagccttgcccgtgcatatttaggtcatttcccacactgtcttagagaacttgtcaccagaaaccacatgtatttgcatgttttttgttaatttagctaaagcaattgaatgtagatactcagaagaaataaaaaatgatgtttc

SEQ ID NO: 147760 - DNA, 2085 bp, Homo sapiens
  Payload ID: 9232
  Gene Symbol: LEFTY2
  Gene Name: left-right determination factor 2
  Uniprot ID: O00292
  ENST ID: ENST00000420304
  CDS Start-End: 244-1242
gtcctttctagacagccccctcctccaggctcagggacctgtctggctgtgagctcccaggaggtcccaggggtgtgacctccctccctccctccctccctcttcccttcaccccaggccagcccagggccagctataaagctggcccagcctggctctcagcacacccagctgcctgagaccctccttcaacctccctagaggacagccccactctgcctcctgctcccccagggcagcaccatgtggcccctgtggctctgctgggcactctgggtgctgcccctggctggccccggggcggccctgaccgaggagcagctcctgggcagcctgctgcggcagctgcagctcagcgaggtgcccgtactggacagggccgacatggagaagctggtcatccccgcccacgtgagggcccagtatgtagtcctgctgcggcgcagccacggggaccgctcccgcggaaagaggttcagccagagcttccgagaggtggccggcaggttcctggcgtcggaggccgcgctgcacaggcacgggcggctgtccccgcgcagcgcccaggcccgggtgaccgtcgagtggctgcgcgtccgcgacgacggctccaaccgcacctccctcatcgactccaggctggtgtccgtccacgagagcggctggaaggccttcgacgtgaccgaggccgtgaacttctggcagcagctgagccggccccggcagccgctgctgctacaggtgtcggtgcagagggagcatctgggcccgctggcgtccggcgcccacaagctggtccgctttgcctcgcagggggcgccagccgggcttggggagccccagctggagctgcacaccctggacctcagggactatggagctcagggcgactgtgaccctgaagcaccaatgaccgagggcacccgctgctgccgccaggagatgtacattgacctgcaggggatgaagtgggccaagaactgggtgctggagcccccgggcttcctggcttacgagtgtgtgggcacctgccagcagcccccggaggccctggccttcaattggccatttctggggccgcgacagtgtatcgcctcggagactgcctcgctgcccatgatcgtcagcatcaaggagggaggcaggaccaggccccaggtggtcagcctgcccaacatgagggtgcagaagtgcagctgtgcctcggatggggcgctcgtgccaaggaggctccagccataggcgcctggtgtatccattgagccctctaactgaacgtgtgcatagaggtggtcttaatgtaggtcttaactttatacttagcaagttactccatcccaatttagtgctcctgtgtgaccttcgccctgtgtccttccatttcctgtctttcccgtccatcacccatcctaagcacttacgtgagtaaataatgcagctcagatgctgagctctagtaggaaatgctggcatgctgattacaagatacagctgagcaatgcacacattttcagctgggagtttctgttctctggcaaattcttcactgagtctggaacaataataccctatgattagaactggggaaacagaactgaattgctgtgttatatgaggaattaaaaccttcaaatctctatttcccccaaatactgacccattctggacttttgtaaacatacctaggcccctgttcccctgagagggtgctaagaggaaggatgaagggcttcaggctgggggcagtggacagggaattgggatacctggattctggttctgacagggccacaagctaggatctctaacaaacgcagaaggctttggctcgtcatttcctcttaaaaaggaggagctgggcttcagctctaagaacttcattgccctggggatcagacagcccctacctacccctgcccactcctctggagactgagccttgcccgtgcatatttaggtcatttcccacactgtcttagagaacttgtcaccagaaaccacatgtatttgcatgttttttgttaatttagctaaagcaattgaatgtagatactcagaagaaataaaaaatgatgtttcactctg

SEQ ID NO: 147761 - DNA, 1945 bp, Homo sapiens
  Payload ID: 9232
  Gene Symbol: LEFTY2
  Gene Name: left-right determination factor 2
  ENST ID: ENST00000616737
  CDS Start-End: 34-1152
ccactctgcctcctgctcccccagggcagcaccatgtggcccctgtggctctgctgggcactctgggtgctgcccctggctggccccggggcggccctgaccgaggagcagctcctgggcagcctgctgcggcagctgcagctcagcgaggtgcccgtactggacagggccgacatggagaagctggtcatccccgcccacgtgagggcccagtatgtagtcctgctgcggcgcagccacggggaccgctcccgcggaaagaggttcagccagagcttccgagaggtggccggcaggttcctggcgtcggaggccagcacacacctgctggtgttcggcatggagcagcggctgccgcccaacagcgagctggtgcaggccgtgctgcggctcttccaggagccggtccccaaggccgcgctgcacaggcacgggcggctgtccccgcgcagcgcccaggcccgggtgaccgtcgagtggctgcgcgtccgcgacgacggctccaaccgcacctccctcatcgactccaggctggtgtccgtccacgagagcggctggaaggccttcgacgtgaccgaggccgtgaacttctggcagcagctgagccggccccggcagccgctgctgctacaggtgtcggtgcagagggagcatctgggcccgctggcgtccggcgcccacaagctggtccgctttgcctcgcagggggcgccagccgggcttggggagccccagctggagctgcacaccctggacctcagggactatggagctcagggcgactgtgaccctgaagcaccaatgaccgagggcacccgctgctgccgccaggagatgtacattgacctgcaggggatgaagtgggccaagaactgggtgctggagcccccgggcttcctggcttacgagtgtgtgggcacctgccagcagcccccggaggccctggccttcaattggccatttctggggccgcgacagtgtatcgcctcggagactgcctcgctgcccatgatcgtcagcatcaaggagggaggcaggaccaggccccaggtggtcagcctgcccaacatgagggtgcagaagtgcagctgtgcctcggatggggcgctcgtgccaaggaggctccagcatagggcctggtgtatccattgagccctctaactgaacgtgtgcatagaggtggtcttaatgtaggtcttaactttatacttagcaagttactccatcccaatttagtgctcctgtgtgaccttcgccctgtgtccttccatttcctgtctttcccgtccatcacccatcctaagcacttacgtgagtaaataatgcagctcagatgctgagctctagtaggaaatgctggcatgctgattacaagatacagctgagcaatgcacacattttcagctgggagtttctgttctctggcaaattcttcactgagtctggaacaataataccctatgattagaactggggaaacagaactgaattgctgtgttatatgaggaattaaaaccttcaaatctctatttcccccaaatactgacccattctggacttttgtaaacatacctaggcccctgttcccctgagagggtgctaagaggaaggatgaagggcttcaggctgggggcagtggacagggaattgggatacctggattctggttctgacagggccacaagctaggatctctaacaaacgcagaaggctttggctcgtcatttcctcttaaaaaggaggagctgggcttcagctctaagaacttcattgccctggggatcagacagcccctacctacccctgcccactcctctggagactgagccttgcccgtgcatatttaggtcatttcccacactgtcttagagaacttgtcaccagaaaccacatgtatttgcatgttttttgttaatttagctaaagcaattgaatgtagatactc

SEQ ID NO: 147762 - DNA, 2055 bp, Homo sapiens
  Payload ID: 9233
  Gene Symbol: LGMN
  Gene Name: legumain
  Uniprot ID: Q99538
  ENST ID: ENST00000334869
  CDS Start-End: 244-1545
agatgccacgccccatagctccaccagtcaccgcggcacagtggcccttaagcgaggagcggcggcgcccgcagcaatcacagcagtgccgacgtcgtgggtgtttggtgtgaggctgcgagccgccgcgagttctcacggtcccgccggcgccaccaccgcggtcactcaccgccgccgccgccaccactgccaccacggtcgcctgccacaggtgtctgcaattgaactccaaggtgcagaatggtttggaaagtagctgtattcctcagtgtggccctgggcattggtgccgttcctatagatgatcctgaagatggaggcaagcactgggtggtgatcgtggcaggttcaaatggctggtataattataggcaccaggcagacgcgtgccatgcctaccagatcattcaccgcaatgggattcctgacgaacagatcgttgtgatgatgtacgatgacattgcttactctgaagacaatcccactccaggaattgtgatcaacaggcccaatggcacagatgtctatcagggagtcccgaaggactacactggagaggatgttaccccacaaaatttccttgctgtgttgagaggcgatgcagaagcagtgaagggcataggatccggcaaagtcctgaagagtggcccccaggatcacgtgttcatttacttcactgaccatggatctactggaatactggtttttcccaatgaagatcttcatgtaaaggacctgaatgagaccatccattacatgtacaaacacaaaatgtaccgaaagatggtgttctacattgaagcctgtgagtctgggtccatgatgaaccacctgccggataacatcaatgtttatgcaactactgctgccaaccccagagagtcgtcctacgcctgttactatgatgagaagaggtccacgtacctgggggactggtacagcgtcaactggatggaagattcggacgtggaagatctgactaaagagaccctgcacaagcagtaccacctggtaaaatcgcacaccaacaccagccacgtcatgcagtatggaaacaaaacaatctccaccatgaaagtgatgcagtttcagggtatgaaacgcaaagccagttctcccgtccccctacctccagtcacacaccttgacctcacccccagccctgatgtgcctctcaccatcatgaaaaggaaactgatgaacaccaatgatctggaggagtccaggcagctcacggaggagatccagcggcatctggatgccaggcacctcattgagaagtcagtgcgtaagatcgtctccttgctggcagcgtccgaggctgaggtggagcagctcctgtccgagagagccccgctcacggggcacagctgctacccagaggccctgctgcacttccggacccactgcttcaactggcactcccccacgtacgagtatgcgttgagacatttgtacgtgctggtcaacctttgtgagaagccgtatccgcttcacaggataaaattgtccatggaccacgtgtgccttggtcactactgaagagctgcctcctggaagcttttccaagtgtgagcgccccaccgactgtgtgctgatcagagactggagaggtggagtgagaagtctccgctgctcgggccctcctggggagcccccgctccagggctcgctccaggaccttcttcacaagatgacttgctcgctgttacctgcttccccagtcttttctgaaaaactacaaattagggtgggaaaagctctgtattgagaagggtcatatttgctttctaggaggtttgttgttttgcctgttagttttgaggagcaggaagctcatgggggcttctgtagcccctctcaaaaggagtctttattctgagaatttgaagctgaaacctctttaaatcttcagaatgattttattgaagagggccgcaagccccaaatggaaaactgtttttagaaaatatgatgatttttgattgcttttgtatttaattctgcaggtgttcaagtcttaaaaaataaagatttataacagaacccaaa

SEQ ID NO: 147763 - DNA, 2115 bp, Homo sapiens
  Payload ID: 9233
  Gene Symbol: LGMN
  Gene Name: legumain
  Uniprot ID: Q99538
  ENST ID: ENST00000393218
  CDS Start-End: 339-1640
ccagtcaccgcggcacagtggcccttaagcgaggagcggcggcgcccgcagcaatcacagcagtgccgacgtcgtgggtgtttggtgtgaggctgcgagccgccgcgagttctcacggtcccgccggcgccaccaccgcggtcactcaccgccgccgccgccaccactgccaccacggtcgcctgccacagggtcttactctgttgcccaggctggagtgcagtggcacaatcttggctcactgcaacctctgcctcccgggttcaagcaattctcctgcctcagcctcccgagtagctgggattacaggtgtctgcaattgaactccaaggtgcagaatggtttggaaagtagctgtattcctcagtgtggccctgggcattggtgccgttcctatagatgatcctgaagatggaggcaagcactgggtggtgatcgtggcaggttcaaatggctggtataattataggcaccaggcagacgcgtgccatgcctaccagatcattcaccgcaatgggattcctgacgaacagatcgttgtgatgatgtacgatgacattgcttactctgaagacaatcccactccaggaattgtgatcaacaggcccaatggcacagatgtctatcagggagtcccgaaggactacactggagaggatgttaccccacaaaatttccttgctgtgttgagaggcgatgcagaagcagtgaagggcataggatccggcaaagtcctgaagagtggcccccaggatcacgtgttcatttacttcactgaccatggatctactggaatactggtttttcccaatgaagatcttcatgtaaaggacctgaatgagaccatccattacatgtacaaacacaaaatgtaccgaaagatggtgttctacattgaagcctgtgagtctgggtccatgatgaaccacctgccggataacatcaatgtttatgcaactactgctgccaaccccagagagtcgtcctacgcctgttactatgatgagaagaggtccacgtacctgggggactggtacagcgtcaactggatggaagattcggacgtggaagatctgactaaagagaccctgcacaagcagtaccacctggtaaaatcgcacaccaacaccagccacgtcatgcagtatggaaacaaaacaatctccaccatgaaagtgatgcagtttcagggtatgaaacgcaaagccagttctcccgtccccctacctccagtcacacaccttgacctcacccccagccctgatgtgcctctcaccatcatgaaaaggaaactgatgaacaccaatgatctggaggagtccaggcagctcacggaggagatccagcggcatctggatgccaggcacctcattgagaagtcagtgcgtaagatcgtctccttgctggcagcgtccgaggctgaggtggagcagctcctgtccgagagagccccgctcacggggcacagctgctacccagaggccctgctgcacttccggacccactgcttcaactggcactcccccacgtacgagtatgcgttgagacatttgtacgtgctggtcaacctttgtgagaagccgtatccgcttcacaggataaaattgtccatggaccacgtgtgccttggtcactactgaagagctgcctcctggaagcttttccaagtgtgagcgccccaccgactgtgtgctgatcagagactggagaggtggagtgagaagtctccgctgctcgggccctcctggggagcccccgctccagggctcgctccaggaccttcttcacaagatgacttgctcgctgttacctgcttccccagtcttttctgaaaaactacaaattagggtgggaaaagctctgtattgagaagggtcatatttgctttctaggaggtttgttgttttgcctgttagttttgaggagcaggaagctcatgggggcttctgtagcccctctcaaaaggagtctttattctgagaatttgaagctgaaacctctttaaatcttcagaatgattttattgaagagggccgcaagccccaaatggaaaactgtttttagaaaatatgatgatttttgattgcttttgtatttaattctgcaggtgttcaa

SEQ ID NO: 147764 - DNA, 570 bp, Homo sapiens
  Payload ID: 9233
  Gene Symbol: LGMN
  Gene Name: legumain
  ENST ID: ENST00000554189
  CDS Start-End: 169-315
aatcacagcagtgccgacgtcgtgggtgtttggtgtgaggctgcgagccgccgcgagttctcacggtcccgccggcgccaccaccgcggtcactcaccgccgccgccgccaccactgccaccacggtcgcctgccacaggtgtctgcaattgaactccaaggtgcagaatggtttggaaagtagctgtattcctcagtgtggccctgggcattggtgccgttcctatagatgatcctgaagatggaggcaagcactgggtggtgatcgtggcaggttcaaatggctggtataattataggcaccaggaattgtgatcaacaggcccaatggcacagatgtctatcagggagtcccgaaggactacactggagaggatgttaccccacaaaatttccttgctgtgttgagaggcgatgcagaagcagtgaagggcataggatccggcaaagtcctgaagagtggcccccaggatcacgtgttcatttacttcactgaccatggatctactggaatactggtttttcccaatgaagatcttcatgtaaaggacctgaatgagaccatccatt

SEQ ID NO: 147765 - DNA, 283 bp, Homo sapiens
  Payload ID: 9233
  Gene Symbol: LGMN
  Gene Name: legumain
  ENST ID: ENST00000553918
  CDS Start-End: 225-283
ttctcacggtcccgccggcgccaccaccgcggtcactcaccgccgccgccgccaccactgccaccacggtcgcctgccacagacagaggacagaggtctcgctctctcacccaggccggatggttcactatagccttgacttcccgggctcaagtgatcctccccgctcagccccttgagtagctgggaccacaggtgtctgcaattgaactccaaggtgcagaatggtttggaaagtagctgtattcctcagtgtggccctgggcattggtgccgttcctat

SEQ ID NO: 147766 - DNA, 533 bp, Homo sapiens
  Payload ID: 9233
  Gene Symbol: LGMN
  Gene Name: legumain
  ENST ID: ENST00000554397
  CDS Start-End: 298-533
aatcacagcagtgccgacgtcgtgggtgtttggtgtgaggctgcgagccgccgcgagttctcacggtcccgccggcgccaccaccgcggtcactcaccgccgccgccgccaccactgccaccacggtcgcctgccacagttttgagccagagtctcactctgccacctaggctggagtgcagtggcctgatcttggctcactgcaacctccacctcccggtttcaggcaattctcctgcctcagcctcccaagtagctgagactacaggtgtctgcaattgaactccaaggtgcagaatggtttggaaagtagctgtattcctcagtgtggccctgggcattggtgccgttcctatagatgatcctgaagatggaggcaagcactgggtggtgatcgtggcaggttcaaatggctggtataattataggcaccaggcagacgcgtgccatgcctaccagatcattcaccgcaatgggattcctgacgaacagatcgttgtgatgatgtacgatgacattgcttactctgaaga

SEQ ID NO: 147767 - DNA, 573 bp, Homo sapiens
  Payload ID: 9233
  Gene Symbol: LGMN
  Gene Name: legumain
  ENST ID: ENST00000553802
  CDS Start-End: 169-573
aatcacagcagtgccgacgtcgtgggtgtttggtgtgaggctgcgagccgccgcgagttctcacggtcccgccggcgccaccaccgcggtcactcaccgccgccgccgccaccactgccaccacggtcgcctgccacaggtgtctgcaattgaactccaaggtgcagaatggtttggaaagtagctgtattcctcagtgtggccctgggcattggtgccgttcctatagatgatcctgaagatggaggcaagcactgggtggtgatcgtggcaggttcaaatggctggtataattataggcaccaggcagacgcgtgccatgcctaccagatcattcaccgcaatgggattcctgacgaacagatcgttgtgatgatcaatcccactccaggaattgtgatcaacaggcccaatggcacagatgtctatcagggagtcccgaaggactacactggagaggatgttaccccacaaaatttccttgctgtgttgagaggcgatgcagaagcagtgaagggcataggatccggcaaagtcctgaagagtggcccccaggatcacgtgttcatttac

SEQ ID NO: 147768 - DNA, 1832 bp, Homo sapiens
  Payload ID: 9233
  Gene Symbol: LGMN
  Gene Name: legumain
  ENST ID: ENST00000557609
  CDS Start-End: 145-498
ggtgtttggtgtgaggctgcgagccgccgcgagttctcacggtcccgccggcgccaccaccgcggtcactcaccgccgccgccgccaccactgccaccacggtcgcctgccacaggtgtctgcaattgaactccaaggtgcagaatggtttggaaagtagctgtattcctcagtgtggccctgggcattggtgccgttcctatagatgatcctgaagatggaggcaagcactgggtggtgatcgtggcaggttcaaatggctggtataattataggcaccaggcagacgcgtgccatgcctaccagatcattcaccgcaatgggattcctgacgaacagatcgttgtgatgatgtacgatgacattgcttactctgaagacaatcccactccaggaattgtgatcaacaggcccaatggcacagatgtctatcagggagtcccgaaggactacactggagagtggcccccaggatcacgtgttcatttacttcactgaccatggatctactggaatactggtttttcccaatgaagatcttcatgtaaaggacctgaatgagaccatccattacatgtacaaacacaaaatgtaccgaaagatggtgttctacattgaagcctgtgagtctgggtccatgatgaaccacctgccggataacatcaatgtttatgcaactactgctgccaaccccagagagtcgtcctacgcctgttactatgatgagaagaggtccacgtacctgggggactggtacagcgtcaactggatggaagattcggacgtggaagatctgactaaagagaccctgcacaagcagtaccacctggtaaaatcgcacaccaacaccagccacgtcatgcagtatggaaacaaaacaatctccaccatgaaagtgatgcagtttcagggtatgaaacgcaaagccagttctcccgtccccctacctccagtcacacaccttgacctcacccccagccctgatgtgcctctcaccatcatgaaaaggaaactgatgaacaccaatgatctggaggagtccaggcagctcacggaggagatccagcggcatctggatgccaggcacctcattgagaagtcagtgcgtaagatcgtctccttgctggcagcgtccgaggctgaggtggagcagctcctgtccgagagagccccgctcacggggcacagctgctacccagaggccctgctgcacttccggacccactgcttcaactggcactcccccacgtacgagtatgcgttgagacatttgtacgtgctggtcaacctttgtgagaagccgtatccgcttcacaggataaaattgtccatggaccacgtgtgccttggtcactactgaagagctgcctcctggaagcttttccaagtgtgagcgccccaccgactgtgtgctgatcagagactggagaggtggagtgagaagtctccgctgctcgggccctcctggggagcccccgctccagggctcgctccaggaccttcttcacaagatgacttgctcgctgttacctgcttccccagtcttttctgaaaaactacaaattagggtgggaaaagctctgtattgagaagggtcatatttgctttctaggaggtttgttgttttgcctgttagttttgaggagcaggaagctcatgggggcttctgtagcccctctcaaaaggagtctttattctgagaatttgaagctgaaacctctttaaatcttcagaatgattttattgaagagggccgcaagccccaaatggaaaactgtttttagaaaatatgatgatttttgattgcttttgtatttaattctgcaggtgtt

SEQ ID NO: 147769 - DNA, 1054 bp, Homo sapiens
  Payload ID: 9233
  Gene Symbol: LGMN
  Gene Name: legumain
  ENST ID: ENST00000556097
  CDS Start-End: 154-825
gacgtcgtgggtgtttggtgtgaggctgcgagccgccgcgagttctcacggtcccgccggcgccaccaccgcggtcactcaccgccgccgccgccaccactgccaccacggtcgcctgccacaggtgtctgcaattgaactccaaggtgcagaatggtttggaaagtagctgtattcctcagtgtggccctgggcattggtgccgttcctatagatgatcctgaagatggaggcaagcactgggtggtgatcgtggcaggttcaaatggctggtataattataggcaccaggcagacgcgtgccatgcctaccagatcattcaccgcaatgggattcctgacgaacagatcgttgtgatgatgtacgatgacattgcttactctgaagacaatcccactccaggaattgtgatcaacaggcccaatggcacagatgtctatcagggagtcccgaaggactacactggagaggatgttaccccacaaaatttccttgctgtgttgagaggcgatgcagaagcagtgaagggcataggatccggcaaagtcctgaagagtggcccccaggatcacgtgttcatttacttcactgaccatggatctactggaatactggtttttcccaatgaagatcttcatgtaaaggacctgaatgagaccatccattacatgtacaaacacaaaatgtaccgaaagatggtgttctacattgaagcctgtgagtctgggtccatgatgaaccacctgccggataacatcaatggtaggtggttggggcgccggcctcgacctgggctggcaagcaggttgctcagacaccgctgacatggaactgagcattctcctttatgcaactactgctgccaaccccagagagtcgtcctacgcctgttactatgatgagaagaggtccacgtacctgggggactggtacagcgtcaactggatggaagattcggacgtggaagatctgactaaagagaccctgcacaagcagtaccacctggtaaaatcgcacaccaacaccagccacgtcatgcagtatggaaacaaa

SEQ ID NO: 147770 - DNA, 495 bp, Homo sapiens
  Payload ID: 9233
  Gene Symbol: LGMN
  Gene Name: legumain
  ENST ID: ENST00000553371
  CDS Start-End: 324-495
aatcacagcagtgccgacgtcgtgggtgtttggtgtgaggctgcgagccgccgcgagttctcacggtcccgccggcgccaccaccgcggtcactcaccgccgccgccgccaccactgccaccacggtcgcctgccacaggtggagtctcactctgttgcccaggctggagtgcagtggcacaatctcagctcactgcaaccgctgcttcccaggttcaagccattctcctgcctcagcctcccgagtagctgggattacaggtgcccaccaccacgcacaggtagcatgcccaggtgtctgcaattgaactccaaggtgcagaatggtttggaaagtagctgtattcctcagtgtggccctgggcattggtgccgttcctatagatgatcctgaagatggaggcaagcactgggtggtgatcgtggcaggttcaaatggctggtataattataggcaccaggcagacgcgtgccatgcctaccagatcattcacc

SEQ ID NO: 147771 - DNA, 543 bp, Homo sapiens
  Payload ID: 9233
  Gene Symbol: LGMN
  Gene Name: legumain
  ENST ID: ENST00000555169
  CDS Start-End: 1-275
atcccactccaggaattgtgatcaacaggcccaatggcacagatgtctatcagggagtcccgaaggactacactggagaggatgttaccccacaaaatttccttgctgtgttgagaggtggagtgagaagtctccgctgctcgggccctcctggggagcccccgctccagggctcgctccaggaccttcttcacaagatgacttgctcgctgttacctgcttccccagtcttttctgaaaaactacaaattagggtgggaaaagctctgtattgagaagggtcatatttgctttctaggaggtttgttgttttgcctgttagttttgaggagcaggaagctcatgggggcttctgtagcccctctcaaaaggagtctttattctgagaatttgaagctgaaacctctttaaatcttcagaatgattttattgaagagggccgcaagccccaaatggaaaactgtttttagaaaatatgatgatttttgattgcttttgtatttaattctgcaggtgttcaagtcttaaaaaataaagatttat

SEQ ID NO: 147772 - DNA, 1728 bp, Homo sapiens
  Payload ID: 9233
  Gene Symbol: LGMN
  Gene Name: legumain
  Uniprot ID: Q99538
  ENST ID: ENST00000555699
  CDS Start-End: 154-1272
gacgtcgtgggtgtttggtgtgaggctgcgagccgccgcgagttctcacggtcccgccggcgccaccaccgcggtcactcaccgccgccgccgccaccactgccaccacggtcgcctgccacaggtgtctgcaattgaactccaaggtgcagaatggtttggaaagtagctgtattcctcagtgtggccctgggcattggtgccgttcctatagatgatcctgaagatggaggcaagcactgggtggtgatcgtggcaggttcaaatggctggtataattataggcaccaggcagacgcgtgccatgcctaccagatcattcaccgcaatgggattcctgacgaacagatcgttgtgatgatgtacgatgacattgcttactctgaagacaatcccactccaggaattgtgatcaacaggcccaatggcacagatgtctatcagggagtcccgaaggactacactggagaggatgttaccccacaaaatttccttgctgtgttgagaggcgatgcagaagcagtgaagggcataggatccggcaaagtcctgaagagtggcccccaggatcacgtgttcatttacttcactgaccatggatctactggaatactggtttttcccaatgaagatcttcatgtaaaggacctgaatgagaccatccattacatgtacaaacacaaaatgtaccgaaagatggtgttctacattgaagcctgtgagtctgggtccatgatgaaccacctgccggataacatcaatgtttatgcaactactgctgccaaccccagagagtcgtcctacgcctgttactatgatgagaagaggtccacgtacctgggggactggtacagcgtcaactggatggaagattcggacgtggaagatctgactaaagagaccctgcacaagcagtaccacctggtaaaatcgcacaccaacaccagccacgtcatgcagtatggaaacaaaacaatctccaccatgaaagtgatgcagtttcagggtatgaaacgcaaagccagttctcccgtccccctacctccagtcacacaccttgacctcacccccagccctgatgtgcctctcaccatcatgaaaaggaaactgatgaacaccaatgatctggaggagtccaggcagctcacggaggagatccagcggcatctggatgataaaattgtccatggaccacgtgtgccttggtcactactgaagagctgcctcctggaagcttttccaagtgtgagcgccccaccgactgtgtgctgatcagagactggagaggtggagtgagaagtctccgctgctcgggccctcctggggagcccccgctccagggctcgctccaggaccttcttcacaagatgacttgctcgctgttacctgcttccccagtcttttctgaaaaactacaaattagggtgggaaaagctctgtattgagaagggtcatatttgctttctaggaggtttgttgttttgcctgttagttttgaggagcaggaagctcatgggggcttctgtagcccctctcaaaaggagtctttattctgagaatttgaagctgaaacctctttaaatcttcagaatgattttattgaagagggccgcaagccccaaatggaaaactgtttttagaaaatatgatgatttttgattgcttttgtatttaattctgcaggtgttcaagtcttaaaaaataaagatttataacagaacccaaata

SEQ ID NO: 147773 - DNA, 546 bp, Homo sapiens
  Payload ID: 9233
  Gene Symbol: LGMN
  Gene Name: legumain
  ENST ID: ENST00000554919
  CDS Start-End: 311-546
aatcacagcagtgccgacgtcgtgggtgtttggtgtgaggctgcgagccgccgcgagttctcacggtcccgccggcgccaccaccgcggtcactcaccgccgccgccgccaccactgccaccacggtcgcctgccacaggtggagtctcactctgttgcccaggctggagtgcagtggcacaatctcagctcactgcaaccgctgcttcccaggttcaagccattctcctgcctcagcctcccgagtagctgggattacaggtgcccaccaccacgcacaggtgtctgcaattgaactccaaggtgcagaatggtttggaaagtagctgtattcctcagtgtggccctgggcattggtgccgttcctatagatgatcctgaagatggaggcaagcactgggtggtgatcgtggcaggttcaaatggctggtataattataggcaccaggcagacgcgtgccatgcctaccagatcattcaccgcaatgggattcctgacgaacagatcgttgtgatgatgtacgatgacattgcttactctgaaga

SEQ ID NO: 147774 - DNA, 588 bp, Homo sapiens
  Payload ID: 9233
  Gene Symbol: LGMN
  Gene Name: legumain
  ENST ID: ENST00000554080
  CDS Start-End: 416-588
aatcacagcagtgccgacgtcgtgggtgtttggtgtgaggctgcgagccgccgcgagttctcacggtcccgccggcgccaccaccgcggtcactcaccgccgccgccgccaccactgccaccacggtcgcctgccacagggtcttactctgttgcccaggctggagtgcagtggcacaatcttggctcactgcaacctctgcctcccgggttcaagcaattctcctgcctcagcctcccgagtagctgggattacagttttgagccagagtctcactctgccacctaggctggagtgcagtggcctgatcttggctcactgcaacctccacctcccggtttcaggcaattctcctgcctcagcctcccaagtagctgagactacaggtgtctgcaattgaactccaaggtgcagaatggtttggaaagtagctgtattcctcagtgtggccctgggcattggtgccgttcctatagatgatcctgaagatggaggcaagcactgggtggtgatcgtggcaggttcaaatggctggtataattataggcaccaggcagacgcgtgccatgcctaccagatcattcaccg

SEQ ID NO: 147775 - DNA, 1797 bp, Homo sapiens
  Payload ID: 9233
  Gene Symbol: LGMN
  Gene Name: legumain
  Uniprot ID: Q99538
  ENST ID: ENST00000557434
  CDS Start-End: 187-1317
agcggcggcgcccgcagcaatcacagcagtgccgacgtcgtgggtgtttggtgtgaggctgcgagccgccgcgagttctcacggtcccgccggcgccaccaccgcggtcactcaccgccgccgccgccaccactgccaccacggtcgcctgccacaggtgtctgcaattgaactccaaggtgcagaatggtttggaaagtagctgtattcctcagtgtggccctgggcattggtgccgttcctatagatgatcctgaagatggaggcaagcactgggtggtgatcgtggcaggttcaaatggctggtataattataggcaccaggcagacgcgtgccatgcctaccagatcattcaccgcaatgggattcctgacgaacagatcgttgtgatgatgtacgatgacattgcttactctgaagacaatcccactccaggaattgtgatcaacaggcccaatggcacagatgtctatcagggagtcccgaaggactacactggagaggatgttaccccacaaaatttccttgctgtgttgagaggcgatgcagaagcagtgaagggcataggatccggcaaagtcctgaagagtggcccccaggatcacgtgttcatttacttcactgaccatggatctactggaatactggtttttcccaatgaagatcttcatgtaaaggacctgaatgagaccatccattacatgtacaaacacaaaatgtaccgaaagatggtgttctacattgaagcctgtgagtctgggtccatgatgaaccacctgccggataacatcaatgtttatgcaactactgctgccaaccccagagagtcgtcctacgcctgttactatgatgagaagaggtccacgtacctgggggactggtacagcgtcaactggatggaagattcggacgtggaagatctgactaaagagaccctgcacaagcagtaccacctggtaaaatcgcacaccaacaccagccacgtcatgcagtatggaaacaaaacaatctccaccatgaaagtgatgcagtttcagggtatgaaacgcaaagccagttctcccgtccccctacctccagtcacacaccttgacctcacccccagccctgatgtgcctctcaccatcatgaaaaggaaactgatgaacaccaatgatctggaggagtccaggcagctcacggaggagatccagcggcatctggattacgagtatgcgttgagacatttgtacgtgctggtcaacctttgtgagaagccgtatccgcttcacaggataaaattgtccatggaccacgtgtgccttggtcactactgaagagctgcctcctggaagcttttccaagtgtgagcgccccaccgactgtgtgctgatcagagactggagaggtggagtgagaagtctccgctgctcgggccctcctggggagcccccgctccagggctcgctccaggaccttcttcacaagatgacttgctcgctgttacctgcttccccagtcttttctgaaaaactacaaattagggtgggaaaagctctgtattgagaagggtcatatttgctttctaggaggtttgttgttttgcctgttagttttgaggagcaggaagctcatgggggcttctgtagcccctctcaaaaggagtctttattctgagaatttgaagctgaaacctctttaaatcttcagaatgattttattgaagagggccgcaagccccaaatggaaaactgtttttagaaaatatgatgatttttgattgcttttgtatttaattctgcaggtgttcaagtctt

SEQ ID NO: 147776 - DNA, 3970 bp, Homo sapiens
  Payload ID: 9234
  Gene Symbol: LMOD1
  Gene Name: leiomodin 1 (smooth muscle)
  Uniprot ID: P29536
  ENST ID: ENST00000367288
  CDS Start-End: 248-2050
gttgtcgggtcttattggccgctgattagaccagccggggtccactagccctgggcttcagggaggctgctgcgtccagtgaacacttcagcacctgtagcacagaagggccaaggagctgcagtcctcgaccagcaggaggtttgctcctcagcccactcgctgcatccagatcagctcacccctctcccttccctgcccaccaggactctgatagcccctggcagccacagcccattttgccaagatgtctagagtagccaaatatcgccggcaggtgagtgaagaccccgacatcgacagcctgctggagaccctgtctcccgaggagatggaggagctggagaaggagctggacgtggtggacccagacgggagtgttcccgtggggctgcggcagagaaaccagacggagaaacagtccacgggtgtgtacaaccgggaggccatgctcaacttctgtgaaaaggagaccaagaaacttatgcagagggagatgtccatggatgaaagcaagcaagtggagaccaagacagatgccaagaatggagaggaaaggggcagagatgccagcaaaaaagccctgggccccagacgggactcagatctggggaaggagccaaagaggggtggtttaaagaaaagcttctctagagacagagatgaagctggtggcaagagtggcgagaagcccaaggaggagaagatcatccggggcattgacaagggccgggtcagggctgcagtggataagaaggaggcagggaaggatgggagaggagaggagagggcagtggccaccaagaaggaagaggagaagaaagggagtgacaggaacacaggcttgagcagggacaaggataaaaagagagaggagatgaaggaggtggccaagaaagaggatgatgagaaggtaaaaggggagcgtaggaacacagacaccagaaaagagggtgagaagatgaaaagagcaggtgggaacacagacatgaaaaaggaggatgagaaggtaaaaagaggaactgggaacacagacaccaaaaaggacgatgaaaaagtcaagaagaatgaacccttacatgaaaaggaagccaaggatgacagcaagaccaaaacacccgagaaacagacgcccagtggccccaccaagccctctgaaggaccggccaaggtggaggaggaggcagctcccagcatatttgatgagcctctggagagagtgaagaacaatgaccccgagatgactgaggtgaacgtcaacaactcagactgcatcacaaatgagatcttggtccggtttactgaggctctggagttcaacactgtggttaagctgttcgccttggccaacacgcgagccgatgaccacgtggcctttgccattgccatcatgctcaaggccaacaagaccatcaccagcctcaacctggactccaaccacatcacaggcaaaggcatcctggccatcttccgggccctcctccagaacaacacgctgaccgagctccgcttccacaaccagcgacacatctgtggaggcaagacggagatggagatcgccaagctgctgaaggagaatactaccctgctcaagctgggctaccattttgagctggccgggccccgaatgactgtcaccaatctgctcagccgcaacatggacaagcagagacaaaagcggctgcaggagcaaaggcaggcacaggaagccaagggagagaagaaggatctgctggaggtacccaaggccggggccgtggctaagggctccccaaaaccttcacctcaaccatctccaaagccctctccaaagaactcacccaaaaaagggggtgctccagctgccccaccaccccctccccctcccttggctccaccccttatcatggagaacctgaagaattcactctcaccagctacccagaggaagatgggagacaaagtcctccctgcccaggagaagaactcccgtgaccagctattggctgccatccgctccagcaacctcaagcagctcaagaaggtggaagtgcccaaactgcttcagtaggaccaggctgccaggcaccatctgccaatgccatgactgctcaggcctcacctcccagggctacacagaccctgcccaccccatccctggctgacctgctgtggatgtccctattctgccatgggagagtccaggcctgggtcacgctcaaggaaggatgccttatctcttctcactttccttttcttgtctctgaggctctccaaattttgctttagtacatggagctcaggtttctggacaagaagagtccttttagcacatcactgagaagatggcactgtccagggcccatgtagctggcaagctgcaaaaggcctgtgatccaggaaagatgtcccacagggaccacatccaccccagccccactgccctccagggccaggattcaggcctctgaggagcccacggggcaaagctgctgggccagtggcactctgtgtgggaaaatggcagaaagatggagaggcatgggggcccaaaggggagcgtggggaggggctgaggataccccaaagtccaggctaattagaggatgtggcaggggcagtggcctggatgcacagtgcctgatgggagtaggctccagacaggaggagtgggacagacagcagctggacttgaaggtttgatgccaaagcagacattttcctcacacccacctgctgctgtatgaatagctgtgtatctgtttttccataagattttgataatatatacaaacctttagctgtgaatggctgtgccccacctgttgtcctgaactgtgagtcctgatcctaaccctgggctccctggaggactctagaagctcaggttccctgccacactatttgagttggccaagaaataaattcacatcctcagaaagtgcagcatggaggaaaatctgaactctaagcagaagactctccactgacctggttgtccaggtctagaaggccaggcctctactaggtctgctcctgaaccagtcctgctgcctggagtcagtagccagagttgttctcaggggtgctggggcagagtggagcccagggtgctgggatggctatattaggcatgttcagggatgctcattccatgactctgcctaaccatgggctcagggccaggtcctcacagcagtcacaggcccaggaaggcggcaggcagagaagtggagtgactatttggagaatagcacccatatctgtgtgccctagggctcagaggggcctcatcttccccagccctccccacctgctcaccaattccacttcctgccccaactgcaggaatgctgacaatgctgccatgcccaccatcgggtgtaggtgaaaggcatctttctgaatttcattctcttgaaggtgctgccaccccttggcactgtggaactgccaccttgggtctgtgtcacttgtaggtttctctgcctccaggttgcctcaacagcaggaggcacagcagtttcaccatctttgaggtgagggtggggtgccccagctaggaagcaagatcgctgtgctaggtctgaccaaaaccagagggcagtctagtcctgggggtaaagccctcagatcccagggtacactcttctccattccctccacccacttgcctgtcaccccagtcacctaagcaatcactgggcccagaggagaggagacagacacacactggctcctggacctaaagggtatgagctggagctaaggccagctagagcttccactgtcagccctcactgtcagtcccactgcacccccctgtgcctgctgggcactgggcactagctagatgctttaggttgcttcagctgatccttcaactctgtgaggtggataccaatattctattttgcagatagaatttggcccagagaggttaactaatatatccatgatcacacagctaataaaagtcagagctcaggtc

SEQ ID NO: 147777 - DNA, 3058 bp, Homo sapiens
  Payload ID: 9234
  Gene Symbol: LMOD1
  Gene Name: leiomodin 1 (smooth muscle)
  ENST ID: ENST00000616739
  CDS Start-End: 333-1142
agttgtcgggtcttattggccgctgattagaccagccggggtccactagccctgggcttcagggaggctgctgcgtccagtgaacacttcagcacctgtagcacagaagggccaaggagctgcagtcctcgaccagcaggaggtttgctcctcagcccactcgctgcatccagatcagctcacccctctcccttccctgcccaccaggactctgatagcccctggcagccacagcccattttgccaagatgtctagagtagccaaatatcgccggcaggtgagtgaagaccccgacatcgacagcctgctggagaccctgtctcccgaggagatggaggagctggagaaggagctggacgtggtggacccagacgggagtgttcccgtggggctgcggcagagaaaccagacggagaaacagtccacgggtgtgtacaaccgggaggccatgctcaacttctgtgaaaaggagaccaagaaacttatgcagagggagatgtccatggatgaaagcaagcaagtggagaccaagacagatgccaagaatggagaggaaaggggcagagatgccagcaaaaaagccctgggccccagacgggactcagatctggggaaggagccaaagaggggtggtttaaagaaaagcttctctagagacagagatgaagctggtggcaagagtggcgagaagcccaaggaggagaagatcatccggggcattgacaagggccgggtcagggctgcagtggataagaaggaggcagggaaggatgggagaggagaggagagggcagtggccaccaagaaggaagaggagaagaaagggagtgacaggaacacaggcttgagcagggacaaggataaaaagagagaggagatgaaggaggtggccaagaaagaggatgatgagaaggtaaaagggggtgctccagctgccccaccaccccctccccctcccttggctccaccccttatcatggagaacctgaagaattcactctcaccagctacccagaggaagatgggagacaaagtcctccctgcccaggagaagaactcccgtgaccagctattggctgccatccgctccagcaacctcaagcagctcaagaaggtggaagtgcccaaactgcttcagtaggaccaggctgccaggcaccatctgccaatgccatgactgctcaggcctcacctcccagggctacacagaccctgcccaccccatccctggctgacctgctgtggatgtccctattctgccatgggagagtccaggcctgggtcacgctcaaggaaggatgccttatctcttctcactttccttttcttgtctctgaggctctccaaattttgctttagtacatggagctcaggtttctggacaagaagagtccttttagcacatcactgagaagatggcactgtccagggcccatgtagctggcaagctgcaaaaggcctgtgatccaggaaagatgtcccacagggaccacatccaccccagccccactgccctccagggccaggattcaggcctctgaggagcccacggggcaaagctgctgggccagtggcactctgtgtgggaaaatggcagaaagatggagaggcatgggggcccaaaggggagcgtggggaggggctgaggataccccaaagtccaggctaattagaggatgtggcaggggcagtggcctggatgcacagtgcctgatgggagtaggctccagacaggaggagtgggacagacagcagctggacttgaaggtttgatgccaaagcagacattttcctcacacccacctgctgctgtatgaatagctgtgtatctgtttttccataagattttgataatatatacaaacctttagctgtgaatggctgtgccccacctgttgtcctgaactgtgagtcctgatcctaaccctgggctccctggaggactctagaagctcaggttccctgccacactatttgagttggccaagaaataaattcacatcctcagaaagtgcagcatggaggaaaatctgaactctaagcagaagactctccactgacctggttgtccaggtctagaaggccaggcctctactaggtctgctcctgaaccagtcctgctgcctggagtcagtagccagagttgttctcaggggtgctggggcagagtggagcccagggtgctgggatggctatattaggcatgttcagggatgctcattccatgactctgcctaaccatgggctcagggccaggtcctcacagcagtcacaggcccaggaaggcggcaggcagagaagtggagtgactatttggagaatagcacccatatctgtgtgccctagggctcagaggggcctcatcttccccagccctccccacctgctcaccaattccacttcctgccccaactgcaggaatgctgacaatgctgccatgcccaccatcgggtgtaggtgaaaggcatctttctgaatttcattctcttgaaggtgctgccaccccttggcactgtggaactgccaccttgggtctgtgtcacttgtaggtttctctgcctccaggttgcctcaacagcaggaggcacagcagtttcaccatctttgaggtgagggtggggtgccccagctaggaagcaagatcgctgtgctaggtctgaccaaaaccagagggcagtctagtcctgggggtaaagccctcagatcccagggtacactcttctccattccctccacccacttgcctgtcaccccagtcacctaagcaatcactgggcccagaggagaggagacagacacacactggctcctggacctaaagggtatgagctggagctaaggccagctagagcttccactgtcagccctcactgtcagtcccactgcacccccctgtgcctgctgggcactgggcactagctagatgctttaggttgcttcagctgatccttcaactctgtgaggtggataccaatattctattttgcagatagaatttggcccagagaggttaactaatatatccatgatcacacagctaataaaagtcagagctca

SEQ ID NO: 147778 - DNA, 918 bp, Homo sapiens
  Payload ID: 9235
  Gene Symbol: LMOD2
  Gene Name: leiomodin 2 (cardiac)
  ENST ID: ENST00000456238
  CDS Start-End: 96-575
tgttgaccagcctgccacttgcctccctgcctgcttctggccgccttgaatgcctggtccttcaagctccttctgggtctgacaaagcagggaccatgtctacctttggctaccgaagaggactcagtaaatacgaatccatcgacgaggatgaactcctcgcctccctgtcagccgaggagctgaaggagctagagagagagttggaagacattgaacctgaccgcaaccttcccgtggggctaaggcaaaagagcctgacagagaaaacccccacagggacattcagcagagaggcactgatggcctattgggaaaaggagtcccaaaaactcttggagaaggagaggctgggggaatgtggaaaggtcaagaaacagccaaacagtattctaaaggaaataaaaaattctctgaggtcagtgcaagagaagaaaatggaagacagttcccgaccttctaccccacagagatcagctcatgagaatctcatggaagcaattcggggaagcagcataaaacagctaaagcgggtaagtaaccagagaacagacataggggcacagataaagtaaatgagttgtcctccattgcatggtggtaccaaagtcacctctcacaatacttatcaatactttcaatattttagtatgcgagagcaaacacaccaagtttgaaacattaggagcaggcacacaagtgagcacatttctatttgagaggaacgcctgggccgctttcccagcctctcaatcatataagggcaaggaccattttcatacacgtcccaattcccttaagaagaaaaccagggaatataatctaaattccaaaaggattcaccacttgtcaaaaattttaccacagagttgtgactgattcgatacctaatttataacataaaatttataatgtggt

SEQ ID NO: 147779 - DNA, 2346 bp, Homo sapiens
  Payload ID: 9235
  Gene Symbol: LMOD2
  Gene Name: leiomodin 2 (cardiac)
  Uniprot ID: Q6P5Q4
  ENST ID: ENST00000458573
  CDS Start-End: 158-1801
gcattgtcacagccctgtatcaccactcttaaaaggctcccacagccactcctagcaccagttgttgaccagcctgccacttgcctccctgcctgcttctggccgccttgaatgcctggtccttcaagctccttctgggtctgacaaagcagggaccatgtctacctttggctaccgaagaggactcagtaaatacgaatccatcgacgaggatgaactcctcgcctccctgtcagccgaggagctgaaggagctagagagagagttggaagacattgaacctgaccgcaaccttcccgtggggctaaggcaaaagagcctgacagagaaaacccccacagggacattcagcagagaggcactgatggcctattgggaaaaggagtcccaaaaactcttggagaaggagaggctgggggaatgtggaaaggttgcagaagacaaagaggaaagtgaagaagagcttatctttactgaaagtaacagtgaggtttctgaggaagtgtatacagaggaggaggaggaggagtcccaggaggaagaggaggaagaagacagtgacgaagaggaaagaacaattgaaactgcaaaagggattaatggaactgtaaattatgatagtgtcaattctgacaactctaagccaaagatatttaaaagtcaaatagagaacataaatttgaccaatggcagcaatgggaggaacacagagtccccagctgccattcacccttgtggaaatcctacagtgattgaggacgctttggacaagattaaaagcaatgaccctgacaccacagaagtcaatttgaacaacattgagaacatcacaacacagacccttacccgctttgctgaagccctcaaggacaacactgtggtgaagacgttcagtctggccaacacgcatgccgacgacagtgcagccatggccattgcagagatgctcaaagtcaatgagcacatcaccaacgtaaacgtcgagtccaacttcataacgggaaaggggatcctggccatcatgagagctctccagcacaacacggtgctcacggagctgcgtttccataaccagaggcacatcatgggcagccaggtggaaatggagattgtcaagctgctgaaggagaacacgacgctgctgaggctgggataccattttgaactcccaggaccaagaatgagcatgacgagcattttgacaagaaatatggataaacagaggcaaaaacgtttgcaggagcaaaaacagcaggagggatacgatggaggacccaatcttaggaccaaagtctggcaaagaggaacacctagctcttcaccttatgtatctcccaggcactcaccctggtcatccccaaaactccccaaaaaagtccagactgtgaggagccgtcctctgtctcctgtggccacacctcctcctcctccccctcctcctcctcctccccctccttcttcccaaaggctgccaccacctcctcctcctccccctcctccactcccagagaaaaagctcattaccagaaacattgcagaagtcatcaaacaacaggagagtgcccaacgggcattacaaaatggacaaaaaaagaaaaaagggaaaaaggtcaagaaacagccaaacagtattctaaaggaaataaaaaattctctgaggtcagtgcaagagaagaaaatggaagacagttcccgaccttctaccccacagagatcagctcatgagaatctcatggaagcaattcggggaagcagcataaaacagctaaagcgggtggaagttccagaagccctgcgataaaaacatgatctttagaagaggatgcagaactgttcagtggtattacatgaaatgcattgtgagatgtttctaaaataccttcttcaattcaaaatgatccctgactttaaaaataatctcacccattaattccaaagagaatcttaagaaacaatcagcatgtttcttctgtaaatatgaaaataaatttcttttttatgtcgtgagatttgtattggcaagaagcagttaatttaaagatgctcttcctatctgtggatgtgttggtaactccgagttgtaatgagttcatgaaatgtgctgttatttttgtaatctcaataaatgtggattgaagttttttccctttttttaaagccaaactaatatttttctgtgacttgatacatctgtcagatttttgtaatctcgataaatgtgtattgaagttttttccctttttttaaaaagccaaactaatatttttctgtgagttaatacatctgtcaggtgtgtatgtaacattactggacattaaaaaaaaatattacattctcacccaaaaa

SEQ ID NO: 147780 - DNA, 4086 bp, Homo sapiens
  Payload ID: 9236
  Gene Symbol: LMOD3
  Gene Name: leiomodin 3 (fetal)
  Uniprot ID: Q0VAK6
  ENST ID: ENST00000420581
  CDS Start-End: 181-1863
atcactcctagctgctcagcaaaccactgaggttcctgggaaaaaaaaaaaaatatctcaagggtgtgttaacttgggacactcgttaactgggggaccttcttgaggcttttttccttctttttaaaaatcatctttgattattcttcttttctagtaaaataatatttagaaaaaataatgtcagagcacagcagaaattcagatcaagaagaacttctcgatgaggagattaatgaagatgaaatcttggccaacttgtctgctgaagaactgaaagaactgcagtcggaaatggaagtcatggcccctgaccccagccttcccgtgggaatgattcagaaagatcaaactgacaagccaccgacaggaaacttcaatcataaatctcttgttgattatatgtattgggaaaaggcatccaggcgcatgctggaagaggaacgagttcctgtcacctttgtgaaatccgaggaaaagactcaagaagagcatgaagaaatagaaaaacgtaataaaaatatggcccagtatttaaaagaaaagctcaataatgaaatagttgcaaataaaagagaatcaaagggcagcagcaatatccaagaaacagatgaagaagatgaagaagaagaagatgatgatgatgacgacgaaggagaagatgatggtgaagagagtgaagaaacgaacagagaagaggaaggcaaagcaaaggaacaaattagaaattgtgagaacaactgccagcaggtaactgacaaagcattcaaagaacagagagacagaccagaggcccaagaacaaagtgagaaaaaaatatcgaaattagatcctaagaagttagctctagacaccagctttttgaaggtaagtacaaggccttcaggaaaccagacagacctggatgggagcttgaggagagttaggaaaaatgatcctgacatgaaggaactcaacctgaacaacattgaaaacatccccaaagaaatgttactggactttgtcaatgcaatgaagaaaaacaagcacatcaaaacattcagtttagccaatgtgggtgcagatgagaatgtagcatttgccttggctaacatgttgcgtgaaaatagaagcatcaccactctcaacatcgagtccaatttcatcacaggtaaagggattgtggccatcatgaggtgtctccagtttaatgagacgctaactgagcttcggtttcacaatcagaggcacatgttgggtcaccatgctgaaatggaaatagccaggcttttgaaggcaaacaacactctcctgaagatgggctaccattttgagcttccgggtcccagaatggtggtcactaatctgctcaccaggaatcaggataaacaaaggcagaaacgacaggaagagcaaaaacagcagcaactcaaggaacagaagaagctgatagccatgttagagaatgggttggggctgccccctgggatgtgggagctgttgggaggacccaagccagattccagaatgcaggaattcttccagccaccgccacctcggcctcccaacccccaaaatgtcccctttagtcaacgcagtgaaatgatgaaaaagccatcgcaggccccgaagtacaggacagaccctgactccttccgggtggtgaagctgaagagaatccagcgcaaatctcggatgccggaagccagagaaccacccgagaaaaccaacctcaaagatgtcatcaaaacgctcaagccagtgccgagaaacaggccacccccattggtggaaatcactcccagagatcagctgctaaacgacattcgtcacagcagtgtcgcctatcttaaacctgtgcaactgccaaaagaactggcgtaagaggcaacagagccatctagaagaacaagaaatggaaatagtgactcttggattacagcatggagactatgtcagcagcaatactttaggatccacgtggcagaactggaaacaatgctaccatctgataagggtatttgtaaaaggcagaatgtttgggccatgaagaagtaggggctgaagaggaaggtggaaggagataaaatataatatttagaggcaatattttctacttgcaatcaatttgagtgactcaggtgaaatttagagtcatatttcccgaagcagaagttaaagaaaattttttaaacatttgctttattattgttttcttctggtaaataataaatataacagaagtgttaactattgtattcccatttttttctccttccatctcttctgcggtaattcatcacatagtatcttaaagggaacaaataatgtttcatcctatggaaatgtgaaggatgaattgagctcctggcccttctgatgctttgaaatggaaggattgttccttagagcttctctgcagaatcagtggagattttcagtttcccaccctgcctggctttctctcttggtgactcccttggtgttttggagtattctttctataggggtacctgtgaggggcagaacacgtaagccacagaacatggtgaaaactaagtgtcactaggaaaagtaatgggaaagtaaaccctgcatatatgaaaacttcctggcagcaagttttcatatatagagggacaatgggagacagcatgctgtttttatagaaaagaagttttacataatatagttattgacaagcttttggttttggctaaatacacacacacacacacacgctcatatgtgtttactctgtaagtctaatttgattttatcactctcaaacatattttaaaggaaacttgcttacaggaaggattaaacttgaactacttatcctattctttaaggcactccattgcctggccccaatttactaatcctgtcttatttcccacaaatcctttatactctactcgatgaaacatccttgtgcacacccttgtgcctttgctcgcattaatccttccaagagacttccctcctgttctccattaatgaacgtcctacccagtcttcaactcccgggtcagatcctgtgtcctccataaaaaattttccagacaactccaatctgtccttcttccaagttcctagaggccttaattattcattctagccactaggtgcatagaatttgagatttttgtaataatagaagtagtgtgaaccctagaaattagaaaatcaagctttgggccaggtgcggtggctcatgcctgtaatcccagcactatgggaggccagggagggaggatctccagaggtcaggagttcgagaccagcctggccaacatggtgaaaccccgtctctattaaaaatacaaaaattagctgggcatgatggcaggcacctgtaatcccagctactcgggaggctgaggcaggagaattgcttgaactggggaggcagaggttgcagtgagacaagatcacgtcactgtactccagcctgggtgacagagtgatactccatctcaaaaaaaaaaaaaaaaaaaaaaaaaaaaaaaaaaaaaaaaacctttggtgccttttctctcttctttacctgagtaaataattggcacctgccttctttctccttttatgttatcataagtggcatgtatcaaaccaaacaggctaggggagaataggtctaattgtgacagacttaaaaacaacacattatttggaaagacaagccatgggaaagaaatatggcgtttctatttttttaagataatttagtatgtacaaaagtatccaaatttaaatatagttttcaatggctgatagttttgttttctcacccttcaatatttctagaaaacatccttgcatacaaagcaggatagctaagaaagggctgtaacaaacaaaacttcaagtgtctagcacatactacatctaagaggctaaactctgataggaaaagcactttaaacataattaaaagcttaatgtaaattagtagttgaaattctaggccggtgcggtggctcatgcctgtaatcccagcactgtaggcggccgaggtgggtgaatcacatgaggtcaggagttcaagaccagcctgaccaacatggtgaaaccccatttctactaaaaaaaaaaaaaaaa

SEQ ID NO: 147781 - DNA, 2221 bp, Homo sapiens
  Payload ID: 9236
  Gene Symbol: LMOD3
  Gene Name: leiomodin 3 (fetal)
  Uniprot ID: Q0VAK6
  ENST ID: ENST00000489031
  CDS Start-End: 116-1798
aatatagatccggcaagagcttagctgtgatcactcctagctgctcagcaaaccactgaggttcctgggaaaaaaaaaaaaatatctcaaggtaaaataatatttagaaaaaataatgtcagagcacagcagaaattcagatcaagaagaacttctcgatgaggagattaatgaagatgaaatcttggccaacttgtctgctgaagaactgaaagaactgcagtcggaaatggaagtcatggcccctgaccccagccttcccgtgggaatgattcagaaagatcaaactgacaagccaccgacaggaaacttcaatcataaatctcttgttgattatatgtattgggaaaaggcatccaggcgcatgctggaagaggaacgagttcctgtcacctttgtgaaatccgaggaaaagactcaagaagagcatgaagaaatagaaaaacgtaataaaaatatggcccagtatttaaaagaaaagctcaataatgaaatagttgcaaataaaagagaatcaaagggcagcagcaatatccaagaaacagatgaagaagatgaagaagaagaagatgatgatgatgacgacgaaggagaagatgatggtgaagagagtgaagaaacgaacagagaagaggaaggcaaagcaaaggaacaaattagaaattgtgagaacaactgccagcaggtaactgacaaagcattcaaagaacagagagacagaccagaggcccaagaacaaagtgagaaaaaaatatcgaaattagatcctaagaagttagctctagacaccagctttttgaaggtaagtacaaggccttcaggaaaccagacagacctggatgggagcttgaggagagttaggaaaaatgatcctgacatgaaggaactcaacctgaacaacattgaaaacatccccaaagaaatgttactggactttgtcaatgcaatgaagaaaaacaagcacatcaaaacattcagtttagccaatgtgggtgcagatgagaatgtagcatttgccttggctaacatgttgcgtgaaaatagaagcatcaccactctcaacatcgagtccaatttcatcacaggtaaagggattgtggccatcatgaggtgtctccagtttaatgagacgctaactgagcttcggtttcacaatcagaggcacatgttgggtcaccatgctgaaatggaaatagccaggcttttgaaggcaaacaacactctcctgaagatgggctaccattttgagcttccgggtcccagaatggtggtcactaatctgctcaccaggaatcaggataaacaaaggcagaaacgacaggaagagcaaaaacagcagcaactcaaggaacagaagaagctgatagccatgttagagaatgggttggggctgccccctgggatgtgggagctgttgggaggacccaagccagattccagaatgcaggaattcttccagccaccgccacctcggcctcccaacccccaaaatgtcccctttagtcaacgcagtgaaatgatgaaaaagccatcgcaggccccgaagtacaggacagaccctgactccttccgggtggtgaagctgaagagaatccagcgcaaatctcggatgccggaagccagagaaccacccgagaaaaccaacctcaaagatgtcatcaaaacgctcaagccagtgccgagaaacaggccacccccattggtggaaatcactcccagagatcagctgctaaacgacattcgtcacagcagtgtcgcctatcttaaacctgtgcaactgccaaaagaactggcgtaagaggcaacagagccatctagaagaacaagaaatggaaatagtgactcttggattacagcatggagactatgtcagcagcaatactttaggatccacgtggcagaactggaaacaatgctaccatctgataagggtatttgtaaaaggcagaatgtttgggccatgaagaagtaggggctgaagaggaaggtggaaggagataaaatataatatttagaggcaatattttctacttgcaatcaatttgagtgactcaggtgaaatttagagtcatatttcccgaagcagaagttaaagaaaattttttaaacatttgctttattattgttttcttctggtaaataataaatataacagaagtgttaactattgtattcccatttttttctccttccatctcttctgcggtaattcatcacatag

SEQ ID NO: 147782 - DNA, 2238 bp, Homo sapiens
  Payload ID: 9236
  Gene Symbol: LMOD3
  Gene Name: leiomodin 3 (fetal)
  Uniprot ID: Q0VAK6
  ENST ID: ENST00000475434
  CDS Start-End: 185-1867
gacatagcaagacctctgttccactgtgcaccactttatttgcttccacactcaccttgtagggaagaggcagaccctaagagcttgatttctaccttcaagtgaattctttacttcagaaacaactcaggttgctggttggatttcccttctgaaatatttaaaataatatttagaaaaaataatgtcagagcacagcagaaattcagatcaagaagaacttctcgatgaggagattaatgaagatgaaatcttggccaacttgtctgctgaagaactgaaagaactgcagtcggaaatggaagtcatggcccctgaccccagccttcccgtgggaatgattcagaaagatcaaactgacaagccaccgacaggaaacttcaatcataaatctcttgttgattatatgtattgggaaaaggcatccaggcgcatgctggaagaggaacgagttcctgtcacctttgtgaaatccgaggaaaagactcaagaagagcatgaagaaatagaaaaacgtaataaaaatatggcccagtatttaaaagaaaagctcaataatgaaatagttgcaaataaaagagaatcaaagggcagcagcaatatccaagaaacagatgaagaagatgaagaagaagaagatgatgatgatgacgacgaaggagaagatgatggtgaagagagtgaagaaacgaacagagaagaggaaggcaaagcaaaggaacaaattagaaattgtgagaacaactgccagcaggtaactgacaaagcattcaaagaacagagagacagaccagaggcccaagaacaaagtgagaaaaaaatatcgaaattagatcctaagaagttagctctagacaccagctttttgaaggtaagtacaaggccttcaggaaaccagacagacctggatgggagcttgaggagagttaggaaaaatgatcctgacatgaaggaactcaacctgaacaacattgaaaacatccccaaagaaatgttactggactttgtcaatgcaatgaagaaaaacaagcacatcaaaacattcagtttagccaatgtgggtgcagatgagaatgtagcatttgccttggctaacatgttgcgtgaaaatagaagcatcaccactctcaacatcgagtccaatttcatcacaggtaaagggattgtggccatcatgaggtgtctccagtttaatgagacgctaactgagcttcggtttcacaatcagaggcacatgttgggtcaccatgctgaaatggaaatagccaggcttttgaaggcaaacaacactctcctgaagatgggctaccattttgagcttccgggtcccagaatggtggtcactaatctgctcaccaggaatcaggataaacaaaggcagaaacgacaggaagagcaaaaacagcagcaactcaaggaacagaagaagctgatagccatgttagagaatgggttggggctgccccctgggatgtgggagctgttgggaggacccaagccagattccagaatgcaggaattcttccagccaccgccacctcggcctcccaacccccaaaatgtcccctttagtcaacgcagtgaaatgatgaaaaagccatcgcaggccccgaagtacaggacagaccctgactccttccgggtggtgaagctgaagagaatccagcgcaaatctcggatgccggaagccagagaaccacccgagaaaaccaacctcaaagatgtcatcaaaacgctcaagccagtgccgagaaacaggccacccccattggtggaaatcactcccagagatcagctgctaaacgacattcgtcacagcagtgtcgcctatcttaaacctgtgcaactgccaaaagaactggcgtaagaggcaacagagccatctagaagaacaagaaatggaaatagtgactcttggattacagcatggagactatgtcagcagcaatactttaggatccacgtggcagaactggaaacaatgctaccatctgataagggtatttgtaaaaggcagaatgtttgggccatgaagaagtaggggctgaagaggaaggtggaaggagataaaatataatatttagaggcaatattttctacttgcaatcaatttgagtgactcaggtgaaatttagagtcatatttcccgaagcagaagttaaagaaaattttttaaacatttgctttattattgttttcttctggtaaataataaatataacagaagtgttaactatt

SEQ ID NO: 147783 - DNA, 1812 bp, Homo sapiens
  Payload ID: 9237
  Gene Symbol: LMLN
  Gene Name: leishmanolysin-like (metallopeptidase M8 family)
  ENST ID: ENST00000332636
  CDS Start-End: 1-1812
atggggcggaggagtgggttactcgggctcaggcccgggccggagccggtggcgctggagcgggtcataaataaagttcatcttaaggcaaatcatgtggtcaagagagatgttgatgagcatttaagaatcaagactgtctatgataaaagtgttgaagagttgctccctgagaaaaagaatcttgtaaagaacaagcttttcccacaagcgatttcttatttagagaagacttttcaggtccgtcgacctgcgggcactatcttacttagcagacaatgtgcaacaaaccaatacctccggaaggaaaacgatcctcacaggtactgcaccggggagtgtgccgcacacacaaagtgcggccccgttattgttcctgaggaacatctccagcaatgccgggtctaccgtgggggtaagtggcctcatggagcagtgggtgtgccagaccaagaaggcatctcagatgcagactttgttctttacgttggtgctctggccaccgagagatgcagccatgaaaacatcatctcttatgcagcctattgtcagcaggaagcaaacatggacaggccaatagcaggatatgctaacctgtgtccaaatatgatctctacccagcctcaggagtttgttgggatgctgtccacagtgaaacatgaggttattcatgccctgggtttctctgctgggctgtttgcattctaccatgataaagatggaaatcctctcacttcaagatttgcagatggcctcccaccttttaattatagtctgggattatatcaatggagtgataaagtagttcgaaaagtggagagattatgggatgttcgagataataagatagttcgtcacactgtgtatctcctggtaacgcctcgtgttgttgaggaagcacgaaaacattttgattgtccagttctagagggaatggaacttgaaaatcaaggtggtgtgggcactgagctcaaccattgggaaaaaaggttattagagaatgaagcgatgactggttctcacactcagaatcgagtactctctcgaatcactctggcattaatggaggacactgggagacagatgctgagcccttactgtgacacgctcagaagtaacccactgcagctaacttgcagacaggaccagagagcagttgccgtgtgtaatttgcagaagttccctaagcctttaccacaggaataccagtactttgatgaactcagtggaatacctgcagaagatttgccttattatggtggctccgtggaaattgctgactactgccctttcagtcaggaattcagttggcatttaagtggtgaatatcagcgcagctcagattgtagaatattggaaaatcaaccagaaatttttaagaactatggcgctgaaaagtatggacctcattccgtttgtctaattcagaaatcagcattcgttatggagaagtgtgagaggaagctgagttacccagactggggaagcggatgctatcaggtttcttgttctcctcaaggtctgaaagtttgggtccaagatacttcatatttgtgtagtcgggctgggcaggtcctccctgtcagtatccagatgaatggctggattcacgatggaaacctgctctgcccatcatgttgggacttctgtgagctctgtcctccagaaacagatcctccagccactaacctgacccgagctctgccacttgatctttgttcctgttcctcgagcctggtggtcaccctctggcttctgctaggcaatctgtttcctctgctggctggatttcttctgtgtatatggcactag

SEQ ID NO: 147784 - DNA, 7043 bp, Homo sapiens
  Payload ID: 9237
  Gene Symbol: LMLN
  Gene Name: leishmanolysin-like (metallopeptidase M8 family)
  Uniprot ID: Q96KR4
  ENST ID: ENST00000330198
  CDS Start-End: 23-1990
gcgcagaggcgtcacgcactccatggtaacgacgctcggcccgaagatggcggccgaatggggcggaggagtgggttactcgggctcaggcccgggccggagccggtggcgctggagcgggtctgtgtgggtccgaagcgttttactcctgttgggcgggctccgggccagcgccacatctactcccgtctccttgggcagttcccctccctgccggcaccacgtcccctctgacactgaggtcataaataaagttcatcttaaggcaaatcatgtggtcaagagagatgttgatgagcatttaagaatcaagactgtctatgataaaagtgttgaagagttgctccctgagaaaaagaatcttgtaaagaacaagcttttcccacaagcgatttcttatttagagaagacttttcaggtccgtcgacctgcgggcactatcttacttagcagacaatgtgcaacaaaccaatacctccggaaggaaaacgatcctcacaggtactgcaccggggagtgtgccgcacacacaaagtgcggccccgttattgttcctgaggaacatctccagcaatgccgggtctaccgtgggggtaagtggcctcatggagcagtgggtgtgccagaccaagaaggcatctcagatgcagactttgttctttacgttggtgctctggccaccgagagatgcagccatgaaaacatcatctcttatgcagcctattgtcagcaggaagcaaacatggacaggccaatagcaggatatgctaacctgtgtccaaatatgatctctacccagcctcaggagtttgttgggatgctgtccacagtgaaacatgaggttattcatgccctgggtttctctgctgggctgtttgcattctaccatgataaagatggaaatcctctcacttcaagatttgcagatggcctcccaccttttaattatagtctgggattatatcaatggagtgataaagtagttcgaaaagtggagagattatgggatgttcgagataataagatagttcgtcacactgtgtatctcctggtaacgcctcgtgttgttgaggaagcacgaaaacattttgattgtccagttctagagggaatggaacttgaaaatcaaggtggtgtgggcactgagctcaaccattgggaaaaaaggttattagagaatgaagcgatgactggttctcacactcagaatcgagtactctctcgaatcactctggcattaatggaggacactgggagacagatgctgagcccttactgtgacacgctcagaagtaacccactgcagctaacttgcagacaggaccagagagcagttgccgtgtgtaatttgcagaagttccctaagcctttaccacaggaataccagtactttgatgaactcagtggaatacctgcagaagatttgccttattatggtggctccgtggaaattgctgactactgccctttcagtcaggaattcagttggcatttaagtggtgaatatcagcgcagctcagattgtagaatattggaaaatcaaccagaaatttttaagaactatggcgctgaaaagtatggacctcattccgtttgtctaattcagaaatcagcattcgttatggagaagtgtgagaggaagctgagttacccagactggggaagcggatgctatcaggtttcttgttctcctcaaggtctgaaagtttgggtccaagatacttcatatttgtgtagtcgggctgggcaggtcctccctgtcagtatccagatgaatggctggattcacgatggaaacctgctctgcccatcatgttgggacttctgtgagctctgtcctccagaaacagatcctccagccactaacctgacccgagctctgccacttgatctttgttcctgttcctcgagcctggtggtcaccctctggcttctgctaggcaatctgtttcctctgctggctggatttcttctgtgtatatggcactaggaatggaaaagtggatcttcaagatattcttttatgttatgttcttgtgaacaaagcacaaagtttgagtgagtgccaacctatgcagatggtagaagtggcattcctggctttggcttggaagaattgacgaccatcagaccttgaagcagaacttcacagcagcctgtcctcatcagcaacccaaccaccttcatcagcaacccaaccaccttcatcagcaacccaaccacctcgtcagcaacccaaccacctcgtcagcaacccaaccacctcgtcagcaacccagccaccttcatcagcaacccaaccacctcatcagcaacccagccaccttcatcagcaacccaaccacctcatcagcaaaccaaccactttcatctgcaacccaaccactttcatcagcaactcaacaccttcatctgcaacccaaccaccttcatcagcaaaccaaccaccttcttcagcaacccaaccacctcatcttggagaaggagaaggaactgcaagccaccaagtcttcatttttcagggtttgtaatcttcccaaagttttcctttgaaaataggataatgggtggaattttcagagtgattacatacctcaacatttttattaacatacaacaatgggaaagttcatcatccatatactgcagtcacttaaacaacagccaattattgcaagattagaattggagatcttgtcctcaaaagtataaattgtcctttgagttatagaaaataatggaattgggatttctacatatcattattatacctattttaaatttaatggcagccaggcatggttccagctacttgggaggctgaggcaggaggatcgcttgagcccaggagttcaaggctgcagtgagctatgattgcaccactgtattccagcctgcacgatagagttagaccctgtatcttaaaaaaaaaaaaattaatggctggtatatagtaaacttaattcactgttcccattgttctaaagaatttttttaaataatgtttcattaaatcttatgatttaaccgtgcttgccctttttgccagctatgtggcagtttacggcagaactgctgtcagtgtgctggtagccctctattcatccctcctcagagcccagcttccagaactgctatcactgtgctggtagccctctgtattcatccctcttcagagctcagcttctggttgtattctccatgagtttaataatgacatgaaaaaatgtggaagccgagagagtaaaatactctgccctgtaaaaacatggaagacatgcaaacagaaaaaaaataattgtattgttttagataatacttaagacaactgtgaaacaacaaaaacacaactattcctttgtgaccgatgaagataaaaagaaattctggtaaagacgggtatgcagttttttaaaatgggttaagaaattgttgcagaagaatttctaacatctgaaaatggttttatgtttaagaaggatggtctgaattgtgtactaatagcaaggtataagtttggtgtagagcctatccagtagcgtccactgtaccacttttaagtaagactcagtccacagaagctggaagattgccttcgctttaaatatcctttaccttctgcatttgacactcctcctgttactacatagattccggtccccagaagcaattttacactggtactagagcttaccagccccatttagtaatttttaatggctagatgaggtttaacaagaatatgaaaagaaaaaagaaaaaatatattcatgaatgataggcgatgcccattctttctctcaagctaatgaagtcctatggcattctaaccacaaccctcggacagactcctcctattcctccatggcattgtaaccacaaccctcggacagactcctcctattcctccatggcattgtaaccacaaccctcggacagactcctcctactcctccatggcattgtaaccacaaccctcggacagactcctcctactcctccatggcattgtaaccacaaccctcggacagactcctcctactcctccatggcattgtaaccacaaccctcggacagactcctcctattcctccatggcattgtaaccacaaccctcggacagactcctcctattcctccatggcattgtaaccacaaccctcggacagactcctcctattcctccatggcattgtaaccacaaccctcggacagactcctattcctccatggcattgtaaccacaaccctcggacagactcctcctattcctccatggcattgtaaccacaaccctcggacagactccttctgttcctcctttcctcgtccttccctgcttttcgtccattcagcatatagctattcagtactccattgaagaaattatgctaagtgagcaaagcaacataattactaagaattaattctgattatttggcactagagccaacagcaaccccagcacagaggaaagtcgcttttttttcaaatgcataaatttaaagtatgtatttgcatgcagttttaaatgggaggtatttgtcattgtgaaaagctgggaatctcaaacatagtcaacttaactaaaaagaagctaatacaggttgagcattcctaatccaaaaatccagaatccaaattgctccaaaatctgaaactttctgaatgctgacctgatactacaagtagaaaattccacatacaagtacttaacacaaactttgtttcatgcacaaactactaaaaatattgtataaaattaccttcaggcagtgtgtgtagttatatatgaaacatgaatttcatgtttagacttgggtccatgcccaagatacctcattaggtatctgtaaatatccgaaatccaaaaaaaagtctgaaatctgaaacacttctggtcccaagcatttcagtaagtgatgctcaacctgcgtaatggtctgcgggccagtgctcattttctgcctatgttgtacatactttaaattgtgtaaattaaaagtcaaagcaaagagtctatttttaaagaaacttacaataatctaaacatatacttcttatgattatgaatcatcctgcaaagctgaatgaagaattttaccaaaaatacaatgaattaatcatatatttgagagtcacagtgataggttcgactatattttgactgttgtgtagtggcaccgtttaggtagtattgtttctgagcatggtgctttttatacttgaaatatatttttgctttattttttattgatataattatatttgcactaatggctttctgaagaaaatattatagatgacattttttgtatatatatttattaagcttgggaacctggtcgcccagtgttttctctggacaaatgtgaaactggataaagtatggataaagtcttgagttcctcagggtaactgtgttgatgtctcccgtcctcttcagtaaggcttgaatatgattttactcatcattgattctgcatagtgtacccagcaagacttagaaggacactgaacctgtcagagattttaagaggcacattttagtcactttgaatatggtagtggtgggcgcggtgactgaagcctgtaatctcagcacttcgggaggccaaggcaagcagatcacgagatcaggagtttgaggttacagtgagctgatcgcaccactgcactgcagcctggatgacagagtgagactttcttgggaaaaaaaaaaatgacagtgaagcagacttttagaatccgagatgtcattgcagaattattggtataaaattcagctgcaaagtgaagaaattgaaatggcccacacgttgatatcctgtggcaggttatacccttcatgttagcaaagacgaagccacgtcgctgtgttaagagggacaggctgggccggctgcagctgtagtggaagtgagggacacagggaaggaatggggagcagcaatttggggacagtagactggagtcactttctgactcaaaaagggtcaagtacttattaaaaactatcttggttttctgttcagacttaggctcattttgatcattttaaggtcccagttgtcaaaaatatcaagtgaatttgtctcaggttttcagaaacaaaatttacaggaaggaagcaaaagccatgtcagtagccttgagctgacagctttaaagaaactggcaaacaggtaggttgtcctcatatagatccttccagtattctgaaaaacatccttttatttcttaaaaccagtaacccttacatttttcctataggatagttatttttgttgagatcaaatagacattctataaatgttataaattatgcttgcagttactcagcctatctaggcttaaggtttatcaatatttgaagttgaaacatcatcttatgaggtttagttttaggaagataaataaatatatcaaagtatttcataaagttgtatcaatgttccttctaacattagaagacttactgactgaggccatctgtgaacgactaggtgatctcagaatccttccagctctaataccctctgactaacactcacccagaattgctgtctgtgctggctgtgatctgcctccaggagcatacgccatcctgcgtgctgtgtccatcacagtgtctgtgctcggtgccttaccactgtccgtgtccttggacgctgactggacagagaggagcctgtctctcagggcacatgagtcgtcgtggcaggaggagacgggcctcagtcacagtgtcacagacccttgtcacagtggacactagtcattcctgccatgtccttgcagcccaggaggactaaaaagattttaatgaagtctgtgttactcattctgaagaaaagaacttacctgagaggagtaatatttttttaatatatattgggtcagggacagggatggagtggttgttttatgtttacatttttaataagtaaaatagaagatttaagaactaatatttatggtattgaactttaagtgtgatatattccttagaaaaacacaactttaataaaaatggaaactaa

SEQ ID NO: 147785 - DNA, 474 bp, Homo sapiens
  Payload ID: 9237
  Gene Symbol: LMLN
  Gene Name: leishmanolysin-like (metallopeptidase M8 family)
  ENST ID: ENST00000419117
  CDS Start-End: 21-474
gcagaggcgtcacgcactccatggtcataaataaagttcatcttaaggcaaatcatgtggtcaagagagatgttgatgagcatttaagaatcaagactgtctatgataaaagtgttgaagagttgctccctgagaaaaagaatcttgtaaagaacaagcttttcccacaagcgatttcttatttagagaagacttttcaggtccgtcgacctgcgggcactatcttacttagcagacaatgtgcaacaaaccaatacctccggaaggaaaacgatcctcacaggtactgcaccggggagtgtgccgcacacacaaagtgcggccccgttattgttcctgaggaacatctccagcaatgccgggtctaccgtgggggtaagtggcctcatggagcagtgggtgtgccagaccaagaaggcatctcagatgcagactttgttctttacgttggtgctctggccaccgagagatgca

SEQ ID NO: 147786 - DNA, 2423 bp, Homo sapiens
  Payload ID: 9237
  Gene Symbol: LMLN
  Gene Name: leishmanolysin-like (metallopeptidase M8 family)
  Uniprot ID: Q96KR4
  ENST ID: ENST00000420910
  CDS Start-End: 1-2079
atggtaacgacgctcggcccgaagatggcggccgaatggggcggaggagtgggttactcgggctcaggcccgggccggagccggtggcgctggagcgggtctgtgtgggtccgaagcgttttactcctgttgggcgggctccgggccagcgccacatctactcccgtctccttgggcagttcccctccctgccggcaccacgtcccctctgacactgaggtcataaataaagttcatcttaaggcaaatcatgtggtcaagagagatgttgatgagcatttaagaatcaagactgtctatgataaaagtgttgaagagttgctccctgagaaaaagaatcttgtaaagaacaagcttttcccacaagcgatttcttatttagagaagacttttcaggtccgtcgacctgcgggcactatcttacttagcagacaatgtgcaacaaaccaatacctccggaaggaaaacgatcctcacaggtactgcaccggggagtgtgccgcacacacaaagtgcggccccgttattgttcctgaggaacatctccagcaatgccgggtctaccgtgggggtaagtggcctcatggagcagtgggtgtgccagaccaagaaggcatctcagatgcagactttgttctttacgttggtgctctggccaccgagagatgcagccatgaaaacatcatctcttatgcagcctattgtcagcaggaagcaaacatggacaggccaatagcaggatatgctaacctgtgtccaaatatgatctctacccagcctcaggagtttgttgggatgctgtccacagtgaaacatgaggttattcatgccctgggtttctctgctgggctgtttgcattctaccatgataaagatggaaatcctctcacttcaagatttgcagatggcctcccaccttttaattatagtctgggattatatcaatggagtgataaagtagttcgaaaagtggagagattatgggatgttcgagataataagatagttcgtcacactgtgtatctcctggtaacgcctcgtgttgttgaggaagcacgaaaacattttgattgtccagttctagagggaatggaacttgaaaatcaaggtggtgtgggcactgagctcaaccattgggaaaaaaggttattagagaatgaagcgatgactggttctcacactcagaatcgagtactctctcgaatcactctggcattaatggaggacactggctggtataaagcaaattacagcatggctgagaagttagactggggccgaggaatgggctgtgactttgtcaggaagagctgtaaattctggattgatcagcagagacaaaagagacagatgctgagcccttactgtgacacgctcagaagtaacccactgcagctaacttgcagacaggaccagagagcagttgccgtgtgtaatttgcagaagttccctaagcctttaccacaggaataccagtactttgatgaactcagtggaatacctgcagaagatttgccttattatggtggctccgtggaaattgctgactactgccctttcagtcaggaattcagttggcatttaagtggtgaatatcagcgcagctcagattgtagaatattggaaaatcaaccagaaatttttaagaactatggcgctgaaaagtatggacctcattccgtttgtctaattcagaaatcagcattcgttatggagaagtgtgagaggaagctgagttacccagactggggaagcggatgctatcaggtttcttgttctcctcaaggtctgaaagtttgggtccaagatacttcatatttgtgtagtcgggctgggcaggtcctccctgtcagtatccagatgaatggctggattcacgatggaaacctgctctgcccatcatgttgggacttctgtgagctctgtcctccagaaacagatcctccagccactaacctgacccgagctctgccacttgatctttgttcctgttcctcgagcctggtggtcaccctctggcttctgctaggcaatctgtttcctctgctggctggatttcttctgtgtatatggcactaggaatggaaaagtggatcttcaagatattcttttatgttatgttcttgtgaacaaagcacaaagtttgagtgagtgccaacctatgcagatggtagaagtggcattcctggctttggcttggaagaattgacgaccatcagaccttgaagcagaacttcacagcagcctgtcctcatcagcaacccaaccaccttcatcagcaacccaaccaccttcatcagcaacccaaccacctcgtcagcaacccaaccacctcgtcagcaacccaaccacctcgtcagcaacccagccaccttcatcagcaacccaaccacctcatcagcaacccagccaccttcatcagc

SEQ ID NO: 147787 - DNA, 2010 bp, Homo sapiens
  Payload ID: 9237
  Gene Symbol: LMLN
  Gene Name: leishmanolysin-like (metallopeptidase M8 family)
  Uniprot ID: Q96KR4
  ENST ID: ENST00000482695
  CDS Start-End: 58-1980
gcgcagaggcgtcacgcactccatggtaacgacgctcggcccgaagatggcggccgaatggggcggaggagtgggttactcgggctcaggcccgggccggagccggtggcgctggagcgggtcataaataaagttcatcttaaggcaaatcatgtggtcaagagagatgttgatgagcatttaagaatcaagactgtctatgataaaagtgttgaagagttgctccctgagaaaaagaatcttgtaaagaacaagcttttcccacaagcgatttcttatttagagaagacttttcaggtccgtcgacctgcgggcactatcttacttagcagacaatgtgcaacaaaccaatacctccggaaggaaaacgatcctcacaggtactgcaccggggagtgtgccgcacacacaaagtgcggccccgttattgttcctgaggaacatctccagcaatgccgggtctaccgtgggggtaagtggcctcatggagcagtgggtgtgccagaccaagaaggcatctcagatgcagactttgttctttacgttggtgctctggccaccgagagatgcagccatgaaaacatcatctcttatgcagcctattgtcagcaggaagcaaacatggacaggccaatagcaggatatgctaacctgtgtccaaatatgatctctacccagcctcaggagtttgttgggatgctgtccacagtgaaacatgaggttattcatgccctgggtttctctgctgggctgtttgcattctaccatgataaagatggaaatcctctcacttcaagatttgcagatggcctcccaccttttaattatagtctgggattatatcaatggagtgataaagtagttcgaaaagtggagagattatgggatgttcgagataataagatagttcgtcacactgtgtatctcctggtaacgcctcgtgttgttgaggaagcacgaaaacattttgattgtccagttctagagggaatggaacttgaaaatcaaggtggtgtgggcactgagctcaaccattgggaaaaaaggttattagagaatgaagcgatgactggttctcacactcagaatcgagtactctctcgaatcactctggcattaatggaggacactggctggtataaagcaaattacagcatggctgagaagttagactggggccgaggaatgggctgtgactttgtcaggaagagctgtaaattctggattgatcagcagagacaaaagagacagatgctgagcccttactgtgacacgctcagaagtaacccactgcagctaacttgcagacaggaccagagagcagttgccgtgtgtaatttgcagaagttccctaagcctttaccacaggaataccagtactttgatgaactcagtggaatacctgcagaagatttgccttattatggtggctccgtggaaattgctgactactgccctttcagtcaggaattcagttggcatttaagtggtgaatatcagcgcagctcagattgtagaatattggaaaatcaaccagaaatttttaagaactatggcgctgaaaagtatggacctcattccgtttgtctaattcagaaatcagcattcgttatggagaagtgtgagaggaagctgagttacccagactggggaagcggatgctatcaggtttcttgttctcctcaaggtctgaaagtttgggtccaagatacttcatatttgtgtagtcgggctgggcaggtcctccctgtcagtatccagatgaatggctggattcacgatggaaacctgctctgcccatcatgttgggacttctgtgagctctgtcctccagaaacagatcctccagccactaacctgacccgagctctgccacttgatctttgttcctgttcctcgagcctggtggtcaccctctggcttctgctaggcaatctgtttcctctgctggctggatttcttctgtgtatatggcactaggaatggaaaagtggatcttcaagatattct

SEQ ID NO: 147788 - DNA, 604 bp, Homo sapiens
  Payload ID: 9238
  Gene Symbol: LEMD1
  Gene Name: LEM domain containing 1
  Uniprot ID: Q68G75
  ENST ID: ENST00000367149
  CDS Start-End: 47-250
atttcaaggattctaccatcagaaaagaggccaaacttctatcatcatggtggatgtgaagtgtctgagtgactgtaaattgcagaaccaacttgagaagcttggattttcacctggcccaatactacgtgggctgcaagagcaccaagcaccagaatcacatatgggactatcaccaaagagagagactactgcgcggaagaccagactatcgagagctggagagaagaaggtttcccagtgggcttgaagcttgctgtgcttggtattttcatcattgtggtgtttgtctacctgactgtggaaaataagtcgctgtttggttaagtaatttaggagcaaagcaatgctccaagcgaggcctcctgcttcaggaaagaaccaaaacactaccctgaagggccagcctagcctgcagccctcccttgcagggagccttcccttgcactgtgctgctctcacagatcggtgtctgggctcagccaggtggaaggaacctgcctaaccaggcacctgtgttaagagcatgatggttaggaaatcccccaagtcatgtcaactctcattaaaggtgcttccatatttgagcaggcgtcaaacaagg

SEQ ID NO: 147789 - DNA, 869 bp, Homo sapiens
  Payload ID: 9238
  Gene Symbol: LEMD1
  Gene Name: LEM domain containing 1
  Uniprot ID: Q68G75
  ENST ID: ENST00000367151
  CDS Start-End: 47-592
atttcaaggattctaccatcagaaaagaggccaaacttctatcatcatggtggatgtgaagtgtctgagtgactgtaaattgcagaaccaacttgagaagcttggattttcacctggcccaatactaccttccaccagaaagttgtatgaaaaaaagttagtacagttgttggtctcacctccctgtgcaccacctgtgatgaatggacccagagagctggatggagcgcaggacagtgatgacagcgaagagcttaatatcattttgcaaggaaatatcatactctcaacagaaaaaagcaagaaactcaaaaaatggcctgaggcttccaccactaaacgcaaagctgtagatacctattgcttggattataagccttccaagggaagaaggtgggctgcaagagcaccaagcaccagaatcacatatgggactatcaccaaagagagagactactgcgcggaagaccagactatcgagagctggagagaagaaggtttcccagtgggcttgaagcttgctgtgcttggtattttcatcattgtggtgtttgtctacctgactgtggaaaataagtcgctgtttggttaagtaatttaggagcaaagcaatgctccaagcgaggcctcctgcttcaggaaagaaccaaaacactaccctgaagggccagcctagcctgcagccctcccttgcagggagccttcccttgcactgtgctgctctcacagatcggtgtctgggctcagccaggtggaaggaacctgcctaaccaggcacctgtgttaagagcatgatggttaggaaatcccccaagtcatgtcaactctcattaaaggtgcttccatatttgagcaggcgtcaaacaagg

SEQ ID NO: 147790 - DNA, 741 bp, Homo sapiens
  Payload ID: 9238
  Gene Symbol: LEMD1
  Gene Name: LEM domain containing 1
  Uniprot ID: Q68G75
  ENST ID: ENST00000367152
  CDS Start-End: 39-461
gattctaccatcagaaaagaggccaaacttctatcatcatggtggatgtgaagtgtctgagtgactgtaaattgcagaaccaacttgagaagcttggattttcacctggcccaatactacagcttaatatcattttgcaaggaaatatcatactctcaacagaaaaaagcaagaaactcaaaaaatggcctgaggcttccaccactaaacgcaaagctgtagatacctattgcttggattataagccttccaagggaagaaggtgggctgcaagagcaccaagcaccagaatcacatatgggactatcaccaaagagagagactactgcgcggaagaccagactatcgagagctggagagaagaaggtttcccagtgggcttgaagcttgctgtgcttggtattttcatcattgtggtgtttgtctacctgactgtggaaaataagtcgctgtttggttaagtaatttaggagcaaagcaatgctccaagcgaggcctcctgcttcaggaaagaaccaaaacactaccctgaagggccagcctagcctgcagccctcccttgcagggagccttcccttgcactgtgctgctctcacagatcggtgtctgggctcagccaggtggaaggaacctgcctaaccaggcacctgtgttaagagcatgatggttaggaaatcccccaagtcatgtcaactctcattaaaggtgcttccatatttgagcaggcgtcaaacaaggaaa

SEQ ID NO: 147791 - DNA, 929 bp, Homo sapiens
  Payload ID: 9238
  Gene Symbol: LEMD1
  Gene Name: LEM domain containing 1
  Uniprot ID: Q68G75
  ENST ID: ENST00000367153
  CDS Start-End: 104-649
agtgaaactcacccagctttagtaaccaactcgattgcatagactttagataaccatgtgaaggggattctaccatcagaaaagaggccaaacttctatcatcatggtggatgtgaagtgtctgagtgactgtaaattgcagaaccaacttgagaagcttggattttcacctggcccaatactaccttccaccagaaagttgtatgaaaaaaagttagtacagttgttggtctcacctccctgtgcaccacctgtgatgaatggacccagagagctggatggagcgcaggacagtgatgacagcgaagagcttaatatcattttgcaaggaaatatcatactctcaacagaaaaaagcaagaaactcaaaaaatggcctgaggcttccaccactaaacgcaaagctgtagatacctattgcttggattataagccttccaagggaagaaggtgggctgcaagagcaccaagcaccagaatcacatatgggactatcaccaaagagagagactactgcgcggaagaccagactatcgagagctggagagaagaaggtttcccagtgggcttgaagcttgctgtgcttggtattttcatcattgtggtgtttgtctacctgactgtggaaaataagtcgctgtttggttaagtaatttaggagcaaagcaatgctccaagcgaggcctcctgcttcaggaaagaaccaaaacactaccctgaagggccagcctagcctgcagccctcccttgcagggagccttcccttgcactgtgctgctctcacagatcggtgtctgggctcagccaggtggaaggaacctgcctaaccaggcacctgtgttaagagcatgatggttaggaaatcccccaagtcatgtcaactctcattaaaggtgcttccatatttgagcaggcgtcaaacaaggaaa

SEQ ID NO: 147792 - DNA, 786 bp, Homo sapiens
  Payload ID: 9238
  Gene Symbol: LEMD1
  Gene Name: LEM domain containing 1
  Uniprot ID: Q68G75
  ENST ID: ENST00000367154
  CDS Start-End: 103-429
agtggctctgcggggaattgtgaggcggactgcgagggaaagggggccttgttgagtccgccaggattctaccatcagaaaagaggccaaacttctatcatcatggtggatgtgaagtgtctgagtgactgtaaattgcagaaccaacttgagaagcttggattttcacctggcccaatactaccttccaccagaaagttgtatgaaaaaaagttagtacagttgttggtctcacctccctgtgcaccacctgtgatgaatggacccagagagctggatggagcgcaggacagtgatgacagcgaaggtgggctgcaagagcaccaagcaccagaatcacatatgggactatcaccaaagagagagactactgcgcggaagaccagactatcgagagctggagagaagaaggtttcccagtgggcttgaagcttgctgtgcttggtattttcatcattgtggtgtttgtctacctgactgtggaaaataagtcgctgtttggttaagtaatttaggagcaaagcaatgctccaagcgaggcctcctgcttcaggaaagaaccaaaacactaccctgaagggccagcctagcctgcagccctcccttgcagggagccttcccttgcactgtgctgctctcacagatcggtgtctgggctcagccaggtggaaggaacctgcctaaccaggcacctgtgttaagagcatgatggttaggaaatcccccaagtcatgtcaactctcattaaaggtgcttccatatttgagcaggcgtcaaacaaggaaa

SEQ ID NO: 147793 - DNA, 727 bp, Homo sapiens
  Payload ID: 9238
  Gene Symbol: LEMD1
  Gene Name: LEM domain containing 1
  Uniprot ID: Q68G75
  ENST ID: ENST00000391936
  CDS Start-End: 47-373
atttcaaggattctaccatcagaaaagaggccaaacttctatcatcatggtggatgtgaagtgtctgagtgactgtaaattgcagaaccaacttgagaagcttggattttcacctggcccaatactaccttccaccagaaagttgtatgaaaaaaagttagtacagttgttggtctcacctccctgtgcaccacctgtgatgaatggacccagagagctggatggagcgcaggacagtgatgacagcgaaggtgggctgcaagagcaccaagcaccagaatcacatatgggactatcaccaaagagagagactactgcgcggaagaccagactatcgagagctggagagaagaaggtttcccagtgggcttgaagcttgctgtgcttggtattttcatcattgtggtgtttgtctacctgactgtggaaaataagtcgctgtttggttaagtaatttaggagcaaagcaatgctccaagcgaggcctcctgcttcaggaaagaaccaaaacactaccctgaagggccagcctagcctgcagccctcccttgcagggagccttcccttgcactgtgctgctctcacagatcggtgtctgggctcagccaggtggaaggaacctgcctaaccaggcacctgtgttaagagcatgatggttaggaaatcccccaagtcatgtcaactctcattaaaggtgcttccatatttgagcaggcgtcaaacaagg

SEQ ID NO: 147794 - DNA, 637 bp, Homo sapiens
  Payload ID: 9238
  Gene Symbol: LEMD1
  Gene Name: LEM domain containing 1
  Uniprot ID: Q68G75
  ENST ID: ENST00000495594
  CDS Start-End: 77-280
gaagtgagtgcaagaggagccggcttagcatctaaactgattctaccatcagaaaagaggccaaacttctatcatcatggtggatgtgaagtgtctgagtgactgtaaattgcagaaccaacttgagaagcttggattttcacctggcccaatactacgtgggctgcaagagcaccaagcaccagaatcacatatgggactatcaccaaagagagagactactgcgcggaagaccagactatcgagagctggagagaagaaggtttcccagtgggcttgaagcttgctgtgcttggtattttcatcattgtggtgtttgtctacctgactgtggaaaataagtcgctgtttggttaagtaatttaggagcaaagcaatgctccaagcgaggcctcctgcttcaggaaagaaccaaaacactaccctgaagggccagcctagcctgcagccctcccttgcagggagccttcccttgcactgtgctgctctcacagatcggtgtctgggctcagccaggtggaaggaacctgcctaaccaggcacctgtgttaagagcatgatggttaggaaatcccccaagtcatgtcaactctcattaaaggtgcttccatatttgagcaggcgtcaaacaaggaaa

SEQ ID NO: 147795 - DNA, 2958 bp, Homo sapiens
  Payload ID: 9239
  Gene Symbol: LEMD2
  Gene Name: LEM domain containing 2
  Uniprot ID: Q8NC56
  ENST ID: ENST00000293760
  CDS Start-End: 21-1532
cggggggcggcgtcctggccatggccggcctgtcggacctggaactgcggcgggagctgcaggccctgggcttccagccaggacccatcaccgacaccacccgggatgtctaccgcaacaagctgcgccgcctgcggggcgaggcccggctgcgcgacgaggagcggctgcgggaggaggcccggccgcggggcgaggagcggttacgggaagaggcccggttacgcgaggatgcgccgctgcgcgcccggcccgccgcggcctctccgcgggcggagccctggctctcccagccggcctcgggctcggcctacgcgacccctggggcctacggtgatatccggccctccgcggcttcctgggtagggagccgcggcctcgcctatcctgcccgcccggcgcaactcaggcgccgcgcctcggtccggggcagctccgaggaggacgaggacgcccggacgcccgacagggccacgcagggcccgggtctcgcggcccgccgctggtgggcagcgtctcccgccccggcgcggctgccttcctccctcctcggtcccgacccgcgcccgggcctgcgggcgactcgagcgggccctgctggcgcggcgagggcccggcctgaggtggggcgccggctggagcgctggctctctcggcttctgctctgggccagcctagggctactgctcgtcttcctgggcatcctttgggtgaagatgggcaagccctcagcgccgcaggaggcggaggacaacatgaagttattgccagtggactgtgagagaaaaacagatgagttctgtcaggccaagcagaaggcagccttgctggagctgctgcatgaactctacaatttcctggccatccaagctggtaattttgagtgtggaaatccagagaatctaaaaagcaaatgcattcctgttatggaagcccaagaatatatagccaatgtgaccagcagctcctccgccaagtttgaagccgcactgacctggatactgagcagtaacaaggacgtgggcatctggttgaaaggagaagaccagtctgaattggtgacgactgtggacaaggtggtctgcctggaatctgcccacccccgcatgggtgttggctgccgcctgagccgggccttgctcactgctgtcaccaacgtgctcatcttcttctggtgcttggcttttttgtgggggctcctaattctcctaaaatatcggtggcgaaagttagaagaggaggaacaagccatgtatgagatggtgaagaagattatagacgtggtccaggaccattacgtggactgggagcaggacatggagcgctatccatatgtaggcatcctgcacgtgcgcgacagcttgatccctccacagagccggaggcgcatgaagcgtgtctgggaccgagctgtggagttcctggcctccaacgaatcccggatccagacggagtcccaccgcgttgcaggagaggacatgctggtgtggagatggactaagccctcttccttctctgactcagagcgataagccccgggcggggacttgttcccggtcagcctgtcccaggacagcccactccagaggcacaggagggtcaccaggcctgcggtgctgaattcacacttgccttgactttcagtctcgtcctgacacgattccaaaggtctgccatactcttcagaggagttcggctcgcaggaaaatgtgggcttcctttaaagggagggggagaagccagggtgatagcccagactctgccctgttgtgctggcagaaacggggagaagggttgagttttcatgaatagaaaacaagagcagcagctgtcaggcccagctgacaagcgtggggctggtgggctggggcatggccacgccagggagtctgtcacctgggaggtggggcagggatggtgtttcgggtggcgggatggggagcagcttggtccatgtgccttcagggggttgttacttgagagctccagggtgaagggagaaagcctgtgctctggctggctgggcctctatcctgaagagggaaggtgctagaaattagaacaagtgactgtaggggggaccgtctagaaacaccaggcccagacacacggtccctcaggtcaggaggagtgagcagccggcacagcctcctgggaggatcccgaagtagggactggggctgagagcagagaggagggtcgggcagccccagggcgggcgggcccgcctcagtgttgcttctcacagaagctgcgactctagaccaggcctgcagccagaacgccgattccgggagcttgggagccctgcgtcagggcccagagcctcgcacttgctgtgtgcgaagatcgccttgctttactgtgaccacagccccgacgcggggctgtttaacaagaacttcagcgcagccggcgtttctgttaccccggccgcggctcttggcggcgggagaggcgcagtggctgcaggctgccccctgccggccacaagggagcagcgtccgcgccgccgcccaccggccctcccgccagctcctcagcctgctccctgggaggcaggctccagaagcaccccgacggggggccttattaagtgcgagaagcctctccagcgagtcttccccgtgtgtcctcatctgcggcaggcaggagagggggagcaaacaggaaattccacagctgcctccagaaacattaaccacccctctctagtcttactggtattttttgtttccttaataaagctccagtctccctcatttgagcaatactctcatttcctctgatgtctggatgatcggcagggcaggaatctgagcgctggccccgtggtgaggccatgttctcataatcaggctccagccagaaaaataagaaacaccgcaacaggcttcagtatcagggctgaaactgctggatgaataaactatttattaaaaacggatgtttcttgcc

SEQ ID NO: 147796 - DNA, 2323 bp, Homo sapiens
  Payload ID: 9239
  Gene Symbol: LEMD2
  Gene Name: LEM domain containing 2
  ENST ID: ENST00000421671
  CDS Start-End: 10-354
gtcctggccatggccggcctgtcggacctggaactgcggcgggagctgcaggccctgggcttccagccaggacccatcaccgacaccacccgggatgtctaccgcaacaagctgcgccgcctgcggggcgaggcccggctgcgcgacgaggagcggctgcgggaggaggcccggccgcggggcgaggagcggttacgggaagaggcccggttacgcgaggatgcgccgctgcgcgcccggcccgccgcggcctctccgcgggcggagccctggctctcccagccggcctcgggctcggcctacgcgacccctggggcctacggtgatatccggccctccgcggcttcctggtgaagttattgccagtggactgtgagagaaaaacagatgagttctgtcaggccaagcagaaggcagccttgctggagctgctgcatgaactctacaatttcctggccatccaagctggtaattttgagtgtggaaatccagagaatctaaaaagcaaatgcattcctgttatggaagcccaagaatatatagccaatgtgaccagcagctcctccgccaagtttgaagccgcactgacctggatactgagcagtaacaaggacgtgggcatctggttgaaaggagaagaccagtctgaattggtgacgactgtggacaaggtggtctgcctggaatctgcccacccccgcatgggtgttggctgccgcctgagccgggccttgctcactgctgtcaccaacgtgctcatcttcttctggtgcttggcttttttgtgggggctcctaattctcctaaaatatcggtggcgaaagttagaagaggaggaacaagccatgtatgagatggtgaagaagattatagacgtggtccaggaccattacgtggactgggagcaggacatggagcgctatccatatgtaggcatcctgcacgtgcgcgacagcttgatccctccacagagccggaggcgcatgaagcgtgtctgggaccgagctgtggagttcctggcctccaacgaatcccggatccagacggagtcccaccgcgttgcaggagaggacatgctggtgtggagatggactaagccctcttccttctctgactcagagcgataagccccgggcggggacttgttcccggtcagcctgtcccaggacagcccactccagaggcacaggagggtcaccaggcctgcggtgctgaattcacacttgccttgactttcagtctcgtcctgacacgattccaaaggtctgccatactcttcagaggagttcggctcgcaggaaaatgtgggcttcctttaaagggagggggagaagccagggtgatagcccagactctgccctgttgtgctggcagaaacggggagaagggttgagttttcatgaatagaaaacaagagcagcagctgtcaggcccagctgacaagcgtggggctggtgggctggggcatggccacgccagggagtctgtcacctgggaggtggggcagggatggtgtttcgggtggcgggatggggagcagcttggtccatgtgccttcagggggttgttacttgagagctccagggtgaagggagaaagcctgtgctctggctggctgggcctctatcctgaagagggaaggtgctagaaattagaacaagtgactgtaggggggaccgtctagaaacaccaggcccagacacacggtccctcaggtcaggaggagtgagcagccggcacagcctcctgggaggatcccgaagtagggactggggctgagagcagagaggagggtcgggcagccccagggcgggcgggcccgcctcagtgttgcttctcacagaagctgcgactctagaccaggcctgcagccagaacgccgattccgggagcttgggagccctgcgtcagggcccagagcctcgcacttgctgtgtgcgaagatcgccttgctttactgtgaccacagccccgacgcggggctgtttaacaagaacttcagcgcagccggcgtttctgttaccccggccgcggctcttggcggcgggagaggcgcagtggctgcaggctgccccctgccggccacaagggagcagcgtccgcgccgccgcccaccggccctcccgccagctcctcagcctgctccctgggaggcaggctccagaagcaccccgacggggggccttattaagtgcgagaagcctctccagcgagtcttccccgtgtgtcctcatctgcggcaggcaggagagggggagcaaacaggaaattccacagctgcctccagaaacattaaccacccctctctagtcttactggtatt

SEQ ID NO: 147797 - DNA, 839 bp, Homo sapiens
  Payload ID: 9239
  Gene Symbol: LEMD2
  Gene Name: LEM domain containing 2
  ENST ID: ENST00000442696
  CDS Start-End: 1-839
cggcctacgcgacccctggggcctacggtgatatccggccctccgcggcttcctgggtagggagccgcggcctcgcctatcctgcccgcccggcgcaactcaggcgccgcgcctcggtccggggcagctccgaggaggacgaggacgcccggacgcccgacagggccacgcagggcccgggtctcgcggcccgccgctggtgggcagcgtctcccgccccggcgcggctgccttcctccctcctcggtcccgacccgcgcccgggcctgcgggcgactcgagcgggccctgctggcgcggcgagggcccggcctgaggtggggcgccggctggagcgctggctctctcggcttctgctctgggccagcctagggctactgctcgtcttcctgggcatcctttgggtgaagatgggcaagccctcagcgccgcaggaggcggaggacaacagtaattttgagtgtggaaatccagagaatctaaaaagcaaatgcattcctgttatggaagcccaagaatatatagccaatgtgaccagcagctcctccgccaagtttgaagccgcactgacctggatactgagcagtaacaaggacgtgggcatctggttgaaaggagaagaccagtctgaattggtgacgactgtggacaaggtggtctgcctggaatctgcccacccccgcatgggtgttggctgccgcctgagccgggccttgctcactgctgtcaccaacgtgctcatcttcttctggtgcttggcttttttgtgggggctcctaattctcctaaaatatcggtggcgaaagttagaagaggaggaacaagccatgtatgagatg

SEQ ID NO: 147798 - DNA, 643 bp, Homo sapiens
  Payload ID: 9239
  Gene Symbol: LEMD2
  Gene Name: LEM domain containing 2
  ENST ID: ENST00000504692
  CDS Start-End: 1-307
ggtctgcctggaatctgcccacccccgcatgggtgttggctgccgcctgagccgggccttgctcactgctgtcaccaacgtgctcatcttcttctggtgcttggcttttttgtgggggctcctaattctcctaaaatatcggtggcgaaagttagaagaggaggaacaagccatgtatgagatggtgaagaagattatagacgtggtccaggaccattacgtggactgggagcaggacatggagcgctatccatatgtaggcatcctgcacgtgcgcgacagcttgatccctccacagagccggtgagtccctggctggggcgctgggtgtgaggtaagatggggtccgaccccactgagctccccagaaggaaacccagagccttgcatcagatgtcagctgagggcagtgcagaccccagggccaagagtggctctgctcccactcctgctgctccccagcatgctcggctctttatggcaggatgagctagaaaagacatatgaaagcacaatcccacacctctgtagagagaacactggcagtggtgataccagttaggaggccttgggctccaagtaatagcagctccctcccccagggcacaagtagtgaaggatctcctcagtctctgtaagtgga

SEQ ID NO: 147799 - DNA, 1306 bp, Homo sapiens
  Payload ID: 9239
  Gene Symbol: LEMD2
  Gene Name: LEM domain containing 2
  Uniprot ID: Q8NC56
  ENST ID: ENST00000508327
  CDS Start-End: 398-1003
ttcagctgggacaaggacccagctatcgtaattcctaatccaggatttggatacccttacattttgctgtctgcattttaaaagtgccttccttagatgacatctttctaatccccacccttggcttggtaatgctttactccctccaaatgttgtgagtagtctctttttgtattcctttctcaacccacacttaatttcctctgtgtttcttttcttggtctcagtgaagttattgccagtggactgtgagagaaaaacagatgagttctgtcaggccaagcagaaggcagccttgctggagctgctgcatgaactctacaatttcctggccatccaagctggtaattttgagtgtggaaatccagagaatctaaaaagcaaatgcattcctgttatggaagcccaagaatatatagccaatgtgaccagcagctcctccgccaagtttgaagccgcactgacctggatactgagcagtaacaaggacgtgggcatctggttgaaaggagaagaccagtctgaattggtgacgactgtggacaaggtggtctgcctggaatctgcccacccccgcatgggtgttggctgccgcctgagccgggccttgctcactgctgtcaccaacgtgctcatcttcttctggtgcttggcttttttgtgggggctcctaattctcctaaaatatcggtggcgaaagttagaagaggaggaacaagccatgtatgagatggtgaagaagattatagacgtggtccaggaccattacgtggactgggagcaggacatggagcgctatccatatgtaggcatcctgcacgtgcgcgacagcttgatccctccacagagccggaggcgcatgaagcgtgtctgggaccgagctgtggagttcctggcctccaacgaatcccggatccagacggagtcccaccgcgttgcaggagaggacatgctggtgtggagatggactaagccctcttccttctctgactcagagcgataagccccgggcggggacttgttcccggtcagcctgtcccaggacagcccactccagaggcacaggagggtcaccaggcctgcggtgctgaattcacacttgccttgactttcagtctcgtcctgacacgattccaaaggtctgccatactcttcagaggagttcggctcgcaggaaaatgtgggcttcctttaaagggagggggagaagccagggtgatagcccagactctgccctgttgtgctggcagaaacggggagaagggttgagttttcatgaatagaaaacaagagcagcagctgtcag

SEQ ID NO: 147800 - DNA, 555 bp, Homo sapiens
  Payload ID: 9239
  Gene Symbol: LEMD2
  Gene Name: LEM domain containing 2
  ENST ID: ENST00000513701
  CDS Start-End: 395-555
gagttaagcagggaaggcccatttgatcccgttttacagacgaggagacagaggttcagagtggttgagttgcccaagaaacttgagctaatcattttcagctgggacaaggacccagctatcgtaattcctaatccaggatttggatacccttacattttgctgtctgcattttaaaagtgccttccttagatgacatctttctaatccccacccttggcttgtgaagttattgccagtggactgtgagagaaaaacagatgagttctgtcaggccaagcagaaggcagccttgctggagctgctgcatgaactctacaatttcctggccatccaagctggtaattttgagtgtggaaatccagagaatctaaaaagcaaatgcattcctgttatggaagcccaagaatatatagccaatgtgaccagcagctcctccgccaagtttgaagccgcactgacctggatactgagcagtaacaaggacgtgggcatctggttgaaaggagaagaccagtctgaattggtgacgactgtggacaaggtggtctgcct

SEQ ID NO: 147801 - DNA, 1684 bp, Homo sapiens
  Payload ID: 9239
  Gene Symbol: LEMD2
  Gene Name: LEM domain containing 2
  ENST ID: ENST00000506578
  CDS Start-End: 1-258
attatagacgtggtccaggaccattacgtggactgggagcaggacatggagcgctatccatatgtaggcatcctgcacgtgcgcgacagcttgatccctccacagagccggcgcatgaagcgtgtctgggaccgagctgtggagttcctggcctccaacgaatcccggatccagacggagtcccaccgcgttgcaggagaggacatgctggtgtggagatggactaagccctcttccttctctgactcagagcgataagccccgggcggggacttgttcccggtcagcctgtcccaggacagcccactccagaggcacaggagggtcaccaggcctgcggtgctgaattcacacttgccttgactttcagtctcgtcctgacacgattccaaaggtctgccatactcttcagaggagttcggctcgcaggaaaatgtgggcttcctttaaagggagggggagaagccagggtgatagcccagactctgccctgttgtgctggcagaaacggggagaagggttgagttttcatgaatagaaaacaagagcagcagctgtcaggcccagctgacaagcgtggggctggtgggctggggcatggccacgccagggagtctgtcacctgggaggtggggcagggatggtgtttcgggtggcgggatggggagcagcttggtccatgtgccttcagggggttgttacttgagagctccagggtgaagggagaaagcctgtgctctggctggctgggcctctatcctgaagagggaaggtgctagaaattagaacaagtgactgtaggggggaccgtctagaaacaccaggcccagacacacggtccctcaggtcaggaggagtgagcagccggcacagcctcctgggaggatcccgaagtagggactggggctgagagcagagaggagggtcgggcagccccagggcgggcgggcccgcctcagtgttgcttctcacagaagctgcgactctagaccaggcctgcagccagaacgccgattccgggagcttgggagccctgcgtcagggcccagagcctcgcacttgctgtgtgcgaagatcgccttgctttactgtgaccacagccccgacgcggggctgtttaacaagaacttcagcgcagccggcgtttctgttaccccggccgcggctcttggcggcgggagaggcgcagtggctgcaggctgccccctgccggccacaagggagcagcgtccgcgccgccgcccaccggccctcccgccagctcctcagcctgctccctgggaggcaggctccagaagcaccccgacggggggccttattaagtgcgagaagcctctccagcgagtcttccccgtgtgtcctcatctgcggcaggcaggagagggggagcaaacaggaaattccacagctgcctccagaaacattaaccacccctctctagtcttactggtattttttgtttccttaataaagctccagtctccctcatttgagcaatactctcatttcctctgatgtctggatgatcggcagggcaggaatctgagcgctggccccgtggtgaggccatgttctcataatcaggctccagccagaaaaataagaaacaccgcaacaggcttcagtatcagggctgaaactgctggatgaataaactatttattaaaaacggatgtttcttgcc

SEQ ID NO: 147802 - DNA, 2883 bp, Homo sapiens
  Payload ID: 9239
  Gene Symbol: LEMD2
  Gene Name: LEM domain containing 2
  Uniprot ID: Q8NC56
  ENST ID: ENST00000614475
  CDS Start-End: 4-1515
gccatggccggcctgtcggacctggaactgcggcgggagctgcaggccctgggcttccagccaggacccatcaccgacaccacccgggatgtctaccgcaacaagctgcgccgcctgcggggcgaggcccggctgcgcgacgaggagcggctgcgggaggaggcccggccgcggggcgaggagcggttacgggaagaggcccggttacgcgaggatgcgccgctgcgcgcccggcccgccgcggcctctccgcgggcggagccctggctctcccagccggcctcgggctcggcctacgcgacccctggggcctacggtgatatccggccctccgcggcttcctgggtagggagccgcggcctcgcctatcctgcccgcccggcgcaactcaggcgccgcgcctcggtccggggcagctccgaggaggacgaggacgcccggacgcccgacagggccacgcagggcccgggtctcgcggcccgccgctggtgggcagcgtctcccgccccggcgcggctgccttcctccctcctcggtcccgacccgcgcccgggcctgcgggcgactcgagcgggccctgctggcgcggcgagggcccggcctgaggtggggcgccggctggagcgctggctctctcggcttctgctctgggccagcctagggctactgctcgtcttcctgggcatcctttgggtgaagatgggcaagccctcagcgccgcaggaggcggaggacaacatgaagttattgccagtggactgtgagagaaaaacagatgagttctgtcaggccaagcagaaggcagccttgctggagctgctgcatgaactctacaatttcctggccatccaagctggtaattttgagtgtggaaatccagagaatctaaaaagcaaatgcattcctgttatggaagcccaagaatatatagccaatgtgaccagcagctcctccgccaagtttgaagccgcactgacctggatactgagcagtaacaaggacgtgggcatctggttgaaaggagaagaccagtctgaattggtgacgactgtggacaaggtggtctgcctggaatctgcccacccccgcatgggtgttggctgccgcctgagccgggccttgctcactgctgtcaccaacgtgctcatcttcttctggtgcttggcttttttgtgggggctcctaattctcctaaaatatcggtggcgaaagttagaagaggaggaacaagccatgtatgagatggtgaagaagattatagacgtggtccaggaccattacgtggactgggagcaggacatggagcgctatccatatgtaggcatcctgcacgtgcgcgacagcttgatccctccacagagccggaggcgcatgaagcgtgtctgggaccgagctgtggagttcctggcctccaacgaatcccggatccagacggagtcccaccgcgttgcaggagaggacatgctggtgtggagatggactaagccctcttccttctctgactcagagcgataagccccgggcggggacttgttcccggtcagcctgtcccaggacagcccactccagaggcacaggagggtcaccaggcctgcggtgctgaattcacacttgccttgactttcagtctcgtcctgacacgattccaaaggtctgccatactcttcagaggagttcggctcgcaggaaaatgtgggcttcctttaaagggagggggagaagccagggtgatagcccagactctgccctgttgtgctggcagaaacggggagaagggttgagttttcatgaatagaaaacaagagcagcagctgtcaggcccagctgacaagcgtggggctggtgggctggggcatggccacgccagggagtctgtcacctgggaggtggggcagggatggtgtttcgggtggcgggatggggagcagcttggtccatgtgccttcagggggttgttacttgagagctccagggtgaagggagaaagcctgtgctctggctggctgggcctctatcctgaagagggaaggtgctagaaattagaacaagtgactgtaggggggaccgtctagaaacaccaggcccagacacacggtccctcaggtcaggaggagtgagcagccggcacagcctcctgggaggatcccgaagtagggactggggctgagagcagagaggagggtcgggcagccccagggcgggcgggcccgcctcagtgttgcttctcacagaagctgcgactctagaccaggcctgcagccagaacgccgattccgggagcttgggagccctgcgtcagggcccagagcctcgcacttgctgtgtgcgaagatcgccttgctttactgtgaccacagccccgacgcggggctgtttaacaagaacttcagcgcagccggcgtttctgttaccccggccgcggctcttggcggcgggagaggcgcagcgtccgcgccgccgcccaccggccctcccgccagctcctcagcctgctccctgggaggcaggctccagaagcaccccgacggggggccttattaagtgcgagaagcctctccagcgagtcttccccgtgtgtcctcatctgcggcaggcaggagagggggagcaaacaggaaattccacagctgcctccagaaacattaaccacccctctctagtcttactggtattttttgtttccttaataaagctccagtctccctcatttgagcaatactctcatttcctctgatgtctggatgatcggcagggcaggaatctgagcgctggccccgtggtgaggccatgttctcataatcaggctccagccagaaaaataagaaacaccgcaacaggcttcagtatcagggctgaaactgctggatgaataaactatttatt

SEQ ID NO: 147803 - DNA, 4764 bp, Homo sapiens
  Payload ID: 9240
  Gene Symbol: LEMD3
  Gene Name: LEM domain containing 3
  Uniprot ID: Q9Y2U8
  ENST ID: ENST00000308330
  CDS Start-End: 27-2762
agcttgtaaaacaccctggagagaaaatggcggcggcagcagcttcggcgcctcagcagctctcggatgaggagcttttctctcagctccgccgttacggcctgtctcccggaccagtgacggagagcacccgcccggtctacctcaagaagctgaagaagcttcgagaggaagagcagcaacagcaccggtcagggggccgcggcaacaagacgcggaacagtaataacaataacacggcagccgccacggtcgcagccgcgggaccagcggcggcggcggccgcggggatgggggtccggccggtctcgggcgacctctcctacttacggactcctgggggcctgtgccgaatctcggcctctggcccagagagcctcctgggagggcccgggggcgcctccgccgcccccgcggctggcagcaaagtgctgctgggcttcagctcggacgagtcggacgtggaggccagtccccgggaccaggccggcggcggcgggaggaaagaccgggcttcgctccagtaccgcgggctcaaagcgccgccggcgcccctggccgccagcgaggtgactaacagcaactctgcagagcgaaggaagccccactcgtggtggggggccaggaggccggcgggccccgagctgcagaccccgccggggaaagatggagcagtggaggacgaggaaggggagggagaggacggtgaggagagggacccggagaccgaggagccgctctgggcgagccggaccgtgaatggcagccggcttgtcccctacagctgccgggaaaactattcggactcagaggaagaggacgacgacgacgtggcctccagcagacaggtattaaaggacgactccctttcccggcatcggcccagacgaacccatagtaagcctctccccccgctgactgctaaatcggccggcggcaggctggagacttcagttcagggagggggaggactcgcgatgaatgacagggcggcggctgccgggagtctagacaggagccgaaacctcgaagaggcggcggccgcggagcagggaggagggtgtgatcaagtggactccagccccgttcctagataccgtgttaacgctaagaaactgacccctctcctgcccccgccacttactgacatggactcaaccttggattcgtcaacaggctcccttctgaaaaccaataatcatattggcggtggggccttcagtgtggactcccccaggatttattctaacagtctccctcccagtgcggcggtggccgcctctagttcactcaggatcaatcacgccaatcatacgggctccaatcatacctacctgaaaaacacatacaacaaaccgaagctttccgaacccgaagaggaacttctccagcaatttaaacgggaggaggtgtccccaacagggagtttcagtgcccactacttgtcgatgtttctcttaactgctgcctgcttatttttcctaatactgggactgacttacctaggaatgagagggacaggagtatctgaggatggagaactcagcatagaaaacccctttggtgaaacatttggaaaaatacaagaaagtgaaaaaactcttatgatgaacacattatataagcttcatgatcgattggcacagcttgcaggagatcatgaatgtggcagttctagtcaaagaacgctttctgttcaagaggcagctgcgtatttaaaagatttaggtcctgaatatgaaggtatatttaacacttcattgcagtggatcttagaaaatggaaaagatgttggaataaggtgtgttggttttggccctgaggaagaattgacaaatataactgatgtgcagtttttacagtccacaagaccactgatgtctttttggtgtcgttttcgacgtgcttttgttactgtaactcacagattattgttgttatgcttaggtgtagtgatggtttgtgtcgttctgcgttacatgaaatatcgatggacaaaagaagaggaggaaacaaggcagatgtatgatatggtggtaaagattatagatgttttacgaagtcataatgaagcctgccaggaaaacaaagatttacaaccttacatgcctattccacatgtacgcgattccttaatacagcctcatgacaggaaaaaaatgaagaaagtctgggatagagctgttgacttccttgctgctaatgagtctagagttcgcacggaaacacgaagaataggtggtgcagattttctggtttggcggtggatccagccttctgcatcctgtgacaaaatattagttataccttctaaagtatggcaaggtcaagcatttcatttagatagaagaaattcaccaccaaatagtttgacaccgtgtctaaagattcggaatatgtttgatcccgttatggaaataggggatcagtggcatttggcaattcaagaagcaattttagaaaaatgcagtgataatgatggcattgttcacattgcagtagacaaaaattcacgtgagggttgtgtatatgttaaatgtctgtctccagaatatgctggaaaggcttttaaagcattgcatggctcttggtttgatgggaaattggttacagtaaaatatttacgactagatagataccaccatcgctttccccaggctctcacttccaacactccattgaagccatcaaataaacatatgaactccatgtctcatcttcgtcttcggactggcctaaccaattctcaaggaagttcctgaaaagattttcttccatttctaagactgttatttacaataggaaaattcctgtttggctttttgtcttcctttttaaatgctttttgtatgtaatatttttattgatgaatacatctctgaacgttccagaagtcttaaggttccaaagggatttagcagtgaggcagcaatgctgagtaggtaggataattatttcattcagtttttggagctcagttaagccaatacatttaaagttttgcatgaggaacactgactttattaagcattttcagatgtggtggttgtatttttgccccaagaagtgtttggataaccacacaaaagcatgatgaaaaggcttcttgtagtcccataatttcttgtgaactaatgttgtgaatttttgtatacagtcacctgcatagttcctacaggctaatgtggtaaaactgttgatttcccaatttaaccttaggtttctgttgcttataagcgattcatttgctacggctggaatatgggaaaattaatttgggcttagtggttacaaatatgtgtaagtggatgtatatgtacttaaactggctttgtatatatgtataaatgctggtggtggtgaaagtagtcttgttttatgaggatgtctgcattaaagcagtaaaataagctttccattttattcataatctaatgtgtgtgtatatatgtatgtgtgtatgtgtgtgtatatatagatgtatatatatacacacacagagatatatacatatggctgtacttttgcatagatcaaacagccaaacacctggaagtattagatacaagtttaaaatatcttttataggttttatataaaaatgtctgagtatgattttgtgtgaaagttctgataccagttgtaatagagtcaaatttatgtgagcaataaagaagaaattggcagatattggaaaaatattttgtgaaaagctgtatttattataaatactagggccatgacatagtaccattggggttaagtcattttcccaatctatttataatttaatgatatgttagtgcctctgttatatgtcaagtttaaagcagggcacattgttgcagcaaaatgtgtatttgacaaattatacttgcaattttgggtcatgaaagtttgcaatatagtaaatgcacgattgactgttgctttgtgcctcagtatttaatttgtttcagtaaacttactttattactgtttatgatttcagataaaaatagttgctgagtaaattttacttgtaatctacaattggctttttaaaaataacctgttgatatataattgtcagtccaaatgaatatgtgaaacagctggaattgtacaaattttggttgtatttaaagctcagtttcctttttgttttattgtatgcgttgggtttgcagcatgaacttgcacagataatgcacgttttctggttaagtaaacatgatgcacactattctgtaacagaaagccctattgtgccttacctgtgtgcttttgtgggcaccttgtttatgaagaataaaaaatgatttgttatctgaagagaataaattttaaattctcagtttatgtctcagatgctaacgtgtgaaaatataaatatatataatatataaagtaaccagtcttcctgtattttatgtgcatcatagtgatttatctgagcttagtgacccccatcttgtaacctgttgcaagagtgaatgtaaaaaatagttgtggcattttaaaaggtcgcctttgatgcagatgcatctttttcttgcttctaaaacatatttcatgtaaacattgtacatttattattgtaatatatactattatgcagcttattttacctgaaactgttaagccgaccaagatccctccctgcaagacagatgggaatgtgtataataactaggtatttgagaagttctgaagtttgatgtaatctgttacttgtcctgttaaaaaaaggaaaaaattctaattaaaaatttattagttttt

SEQ ID NO: 147804 - DNA, 8946 bp, Homo sapiens
  Payload ID: 9241
  Gene Symbol: LMTK2
  Gene Name: lemur tyrosine kinase 2
  Uniprot ID: Q8IWU2
  ENST ID: ENST00000297293
  CDS Start-End: 294-4805
gcggcgggagcgcggcttcccaggcccgccgctccgcagggctgctggcgttgctgctgttgagaggcggcggcggcggcgcaggcgggcgggaaggatggtgtttctgcgactggagcggcaggtgcggaccgggagccggaccgaggtttggcagaagcaacgtgtgctcgggagcaaccggcgcgggtgccactgaggcagcggagggaggcaggatcgactgacgggcgaacggacggacggacggaaggcgactcgagggccggccccggagccgcgccgtgggcgagatgccggggccgccggcgttgcggcggaggctgctgctgctgctgctggtcctcctgatcgccggcagtgctggggccgcgccacttccgcaaacaggtgcaggggaggcgccacctgctgcagaagtttcctcatcttttgtgatcctgtgtgtgtgcagtttaataatattaatagtgttaattgcaaactgtgtatcctgctgtaaggacccagaaatagactttaaggaatttgaagataattttgatgatgagatagatttcacaccaccagcagaagacactccctctgttcagtccccagcagaggtcttcacactttcagtaccaaatatttcactcccagctccctcgcaattccagccttctgtagagggattgaagtctcaagttgcccgccacagtctaaactacatacaggaaattggaaatggctggtttggaaaggttctcttgggagagatttacacgggcactagcgtagcaagagtcatcgtgaaggagttaaaagcaagtgccaacccaaaggaacaagatacttttttgaaaaatggagaaccttactacattcttcagcatccaaatattcttcagtgtgttggacagtgcgtagaagcgattccctacctcctggtgtttgagttctgtgacttgggtgacctgaaggcgtatctgcgcagcgagcaggagcacatgcggggggactcacagaccatgctgctgcagaggatggcgtgcgaggtcgccgcggggctggccgccatgcacaagctgcacttcctgcacagtgatttagccctgcggaattgttttctcacctccgacttaaatgtgaaagtgggagattacggaataggattcagcaggtacaaggaggattatattgaaacagatgataaaaaagttttccctctgcgatggactgctccagaattagtaaccagctttcaagacagactgctaactgcagatcagactaagtatagtaatatctggtctctgggtgtgacactttgggagctttttgacaatgccgcacagccgtattcaaacctttccaacttagatgtcctcaaccaagtcattagagagagagacacaaaactcccgaagccccagctggagcagccctactctgatagatggtatgaagtcttacagttctgttggctgtcaccagaaaagagacccgcggctgaagatgtgcacaggctgctgacttacctgcggctgcagagccagcgggactcagaggtcgactttgaacagcagtggaacgctctgaagccgaacacaaacagcagagactcctccaacaatgctgcattcccaattctcgaccactttgccagggaccggctgggtcgtgaaatggaggaagtcctcaccgtgaccgaaaccagccagggcctgagcttcgagtatgtctgggaggccgctaagcacgaccactttgacgagcgcagccggggccacctggacgaaggcttgtcctacacgagcatcttctatccggttgaagtttttgagagttcgctttcagatcctgggcccggaaagcaagatgacagcggccaggatgtccccctgagggtccctggagtggttcctgtttttgatgcccacaacctttctgttggaagcgactattatatccagttagaagaaaaaagtggtagtaacttggagcttgattacccaccagcgctgctcacaaccgacatggataatccagaaaggactggccctgaactgtcccagctcacggcgctcaggagcgttgaacttgaggagtccagtacagatgaggacttcttccaaagcagtacagaccccaaagactctagcttaccaggggacttacacgtgaccagtggccccgagagccctttcaacaatatatttaatgatgtggacaaatcggaagatttgcccagtcaccaaaaaatattcgacttaatggaattaaacggagttcaagccgactttaaacctgccactttaagttccagtttggataaccccaaagagtcagtcataacaggccactttgagaaagaaaagccccgtaagatttttgacagtgagcctctctgcctatcagataatcttatgcaccaagataattttgatccattgaatgttcaagaattgtcagaaaactttttatttcttcaagagaaaaacttactaaaaggctcattgtccagcaaagaacacataaatgatcttcagacagaacttaagaatgctggttttactgaagctatgttagaaacgtcatgtagaaactctttagatactgagcttcagtttgctgaaaataagccaggcttgtctttgttgcaggaaaacgtaagcacaaagggtgacgatacagatgtcatgctcacaggtgacactttgagcacctcattgcagtcttccccggaagtgcaggtacctcctacctccttcgaaacagaagaaacgccccgtcgggtacccccagactcactcccaacacagggagaaacccagcccacgtgtttagatgttattgtcccggaggactgtctccaccaggacatcagtccagacgctgtgactgtcccggttgaaattctctcaactgatgccagaacccacagcctggataacaggtcccaggactctcctggcgagagtgaggagaccctgcgactcaccgaaagtgactctgttcttgctgatgacatccttgccagcagggtgagtgtagggagtagtctcccggaactgggacaggaattgcacaataaaccattttcggaagaccatcacagtcatcgccggctagagaaaaacttagaggctgtggagactttaaatcagctcaattctaaagacgcagcaaaagaagcaggcttggtgtctgccctctcctcggactcaaccagtcaggacagcctcctggaggacagcttgtcagcacccttcccagcctctgagccgtccctggaaaccccggactctctggagtcagtggatgtccacgaagcgctactggactctttaggatctcacactccccagaaactagtgccccccgataagccggcagacagtggctacgaaacagagaacttggagtctcccgagtggaccttgcatcccgctcccgagggcaccgcagactcagaaccagccaccacgggcgatggcggccacagcggtctgcctcccaacccggtcattgtcatctcagatgccggcgatggtcacagaggcacagaagtgacccctgagacgttcacagctggctcccagggttcataccgagactctgcgtacttctcagacaatgactctgagcccgagaaaaggtctgaggaggtcccgggaacctccccatccgccttggtgttggtacaggagcagcccctacccgagccagtcctccccgagcaaagtcctgctgcccaggatagctgcctggaagccagaaagagccagccagatgaaagttgtctgtctgctttgcacaactccagtgacctggaattaagagccacgccggagccagcacagactggtgttccccagcaggtgcatcccacggaagacgaggccagcagtccctggagtgtgctgaatgcagaacttagcagcggcgatgacttcgagacacaggacgatcgcccctgcaccctcgcttccacggggaccaacacgaacgaactccttgcctacaccaattctgcgctggacaagtccctgtccagccactccgagggcccgaagttgaaggagccggacatcgaagggaagtacctggggaaactcggggtgtcagggatgctcgacctctcagaggacgggatggatgcagacgaggaggacgaaaacagcgacgactcggacgaggacctgcgggccttcaacctgcatagcctcagctccgagtcggaggacgagaccgagcaccccgtgcccatcatcctcagcaacgaggacggaaggcacctgcggagtctgttgaagcccacagcggccaatgcccccgacccactgcccgaggactggaagaaggaaaagaaggcagtcacgtttttcgatgatgtcacagtctacctgtttgaccaggagaccccaaccaaagagctggggccctgtggaggagaggcgtgcggcccggacctgagcggcccagccccagcctcaggctctccctacctgagcaggtgcatcaactccgaaagctccaccgacgaagaaggtggtggctttgagtgggatgatgacttctccccagatccttttatgtcaaagacaacaagtaacctgctcagctccaagccttctctccaaacatccaagtacttttctccgccgccaccggcccggagcacggagcagagctggccgcactcggcgccttactcccggttctccatctctcccgccaacattgccagcttttccctcacacacctgaccgactcggacatcgagcagggcggaagcagcgaagacggagaaaaggactaggtggctgccaacgcgcacgctcgggtccgaggctgctcccctggagcggcgcccctgcgccctcagcccgagcagcgacatccactcgccatttgctgacatgagattgggaggaagaatccagaggtgaagagggagacggctcttagctgcgttcaaggcggggccctcgggagcccaggtgcagagcgaggccgtgtccaggagccggcgtccctcagtgccccgtgcacccgcggccgcggcctcccaggcagtgctcatgcgctggccgtcgggggaggcaggggcacagcctccatgtgcgcgcgcgtgtggagctgtgtgcaccgcatgtgtgctttccacaggggcgtctctgcgtccacgcctgcacatcccggcgcacgtgtgggcaccacagaggacacgtgaggggaatggtcaccagtgagccatatttattatttctagagaaatcacgaactgctttctgtaattgcactgtggataaatgttccgagagtctccattgttgtacaggatcttcagttattcgaggggaatgaggcaggtcaagccgatgctagccactagtttgattttttttctgttttatagtttgcgctgcatggtacttgtgaagcttaaatattttgagtgttctactgtgtctaggattgttgggattgtacatatggtactctttcataaatgataaatgattctgaatgttagtgttttatgttcatataggaaatattttcattgagtccaaaataccactgttttgttgatggacttgaatgcatttttgtctcttcttgatgaagcggctttgccgcagcaaatgaggcttctctctgaggagctgagaggtcttgcagcctctccttgtcattctcccaccccacatcccattttttaaagcccttttggtaaaaaccaacaggttgtggccgcagacctcagatggacccggcccatccctggggacgtgctggcgtggcaggtccagagagctgcaccctgcacggggcaccgcaccgcttccctccgcgcagctcttctgcctggttttcggaggccaggctgctgggaagcttccgtgttcctgtcagtccttccttcaagaagccggggaactcaggcagactcatctccgcagagcataccagccgtgggggaccgttcgacttgatgatgtgtgcacacttcaggtggtggggacttgagctttaaaaaaacctccacagccgaatcttctcctccgagccactccacgtcacgtccagctgggcctggccagtctgtggttatccatgtgggatgagataacaccacatcctgcagctgtgaagggggatggacaagggacgacggccgacggcagagcatcagcagccgacacatagttcgggtcggggccttgggtggtcctgcatggcccgggactcatctcacggaccctccgttctgcattaagccccaggttctcttctggctttgaaagggcccgagtgctcccagtgtagcttcgtcacatcgtcacgagcccctgtggtcatgggcgacctcacacctccctccctgagttctgctctgacataaggaagtcctcggtggctggtgcagcgcggctgtgctgtgctggggaggcagccgttccttcgggggtccttgggcctgcagtcccctcatactcacccttcacccaacatattttccggtgctgatatgtttccagactccagcgcaacctggggtgctctccagacccgtgcaggggccgcctggggtacacggaaggaagttgagtcctagtgcaaaatgcaggcggacgttgccagagagtgcgcagcaaatgaccttcattgccagttccaccctactcctctcattttttatactaagcaataactttccaaagcaagaagttcaggatggagagagtcccctcctgtgtaggcatggggtggatgcggtgcccacctgggctatgtggggagcaccactgtctcgggatgcgcgaattttttttttttttttaattaacagggcattagaagatgattttgccaaaattgtcatgactctgaattcttgctgtggggacttcctgagttttctcagtttttacatctaagattagtcttggctgaagagaaatgagacgtgattatactactttttcaattgcaggtttaaggagttcagatttaatgaccaaagtcatacagatcatggaatctgtcgtcgtcttatacagtgtcagcctcgagtacatttattaaccttttggggctgtcagttttccactaggattaagattttggccgggcgcggtggctcacgcctgcaatcccaacacattggggggtcgaggcggacggatcactttgagcccaggagttcaagaccagcctgggcaacatggcgaaacctcgtctctactaaaaatacaaaatatatatatatatatatatactagctggggcacatagtggtgtgcacctgtagtcccagctgcttgggaggctgaggtgggaggatggctagagcccaggagatgggtgttgcagtgagctgagaccatgccactgtactctagcctgggtaacagccagaccctgtctcaaaaaaaaaaacaatttttttcataacataattcccatttttatttattttgagtcactcataattaattgccaaaaaagcattttatacattgagttggggggtagtggatcttagtgtggtgttgcatggaggggcgagattttatatttataatcaacacgtgggttaacatgtttttttgaaatccaagcaatacacaggaaatttaagtagaataaaaattgcagcccatttttgaaatgtcagcatgtgctgtgttcagttcaggtttttgttgtttgttttgttattttttaactaataagttggttatcagtggtgggttttcaaaatgtacttgttctaataagttgtacaatgaactaaatcagtggcattctctagataatgtgggggaaggttagaatattttctggccttctatggggtagcaacccagaatcaatctgaattagtcctgttttggtggagtttgtacattttaaatcctataacaaaaataatctagttttcatttccttactagctagatgcgaatttgtctttttgaatgaccctgtcaataagccagaaagggcaacccagaaaaagtgctccccacatccttctgagacttggcctgtgtgtgtggacgagaagccattcaccgtaagggtgcagaaagctcgaccaagccgaattgcaaacaacgttcgttctatttttaaatgtacaggttcgatcgtttctatagaaatgggtttatctaagaaaagtcttggtttgtcttgctgctgtaaaaggcctttccaaacccctccttttattcctgtttcccgaaataaggtatttgtagagttaaggacctactgcatgcctgtccccagggccccggtggaaggaaggcagcgcctgctcttccttaactcagcccatcatctgaaaattcagaagtgaaccaagggttagacgccagaggttgggcttctgttagagtggcttcaaaacatgagccttatgggaagtagccttaaaaaaagaatgggtatacgcagtgacttccgatggaaatctccaaaacaatattcctaagtagcaatggggttggctcaagtctttattaacaaagaacattctctttcatctataaagaaattcttaaagatgcattgacagtgttgaattaccaacagcctgtgaagatcagtttgaccggtgtggacacgtgctggttaagcactcaggcctacgtgggccgagcgggatcttgatcatggggctggtgtatggatccaccgtcggattccgtctgcagaggaggacgtagggggccgtcacacccaccaggcctccctgctgtgctttaacacaggcagaagaggttcatggcaatataatagtcaatgaactttcagtttaaattgtgtacatttttaaattgtaagatttttactgtatattgatgcatagtgtgattcaataaattgcttgtaatttaaaaactatttaatattcaaaataaatatagttatatatttataaa

SEQ ID NO: 147805 - DNA, 4972 bp, Homo sapiens
  Payload ID: 9242
  Gene Symbol: LMTK3
  Gene Name: lemur tyrosine kinase 3
  ENST ID: ENST00000270238
  CDS Start-End: 1-4470
atgaggcaagtgctgtggttgtgtaatgtctgcgtaaccgcacgggaaacccgccaccacctccacctccctgccatcctcgacaagatgcctgcccccggcgccctcatcctccttgcggccgtctccgcctccggctgcctggcgtccccggcccaccccgatggattcgccctgggccgggctcctctggctcctccctacgctgtggtcctcatttcctgctccggcctgctggccttcatcttcctcctcctcacctgtctgtgctgcaaacggggcgatgtcggcttcaaggaatttgagaaccctgaaggggaggactgctccggggagtacactccccctgcggaggagacctcctcctcacagtcgctgcctgatgtctacattctcccgctggctgaggtctccctgccaatgcctgccccgcagccttcacactcagacatgaccacccccctgggccttagccggcagcacctgagctacctgcaggagattgggagtggctggtttgggaaggtgatcctgggagagattttctccgactacacccccgcccaggtggtggtgaaggagctccgagccagcgcggggcccctggagcaacgcaagttcatctcggaagcacagccgtacaggagcctgcagcaccccaatgtcctccagtgcctgggtctgtgcgtggagacgctgccgtttctgctgattatggagttctgtcaactgggggacctgaagcgttacctccgagcccagcggccccccgagggcctgtcccctgagctaccccctcgagacctgcggacgctgcagaggatgggcctggagatcgcccgcgggctggcgcacctgcattcccacaactacgtgcacagcgacctggccctgcgcaactgcctgctgacctctgacctgaccgtgcgcatcggagactacgggctggcccacagcaactacaaggaggactactacctgaccccagagcgcctgtggatcccactgcgctgggcggcgcccgagctcctcggggagctccacgggaccttcatggtggtggaccagagccgcgagagcaacatctggtccctgggggtgaccctgtgggagctgtttgagtttggggcccagccctaccgccacctgtcagacgaggaggtcctcgccttcgtggtccgccagcagcatgtgaagctggcccggccgaggctcaagctgccttacgcggactactggtatgacattcttcagtcctgctggcggccacctgcccagcgcccttcagcctctgatctccaattgcagctcacctacttgctctccgagcggcctccccggcccccaccgccgccacccccaccccgagacggtcccttcccctggccctggccccctgcacacagtgcgccccgcccggggaccctctcctcaccgttccccctactggatggcttccctggagccgaccccgacgatgtgctcacggtcaccgagagtagccgcggcctcaacctcgagtgcctgtgggagaaggcccggcgtggggccggccggggtgggggggcacctgcctggcagccggcgtcggcccccccggccccccacgccaacccctccaaccctttctacgaggcgctgtccacgcccagcgtgctgcctgtcatcagcgcccgcagcccctccgtgagcagcgagtactacatccgcttggaggagcacggctcccctcctgagcccctcttccccaacgactgggaccccctggacccaggagtgcccgcccctcaggccccccaggccccctccgaggtcccccagctggtgtccgagacctgggcctcccccctcttccctgcgccccggcccttcccagcccagtcctcagcgtcaggcagcttcctgctgagcggctgggaccccgagggccggggcgccggggagaccctggcgggagaccctgccgaggtcttgggggagcgggggaccgccccgtgggtggaagaagaagaggaggaggaggagggcagctccccaggggaagacagcagcagccttggaggtggcccaagccgccggggtcccctaccctgtcccctgtgcagccgcgagggggcctgctcctgcctgccactggagcggggggacgccgtagcaggctggggaggccaccctgctcttggctgcccccacccccccgaggacgactcctcgctgcgggcagagcggggctccctggccgacttgcccatggccccccccgcctcggccccccccgagtttctggaccccctcatgggggcggcggcgccccagtaccccgggcgggggccacctcccgctcccccccccccgccgccacctcctcgggcccccgcggacccggccgcgtcccccgaccccccttcggccgtggccagtcccggttcaggcctctcgtcgccgggccccaagccgggggacagcggctacgagaccgagacccctttttccccagagggagccttcccaggtgggggggcggccgaggaggaaggggtccctcggccgcgggctccccccgagccacccgacccaggagcgccccggccacctccagacccgggtccgctcccactcccggggccccgggagaagccgaccttcgtggttcaagtgagcacggaacagctgctgatgtccctgcgggaggatgtgacaaggaacctcctgggggagaagggggcgacagcccgggagacaggacccaggaaggcggggagaggccccgggaacagagagaaagtcccgggcctgaacagggacccgacagtcctgggcaacgggaaacaagccccaagcctgagcctcccagtgaacggggtgacagtgctggagaacggggaccagagagccccaggcatcgaggagaaggcggcggagaatggggccctggggtcccccgagagagaagagaaagtgctggagaatggggagctgacacccccaaggagggaggagaaagcgctggagaatggggagctgaggtccccagaggccggggagaaggtgctggtgaatgggggcctgacacccccaaagagcgaggacaaggtgtcagagaatgggggcctgagattccccaggaacacggagaggccaccagagactgggccttggagagccccagggccctgggagaagacgcccgagagttggggtccagcccccacgatcggggagccagccccagagacctctctggagagagcccctgcacccagcgcagtggtctcctcccggaacggcggggagacagcccctggcccccttggcccagcccccaagaacgggacgctggaacccgggaccgagaggagagcccccgagactgggggggcgccgagagccccaggggctgggaggctggacctcgggagtgggggccgagccccagtgggcacggggacggcccccggcggcggccccggaagcggcgtggacgcaaaggccggatgggtagacaacacgaggccgcagccaccgccgccaccgctgccaccgccaccggaggcacagccgaggaggctggagccagcgcccccgagagccaggccggaggtggcccccgagggagagcccggggccccagacagcagggccggcggagacacggcactcagcggagacggggacccccccaagcccgagaggaagggccccgagatgccacgactattcttggacttgggaccccctcaggggaacagcgagcagatcaaagccaggctctcccggctctcgctggcgctgccgccgctcacgctcacgccattcccggggccgggcccgcggcggcccccgtgggagggcgcggacgccggggcggctggcggggaggccggcggggcgggagcgccggggccggcggaggaggacggggaggacgaggacgaggacgaggaggaggacgaggaggcggcggcgccgggcgcggcggcggggccgcggggccccgggagggcgcgagcagccccggtgcccgtcgtggtgagcagcgccgacgcggacgcggcccgcccgctgcgggggctgctcaagtctccgcgcggggccgacgagccagaggacagcgagctggagaggaagcgcaagatggtctccttccacggggacgtgaccgtctacctcttcgaccaggagacgccaaccaacgagctgagcgtccaggccccccccgagggggacacggacccgtcaacgcctccagcgcccccgacacctccccaccccgccacccccggagatgggtttcccagcaacgacagcggctttggaggcagtttcgagtgggcggaggatttccccctcctcccccctccaggccccccgctgtgcttctcccgcttctccgtctcgcctgcgctggagaccccggggccacccgcccgggcccccgacgcccggcccgcaggccccgtggagaattgattccccgaagacccgaccccgctgcaccctcagaagaggggttgagaatggaatcctctgtggatgacggcgccactgccaccaccgcagacgccgcctctggggaggcccccgaggctgggccctccccctcccactcccctaccatgtgccaaacgggaggccccgggcccccgccccccagccccccagatggctcccctgacccccctgaccccctcggagccaaatgaggcaggaatccccccgcccctccatagagagccgcctttctcggaactgaactgaactcttttgggcctggagcccctcgacacagcggaggtccctcctcacccactcctggcccaagacaggggccgcaggcttcggggacccggaccccccatttcgcgtctcccctttccctccccagcccggcccctggaggggcctctggttcaaaccttcgcgtggcattttcacattatttaaaaaagacaaaaacaactttttggaggaa

SEQ ID NO: 147806 - DNA, 5113 bp, Homo sapiens
  Payload ID: 9242
  Gene Symbol: LMTK3
  Gene Name: lemur tyrosine kinase 3
  Uniprot ID: Q96Q04
  ENST ID: ENST00000600059
  CDS Start-End: 229-4611
cctctgtccgcctctccatcccttcatccgtctgtcccttcaaagagggggaggggggtacctgagccagcaagcagcccctccctccccctgtcctgcgtctcctgcccctctcctgggccgggaggaggccagggtcgcgcgggtccccatggctgggggctgagggcccgcccccccctcctccccagccgccaccacctccacctccctgccatcctcgacaagatgcctgcccccggcgccctcatcctccttgcggccgtctccgcctccggctgcctggcgtccccggcccaccccgatggattcgccctgggccgggctcctctggctcctccctacgctgtggtcctcatttcctgctccggcctgctggccttcatcttcctcctcctcacctgtctgtgctgcaaacggggcgatgtcggcttcaaggaatttgagaaccctgaaggggaggactgctccggggagtacactccccctgcggaggagacctcctcctcacagtcgctgcctgatgtctacattctcccgctggctgaggtctccctgccaatgcctgccccgcagccttcacactcagacatgaccacccccctgggccttagccggcagcacctgagctacctgcaggagattgggagtggctggtttgggaaggtgatcctgggagagattttctccgactacacccccgcccaggtggtggtgaaggagctccgagccagcgcggggcccctggagcaacgcaagttcatctcggaagcacagccgtacaggagcctgcagcaccccaatgtcctccagtgcctgggtctgtgcgtggagacgctgccgtttctgctgattatggagttctgtcaactgggggacctgaagcgttacctccgagcccagcggccccccgagggcctgtcccctgagctaccccctcgagacctgcggacgctgcagaggatgggcctggagatcgcccgcgggctggcgcacctgcattcccacaactacgtgcacagcgacctggccctgcgcaactgcctgctgacctctgacctgaccgtgcgcatcggagactacgggctggcccacagcaactacaaggaggactactacctgaccccagagcgcctgtggatcccactgcgctgggcggcgcccgagctcctcggggagctccacgggaccttcatggtggtggaccagagccgcgagagcaacatctggtccctgggggtgaccctgtgggagctgtttgagtttggggcccagccctaccgccacctgtcagacgaggaggtcctcgccttcgtggtccgccagcagcatgtgaagctggcccggccgaggctcaagctgccttacgcggactactggtatgacattcttcagtcctgctggcggccacctgcccagcgcccttcagcctctgatctccaattgcagctcacctacttgctctccgagcggcctccccggcccccaccgccgccacccccaccccgagacggtcccttcccctggccctggccccctgcacacagtgcgccccgcccggggaccctctcctcaccgttccccctactggatggcttccctggagccgaccccgacgatgtgctcacggtcaccgagagtagccgcggcctcaacctcgagtgcctgtgggagaaggcccggcgtggggccggccggggtgggggggcacctgcctggcagccggcgtcggcccccccggccccccacgccaacccctccaaccctttctacgaggcgctgtccacgcccagcgtgctgcctgtcatcagcgcccgcagcccctccgtgagcagcgagtactacatccgcttggaggagcacggctcccctcctgagcccctcttccccaacgactgggaccccctggacccaggagtgcccgcccctcaggccccccaggccccctccgaggtcccccagctggtgtccgagacctgggcctcccccctcttccctgcgccccggcccttcccagcccagtcctcagcgtcaggcagcttcctgctgagcggctgggaccccgagggccggggcgccggggagaccctggcgggagaccctgccgaggtcttgggggagcgggggaccgccccgtgggtggaagaagaagaggaggaggaggagggcagctccccaggggaagacagcagcagccttggaggtggcccaagccgccggggtcccctaccctgtcccctgtgcagccgcgagggggcctgctcctgcctgccactggagcggggggacgccgtagcaggctggggaggccaccctgctcttggctgcccccacccccccgaggacgactcctcgctgcgggcagagcggggctccctggccgacttgcccatggccccccccgcctcggccccccccgagtttctggaccccctcatgggggcggcggcgccccagtaccccgggcgggggccacctcccgctcccccccccccgccgccacctcctcgggcccccgcggacccggccgcgtcccccgaccccccttcggccgtggccagtcccggttcaggcctctcgtcgccgggccccaagccgggggacagcggctacgagaccgagacccctttttccccagagggagccttcccaggtgggggggcggccgaggaggaaggggtccctcggccgcgggctccccccgagccacccgacccaggagcgccccggccacctccagacccgggtccgctcccactcccggggccccgggagaagccgaccttcgtggttcaagtgagcacggaacagctgctgatgtccctgcgggaggatgtgacaaggaacctcctgggggagaagggggcgacagcccgggagacaggacccaggaaggcggggagaggccccgggaacagagagaaagtcccgggcctgaacagggacccgacagtcctgggcaacgggaaacaagccccaagcctgagcctcccagtgaacggggtgacagtgctggagaacggggaccagagagccccaggcatcgaggagaaggcggcggagaatggggccctggggtcccccgagagagaagagaaagtgctggagaatggggagctgacacccccaaggagggaggagaaagcgctggagaatggggagctgaggtccccagaggccggggagaaggtgctggtgaatgggggcctgacacccccaaagagcgaggacaaggtgtcagagaatgggggcctgagattccccaggaacacggagaggccaccagagactgggccttggagagccccagggccctgggagaagacgcccgagagttggggtccagcccccacgatcggggagccagccccagagacctctctggagagagcccctgcacccagcgcagtggtctcctcccggaacggcggggagacagcccctggcccccttggcccagcccccaagaacgggacgctggaacccgggaccgagaggagagcccccgagactgggggggcgccgagagccccaggggctgggaggctggacctcgggagtgggggccgagccccagtgggcacggggacggcccccggcggcggccccggaagcggcgtggacgcaaaggccggatgggtagacaacacgaggccgcagccaccgccgccaccgctgccaccgccaccggaggcacagccgaggaggctggagccagcgcccccgagagccaggccggaggtggcccccgagggagagcccggggccccagacagcagggccggcggagacacggcactcagcggagacggggacccccccaagcccgagaggaagggccccgagatgccacgactattcttggacttgggaccccctcaggggaacagcgagcagatcaaagccaggctctcccggctctcgctggcgctgccgccgctcacgctcacgccattcccggggccgggcccgcggcggcccccgtgggagggcgcggacgccggggcggctggcggggaggccggcggggcgggagcgccggggccggcggaggaggacggggaggacgaggacgaggacgaggaggaggacgaggaggcggcggcgccgggcgcggcggcggggccgcggggccccgggagggcgcgagcagccccggtgcccgtcgtggtgagcagcgccgacgcggacgcggcccgcccgctgcgggggctgctcaagtctccgcgcggggccgacgagccagaggacagcgagctggagaggaagcgcaagatggtctccttccacggggacgtgaccgtctacctcttcgaccaggagacgccaaccaacgagctgagcgtccaggccccccccgagggggacacggacccgtcaacgcctccagcgcccccgacacctccccaccccgccacccccggagatgggtttcccagcaacgacagcggctttggaggcagtttcgagtgggcggaggatttccccctcctcccccctccaggccccccgctgtgcttctcccgcttctccgtctcgcctgcgctggagaccccggggccacccgcccgggcccccgacgcccggcccgcaggccccgtggagaattgattccccgaagacccgaccccgctgcaccctcagaagaggggttgagaatggaatcctctgtggatgacggcgccactgccaccaccgcagacgccgcctctggggaggcccccgaggctgggccctccccctcccactcccctaccatgtgccaaacgggaggccccgggcccccgccccccagccccccagatggctcccctgacccccctgaccccctcggagccaaatgaggcaggaatccccccgcccctccatagagagccgcctttctcggaactgaactgaactcttttgggcctggagcccctcgacacagcggaggtccctcctcacccactcctggcccaagacaggggccgcaggcttcggggacccggaccccccatttcgcgtctcccctttccctccccagcccggcccctggaggggcctctggttcaaaccttcgcgtggcattttcacattatttaaaaaagacaaaaacaactttttggaggaa

SEQ ID NO: 147807 - DNA, 1949 bp, Homo sapiens
  Payload ID: 9243
  Gene Symbol: LGSN
  Gene Name: lengsin, lens protein with glutamine synthetase domain
  Uniprot ID: Q5TDP6
  ENST ID: ENST00000370657
  CDS Start-End: 35-1564
gtggtttctaacgctgaacttaaaaagtgttgagatgaataatgaagaggaccttctgcaggaggactcaacaagagatgaaggcaatgagactgaagccaacagcatgaacacattaagaaggacaaggaagaaagtcactaaaccatatgtttgttcaactgaagtgggagaaacggatatgtccaattcaaatgattgcatgagggacagcagtcaaattttgaccccacctcaactctcttctagaatgaaacacattagacaagccatggccaaaaatcgcctccagtttgtacgatttgaagcaacagacctccacggcgtgtccaggtctaagactatccctgcacacttttttcaagagaaagtgagccatggtgtttgcatgccccgaggttatcttgaagtgataccaaatccaaaggacaatgaaatgaataacataagagccacatgttttaatagcgacatagtcctaatgccagagttatcaacctttagagttttgccatgggctgacagaactgcaagagtgatatgtgataccttcactgtgactggtgagcctcttttgacttccccaaggtacattgcaaagaggcagctgagccatctgcaggcctctggcttttccctgctttctgctttcatctatgatttttgcatttttggtgtgcccgaaattttaaattcaaagattatatcttttcctgctttaacatttttaaataaccatgatcagcccttcatgcaggaacttgttgatggcttgtatcacactggagccaatgtcgagagtttttcctcctctaccaggcctggtcagatggaaatctctttcctgcctgaatttggcattagctcagctgataatgcatttaccctcagaacaggtgtcaaagaagtggcaaggaaatataattacattgccagcttcttcattgagactggattttgtgattcagggattttgtctcatagtctctgggatgtcgataggaagaaaaacatgttctgcagcacttctggaactgagcagctcacgatcactgggaaaaaatggttggcaggactcttgaagcactctgctgcgctcagctgcctgatggcgccttctgttagctgccgaaagcgttattccaaggacaggaaagacctgaagaagagtgtgcctacaacatggggatacaatgacaacagctgtatatttaatatcaaatgtcatggagagaaaggcacccggatagaaaataaactaggctcagcaacagcaaacccttacttggtgctggctgcaactgttgctgccggcttagatggacttcatagcagtaatgaggtcttggctggtccagatgagagcacagacttttaccaagtggaaccttctgagatccctttaaaactagaagatgcccttgtggcactggaagaagatcaatgcctgagacaggctctaggagaaacctttattcgatattttgttgccatgaagaaatatgagttggagaatgaagaaatagctgcagagagaaataaattcttagagtattttatttagaatagagctcacaactactcctttagacatgtaattgttacttaaagctaatctaccaaaacaaaaagactgaacttttgtaattaacaacagcaacaataacaagattacgaatgcttttgacttttttttttgtccatggaatatttgacagatgaagtaggactgctgagaagattctgataacagaaacaaacaacaaagttgtggtgaagctataatatgcaaacttaccagatcttgtcagtcatttcctatgtgtatgttgacctggataagaatatccaattttgggtggcaataaatatattcgcacattaagaaaaaaaagacttaagcattagaaagcaaaatttaaatgactaaaaaagaaaaaaaagaaaag

SEQ ID NO: 147808 - DNA, 5213 bp, Homo sapiens
  Payload ID: 9243
  Gene Symbol: LGSN
  Gene Name: lengsin, lens protein with glutamine synthetase domain
  Uniprot ID: Q5TDP6
  ENST ID: ENST00000370658
  CDS Start-End: 35-661
gtggtttctaacgctgaacttaaaaagtgttgagatgaataatgaagaggaccttctgcaggaggactcaacaagagatgaaggcaatgagactgaagccaacagcatgaacacattaagaaggacaaggaagaaagtcactaaaccatatgtttgttcaactgaagtgggagaaacggatatgtccaattcaaatgattgcatgagggacagcagtcaaattttgaccccacctcaactctcttctagaatgaaacacattagacaagccatggccaaaaatcgcctccagtttgtacgatttgaagcaacagacctccacggcgtgtccaggtctaagactatccctgcacacttttttcaagagaaagtgagccatggtgtttgcatgccccgaggttatcttgaagtgataccaaatccaaaggacaatgaaatgaataacataagagccacatgttttaatagcgacatagtcctaatgccagagttatcaacctttagagttttgccatgggctgacagaactgcaagagtgatatgtgataccttcactgtgactgtctctgggatgtcgataggaagaaaaacatgttctgcagcacttctggaactgagcagctcacgatcactgggaaaaaatggttggcaggactcttgaagcactctgctgcgctcagctgcctgatggcgccttctgttagctgccgaaagcgttattccaaggacaggaaagacctgaagaagagtgtgcctacaacatggggatacaatgacaacagctgtatatttaatatcaaatgtcatggagagaaaggcacccggatagaaaataaactaggctcagcaacagcaaacccttacttggtgctggctgcaactgttgctgccggcttagatggacttcatagcagtaatgaggtcttggctggtccagatgagagcacagacttttaccaagtggaaccttctgagatccctttaaaactagaagatgcccttgtggcactggaagaagatcaatgcctgagacaggctctaggagaaacctttattcgatattttgttgccatgaagaaatatgagttggagaatgaagaaatagctgcagagagaaataaattcttagagtattttatttagaatagagctcacaactactcctttagacatgtaattgttacttaaagctaatctaccaaaacaaaaagactgaacttttgtaattaacaacagcaacaataacaagattacgaatgcttttgacttttttttttgtccatggaatatttgacagatgaagtaggactgctgagaagattctgataacagaaacaaacaacaaagttgtggtgaagctataatatgcaaacttaccagatcttgtcagtcatttcctatgtgtatgttgacctggataagaatatccaattttgggtggcaataaatatattcgcacattaagaaaaaaaagacttaagcattagaaagcaaaatttaaatgactaaaaaagaaaaaaaagaaaaggagaaaaaattttaatggtacacataggttatgatttccagggagacaaatatactaatatagtctcgctaatcaaataatattgtgaatccaggttgtatgcaccattatggtctttctaaacaagttaaataaacttttgccaaaatataatgacaggtaggcagttttcccctaagtctcttctcttttcacccttctccactagctcctgaaaagcttatgaacttcaaggttataatgtcctcaagaaacaaatccctaaggaatagaattggagctgagaacaacgaggtcagattttaaaagtagttaaagcctttcttttaacaatgcctcatatagaagttcaatacacaaagtatagatagaaagatgtttgtgtgtgagggtaggtgggctctgtctactctgcttcattctttgaaactagatgttcctctgaaacctctagtgctctgtggagtgtgagaacaactgcctggctagccagggctatgtttggagtttaagtttgttattcaaattactgaatctgctgctcacagaggttggtacctccccagagaatattacctgttccaggcctttgtttgaatgagataatattgtaactatcacaaaagtttagctgcttttgggaagaagtccaaaatccacttactagcaaatgaaacattattctactgcttaggatcaaacagcagattttatgttcaattaaaactgactgtagtctcaatttagatagcaattgcacaagcagaggattagaatttggctcagatcctcttattaaaattcatattactcagtagcttaaatagtgaaagtcagtctatccttcactaattactcccttcttttttcctttgagcaggagaagtgtgtttggatacataagaagaaagttcccagcactttgggaggccaaggcaggaggattgcttgaggccaggagtttgagtccagcctggaccacatagtgagacccctgtttctacaaaaaaaaaaaaaaaaatgcctcgcatggtggcacatgcctgtagtcccagctacgtgggaggctgagaagggaggatcgcttgagcctgggagtttcaggctgcagtgagccataatcacaccactgcactccagcttgggtgacagagtgagacactgtcttaaaaaaaagagaagaataaaattcatggatgcatatggggtagagagaaagatagtgtagggtagctgggggaaggaagggaacctgtcctgaaacctccagaatgaaatcccacacattacatcatgggagggataaggaagactctcatgccaattttctagctgtctgctagaaaattcccctctgttcattttcccctctgttctcagtaataaaacctcaatatgttctttgaaagcaatgaaaaatgaaatgatatttctgagccttcattaaggttggatgtggtcatgttattaggttcagtgcaaagaggtgaaagtagaagtgttgcatataagttctttaggacattttcttttcttttcttgtattttttttttttttccgagatggagtctcgctttgtcacccaggctgaagtgcaatgtgggggggtcttggctcactgcaacctctgccccctgggttcaagtaattctcctgcctcagcctcccaagtagctgggatcccaggtgcctgctaccatgcctggccttttagtagagatggggtttcaccatattggccagtctggtcttgaactcctgaactcaggtgatcagcctgccttggcctcccaaagtgctaggattacaggcatgagccaccatgccctaccacactttagaacatttttttaaatgacggatgctgtgtgctctgccctttctttctcttgctgccttcacccttcctgctgagtggcctacagataatgtggctaggattatgtccttgggaagggaggtttgctccacagggtacagtaataaggtggaatctctgctttgtagagcagtttgacttgcctacatccagatgtttacctgagagagaaccaaacttctatcttctttaagccacaatgattttgattctttgttagttgcaatgaaatttattttctcttttccatgtgtgtgttgtatgtgtgtttgtgtgtgagtgtgtgcatatgagtggggaatttgagggatttggggatgaaagaacaaaggtataagaaccagtgaaagacgacttcctcaatattcccacttctagagaggataatctgagttaatcaaagggatccacacatccaaaaaatgggattggctctaacccatccctataaagtggcatatccctttatagtccacgggccttaatgaaacatgtctaatgcattgacttcattttaccataatgagtaaagatgctgtaaaaagtctgataatcacagtgtttgaagccgttttttcccctttcgcattattagcataacttaaaaacacagtactcaggatgccatgtgaaggaattatataactaggaatattatcttcagtattaagtgtacagtcgtgagtcaaagaaaatattcagccatagattacaaatcagttgataacgtaagttggtgtggcagtttccaccaagatttcagttaggtgtgtgctgatgtatattcttgttctttaaggcaacccaaaaagaggcattggccagcagagttcagggccaaagacaaattggggtaggtacatgtaaaaatcagttatctatttttctatttctttcatctgttcataggctttctattgttgaaaggactttctgctgatgcttctaccttcttggtctgggttaagagggtcagacattcattcagcagcacttattgagcaccatttgtgtgctaagccttcagctgggagccatcatactaggggagaccaaaacaaagatgagcagacaatgaaagagttttggatctgtgtatcttaagcagaacataaataattttttttgtagacctaatgctgaaaaaagctatttggaaagcttctttatggctcgaaaagggtgccttataaatagctttacaaaaattgctttcttattttcatttactataattgttctaatcaaagcttaggggaaaaatgtgattactgaatttaaagttggtaattaaatgagtatacataagaaatgtaaattaaaagcgataatattttaagactagaaattaaaacattagtattgtagtaacaagtttctattttcaaggacattctataatctaaaatttcattttacagtgtgtgaataacaacaacgcttgaaatgattatttgaaggcaatgaaagatcaaaaaactttaatctgaataaaaattgaaagcatacagtgaagtctgagcttatcagtaaaacagaacagtctattgacatatctccagtcacctgtttgacaaaatacactcaccaatatgtttatgatataggtatgactggacaatacctttaaccttgggttttctatgacaggggtaagaatttgtgtctttaaacattacctatgtgcacagtgccttccctgttaaagctcttctcatgctgcctataattaggggtttacatgatacttcctaattgctaattaggatgtgaattctcagaataaaaggtacagatcttactta

SEQ ID NO: 147809 - DNA, 608 bp, Homo sapiens
  Payload ID: 9243
  Gene Symbol: LGSN
  Gene Name: lengsin, lens protein with glutamine synthetase domain
  ENST ID: ENST00000485906
  CDS Start-End: 35-608
gtggtttctaacgctgaacttaaaaagtgttgagatgaataatgaagaggaccttctgcaggaggactcaacaagagatgaaggcaatgagactgaagccaacagcatgaacacattaagaaggacaaggaagaaagtcactaaaccatatgtttgttcaactgaagtgggagaaacggatatgtccaattcaaatgattgcatgagggacagcagtcaaattttgaccccacctcaactctcttctagaatgaaacacattagacaagccatggccaaaaatcgcctccagtttgtacgatttgaagcaacagacctccacggcgtgtccaggtctaagactatccctgcacacttttttcaagagaaagtgagccatggtgtttgcatgccccgaggttatcttgaagtgataccaaatccaaaggacaatgaaatgaataacataagagccacatgttttaatagcgacatagtcctaatgccagagttatcaacctttagagttttgccatgggctgacagaactgcaagagtgatatgtgataccttcactgtgactgctcctgaaaagcttatgaacttcaaggttataatgtcctcaagaa

SEQ ID NO: 147810 - DNA, 1612 bp, Homo sapiens
  Payload ID: 9243
  Gene Symbol: LGSN
  Gene Name: lengsin, lens protein with glutamine synthetase domain
  Uniprot ID: Q5TDP6
  ENST ID: ENST00000622415
  CDS Start-End: 1-357
atgaataatgaagaggaccttctgcaggaggactcaacaagagatgaaggcaatgagactgaagccaacagcatgaacacattaagaaggacaaggaagaaagtcactaaaccatatgtttgttcaactgaagtgggagaaacggatatgtccaattcaaatgagaggatcagaaaccaaatggtgtgccacaaattagggaacacaagcaaacctatcatgggacctggctctgctgagtctcatctgtcatatgatgacaaggactctcaggatgagacaacagtgataaaacctttgccccccagaacaacaaccaatgttcctggaggtgaatttaacccaaactctgaatgaaacacattagacaagccatggccaaaaatcgcctccagtttgtacgatttgaagcaacagacctccacggcgtgtccaggtctaagactatccctgcacacttttttcaaatccaaaggacaatgaaatgaataacataagagccacatgttttaatagcgacatagtcctaatgccagagttatcaacctttagagttttgccatgggctgacagaactgcaagagtgatatgtgataccttcactgtgactggtgagcctcttttgacttccccaaggtacattgcaaagaggcagctgagccatctgcaggcctctggcttttccctgctttctgctttcatctatgatttttgcatttttggtgtgcccgaaattttaaattcaaagattatatcttttcctgctttaacatttttaaataaccatgatcagcccttcatgcaggaacttgttgatggcttgtatcacactggagccaatgtcgagagtttttcctcctctaccaggcctggtcagatggaaatctctttcctgcctgaatttggcattagctcagctgataatgcatttaccctcagaacaggtgtcaaagaagtggcaaggaaatataattacattgccagcttcttcattgagactggattttgtgattcagggattttgtctcatagtctctgggatgtcgataggaagaaaaacatgttctgcagcacttctggaactgagcagctcacgatcactgggaaaaaatggttggcaggactcttgaagcactctgctgcgctcagctgcctgatggcgccttctgttagctgccgaaagcgttattccaaggacaggaaagacctgaagaagagtgtgcctacaacatggggatacaatgacaacagctgtatatttaatatcaaatgtcatggagagaaaggcacccggatagaaaataaactaggctcagcaacagcaaacccttacttggtgctggctgcaactgttgctgccggcttagatggacttcatagcagtaatgaggtcttggctggtccagatgagagcacagacttttaccaagtggaaccttctgagatccctttaaaactagaagatgcccttgtggcactggaagaagatcaatgcctgagacaggctctaggagaaacctttattcgatattttgttgccatgaagaaatatgagttggagaatgaagaaatagctgcagagagaaataaattcttagagtattttatttag

SEQ ID NO: 147811 - DNA, 649 bp, Homo sapiens
  Payload ID: 9244
  Gene Symbol: LENEP
  Gene Name: lens epithelial protein
  Uniprot ID: Q9Y5L5
  ENST ID: ENST00000368427
  CDS Start-End: 23-208
cttcctcggaactgttgcccacatgcagccccggacacagcccctagcccaaaccctacccttcttcctcggaggggcccctcgagacactgggctgcgggtgcctgtcattaagatgggcacagggtgggagggcttccagcggaccctgaaggaagtcgcctacatcctcctctgctgctggtgtatcaaggaactgctggattaatggtagcagggaactgcctcctctccccaccagcaccatggctggcatcgctcagcccccagcccaattgccatcaagactcctgaagccagctgtgcttgaccaaggatgggccataaacaatgagtaaacagtaaagtgtggatcctgctttgagctgtgtcatctagcagacctgcctcatctctgagcctccttcattcccaacccctgcctctggtggacctctggtgggcaggagcttggactgctctggctaggaccccagtaagattgtggcaagacctggcactcctccaagcttggcacagtgagcccaccagctcagatggttgatcttaccataccctcatagtaccaagaatggactgccccctaagaaacctgtttgagaatcactgaattataaatataatccataggccttgaggcccaagatta

SEQ ID NO: 147812 - DNA, 555 bp, Homo sapiens
  Payload ID: 9244
  Gene Symbol: LENEP
  Gene Name: lens epithelial protein
  Uniprot ID: Q9Y5L5
  ENST ID: ENST00000392487
  CDS Start-End: 21-206
tcctcggaactgttgcccacatgcagccccggacacagcccctagcccaaaccctacccttcttcctcggaggggcccctcgagacactgggctgcgggtgcctgtcattaagatgggcacagggtgggagggcttccagcggaccctgaaggaagtcgcctacatcctcctctgctgctggtgtatcaaggaactgctggattaatggtagcagggaactgcctcctctccccaccagcaccatggctggcatcgctcaggtgggcagggtagagtaaacaggaggcatagctgcagcttctgtggcagagcttgccttagcttctcattctcttctttagcccccagcccaattgccatcaagactcctgaagccagctgtgcttgaccaaggatgggccataaacaatgagtaaacagtaaagtgtggatcctgctttgagctgtgtcatctagcagacctgcctcatctctgagcctccttcattcccaacccctgcctctggtggacctctggtgggcaggagcttggactgctctggctaggaccccag

SEQ ID NO: 147813 - DNA, 983 bp, Homo sapiens
  Payload ID: 9245
  Gene Symbol: LIM2
  Gene Name: lens intrinsic membrane protein 2, 19kDa
  Uniprot ID: P55344
  ENST ID: ENST00000221973
  CDS Start-End: 44-691
tggcagaaggagggctcgggcaggctctgccactcagatcaccatgtacagcttcatgggtggtggcctgttctgtgcctgggtggggaccatcctcctggtggtggccatggcaacagaccactggatgcagtaccggctgtcagggtccttcgcccaccagggcctgtggcggtactgcctgggcaacaagtgctacctgcagacagacagcatcggtgagccccccggccagggtccaggccgcgcctggggaaagagcagggcggacctcggggcccaaggacacctgtattccagatggagaactctgcggctcaaagagggaaagggagcaacccaagcatactggaatgccacccgggccttcatgatcctgtctgccctatgcgccatctccggcatcatcatgggcatcatggccttcgctcatcagcctaccttctcccgcatctcccggcccttctctgctggcatcatgtttttttcctcaacccttttcgtcgtgttggccttggccatctacactggagtcaccgtcagcttcctgggccgccgctttggggactggcgcttttcctggtcctacatcctgggctgggtggcagtgctcatgacgttcttcgcagggattttctacatgtgcgcctaccgggtgcatgaatgccggcgcctgtctacaccccgctgagcccaaatgtgtcccccaacttcatctggaagttaaagtgaggccactgaagaggaggaggagggtctagaggcctgaaatcctggttcctaggggaatgagggggctcagttctggactgtgggtttgtggggggaggctgactcctggtcctaggctggaaggaggaagaatagggcccatgggagggagctgagaagactcaagtccccgtctgcctggcaggttgttagaaaaatggactatccattagagcaactttctggggcctaataaaactgatgtgaaacta

SEQ ID NO: 147814 - DNA, 861 bp, Homo sapiens
  Payload ID: 9245
  Gene Symbol: LIM2
  Gene Name: lens intrinsic membrane protein 2, 19kDa
  Uniprot ID: P55344
  ENST ID: ENST00000596399
  CDS Start-End: 49-570
ggccgtggcagaaggagggctcgggcaggctctgccactcagatcaccatgtacagcttcatgggtggtggcctgttctgtgcctgggtggggaccatcctcctggtggtggccatggcaacagaccactggatgcagtaccggctgtcagggtccttcgcccaccagggcctgtggcggtactgcctgggcaacaagtgctacctgcagacagacagcatcgcatactggaatgccacccgggccttcatgatcctgtctgccctatgcgccatctccggcatcatcatgggcatcatggccttcgctcatcagcctaccttctcccgcatctcccggcccttctctgctggcatcatgtttttttcctcaacccttttcgtcgtgttggccttggccatctacactggagtcaccgtcagcttcctgggccgccgctttggggactggcgcttttcctggtcctacatcctgggctgggtggcagtgctcatgacgttcttcgcagggattttctacatgtgcgcctaccgggtgcatgaatgccggcgcctgtctacaccccgctgagcccaaatgtgtcccccaacttcatctggaagttaaagtgaggccactgaagaggaggaggagggtctagaggcctgaaatcctggttcctaggggaatgagggggctcagttctggactgtgggtttgtggggggaggctgactcctggtcctaggctggaaggaggaagaatagggcccatgggagggagctgagaagactcaagtccccgtctgcctggcaggttgttagaaaaatggactatccattagagcaactttctggggcctaataaaactgatgtgaaact

SEQ ID NO: 147815 - DNA, 2193 bp, Homo sapiens
  Payload ID: 9246
  Gene Symbol: LEO1
  Gene Name: LEO1 homolog, Paf1/RNA polymerase II complex component
  Uniprot ID: Q8WVC0
  ENST ID: ENST00000299601
  CDS Start-End: 62-2062
cgtgccgtaaagagaggccgggagctgcccctaaccgaggcagcagcggacgtgagcgataatggcggatatggaggatctcttcgggagcgacgccgacagcgaagctgagcgtaaagattctgattctggatctgactcagattctgatcaagagaatgctgcctctggcagtaatgcctctggaagtgaaagtgatcaggatgaaagaggtgattcaggacaaccaagtaataaggaactgtttggagatgacagtgaggacgagggagcttcacatcatagtggtagtgataatcactctgaaagatcagacaatagatcagaagcttctgagcgttctgaccatgaggacaatgacccctcagatgtagatcagcacagtggatcagaagcccctaatgatgatgaagacgaaggtcatagatcggatggagggagccatcattcagaagcagaaggttctgaaaaagcacattcagatgatgaaaaatggggcagagaagataaaagtgaccagtcagatgatgaaaagatacaaaattctgatgatgaggagagggcacaaggatctgatgaagataagctgcagaattctgacgatgatgagaaaatgcagaacacagatgatgaggagaggcctcagctttccgatgatgagagacaacagctatctgaggaggaaaaggctaattctgatgatgaacggccggtagcttctgataatgatgatgagaaacagaattctgatgatgaagaacaaccacagctgtctgatgaagagaaaatgcaaaattctgatgatgaaaggccacaggcctcagatgaagaacacaggcattcagatgatgaagaggaacaggatcataaatcagaatctgcaagaggcagtgatagtgaagatgaagttttacgaatgaaacgcaagaatgcgattgcatctgattcagaagcggatagtgacactgaggtgccaaaagataatagtggaaccatggatttatttggaggtgcagatgatatctcttcagggagtgatggagaagacaaaccacctactccaggacagcctgttgatgaaaatggattgcctcaggatcaacaggaagaggagccaattcctgagaccagaatagaagtagaaatacccaaagtaaacactgatttaggaaacgacttatattttgttaaactgcccaactttctcagtgtagagcccagaccttttgatcctcagtattatgaagatgaatttgaagatgaagaaatgctggatgaagaaggtagaaccaggttaaaattaaaggtagaaaatactataagatggaggatacgccgagatgaagaaggaaatgaaattaaagaaagcaatgctcggatagtcaagtggtcagatggaagcatgtccctgcatttaggcaatgaagtgtttgatgtgtacaaagccccactgcagggcgaccacaatcatctttttataagacaaggtactggtctacagggacaagcagtctttaaaacgaaactcaccttcagacctcactctacggacagtgccacacatagaaagatgactctgtcacttgcagataggtgttcaaagacacagaagattagaatcttgccaatggctggtcgtgatcctgaatgccaacgcacagaaatgattaagaaagaagaagaacgtttgagggcttccatacgtagggaatctcagcagcgccgaatgagagagaaacagcaccagcgggggctgagcgccagttacctggaacctgatcgatacgatgaggaggaggaaggcgaggagtccatcagcttggctgccattaaaaaccgatataaagggggcattcgagaggaacgagccagaatctattcatcagacagtgatgagggatcagaagaagataaagctcaaagattactcaaagcaaagaaacttaccagtgatgaggaaggtgaaccttccggaaagagaaaagcagaagatgatgataaagcaaataaaaagcataagaagtatgtgatcagcgatgaagaggaagaagatgatgattgaagtatgaaatatgaaaacattttatatattttattgtacagttataaatatgtaaacatgagttattttgattgaaatgaatcgatttgcttttgtgtaattttaattgtaataaaacaatttaaaagcaa

SEQ ID NO: 147816 - DNA, 1981 bp, Homo sapiens
  Payload ID: 9246
  Gene Symbol: LEO1
  Gene Name: LEO1 homolog, Paf1/RNA polymerase II complex component
  Uniprot ID: Q8WVC0
  ENST ID: ENST00000315141
  CDS Start-End: 32-1852
ctaaccgaggcagcagcggacgtgagcgataatggcggatatggaggatctcttcgggagcgacgccgacagcgaagctgagcgtaaagattctgattctggatctgactcagattctgatcaagagaatgctgcctctggcagtaatgcctctggaagtgaaagtgatcaggatgaaagaggtgattcaggacaaccaagtaataaggaactgtttggagatgacagtgaggacgagggagcttcacatcatagtggtagtgataatcactctgaaagatcagacaatagatcagaagcttctgagcgttctgaccatgaggacaatgacccctcagatgtagatcagcacagtggatcagaagcccctaatgatgatgaagacgaaggtcatagatcggatggagggagccatcattcagaagcagaaggttctgaaaaagcacattcagatgatgaaaaatggggcagagaagataaaagtgaccagtcagatgatgaaaagatacaaaattctgatgatgaggagagggcacaaggatctgatgaagataagctgcagaattctgacgatgatgagaaaatgcagaacacagatgatgaggagaggcctcagctttccgatgatgagagacaacagctatctgaggaggaaaaggctaattctgatgatgaacggccggtagcttctgataatgatgatgagaaacagaattctgatgatgaagaacaaccacagctgtctgatgaagagaaaatgcaaaattctgatgatgaaaggccacaggcctcagatgaagaacacaggcattcagatgatgaagaggaacaggatcataaatcagaatctgcaagaggcagtgatagtgaagatgaagttttacgaatgaaacgcaagaatgcgattgcatctgattcagaagcggatagtgacactgaggtgccaaaagataatagtggaaccatggatttatttggaggtgcagatgatatctcttcagggagtgatggagaagacaaaccacctactccaggacagcctgttgatgaaaatggattgcctcaggatcaacaggaagaggagccaattcctgagaccagaatagaagtagaaatacccaaagtaaacactgatttaggaaacgacttatattttgttaaactgcccaactttctcagtgtagagcccagcatgtccctgcatttaggcaatgaagtgtttgatgtgtacaaagccccactgcagggcgaccacaatcatctttttataagacaaggtactggtctacagggacaagcagtctttaaaacgaaactcaccttcagacctcactctacggacagtgccacacatagaaagatgactctgtcacttgcagataggtgttcaaagacacagaagattagaatcttgccaatggctggtcgtgatcctgaatgccaacgcacagaaatgattaagaaagaagaagaacgtttgagggcttccatacgtagggaatctcagcagcgccgaatgagagagaaacagcaccagcgggggctgagcgccagttacctggaacctgatcgatacgatgaggaggaggaaggcgaggagtccatcagcttggctgccattaaaaaccgatataaagggggcattcgagaggaacgagccagaatctattcatcagacagtgatgagggatcagaagaagataaagctcaaagattactcaaagcaaagaaacttaccagtgatgaggaaggtgaaccttccggaaagagaaaagcagaagatgatgataaagcaaataaaaagcataagaagtatgtgatcagcgatgaagaggaagaagatgatgattgaagtatgaaatatgaaaacattttatatattttattgtacagttataaatatgtaaacatgagttattttgattgaaatgaatcgatttgcttttgtgtaattttaattgtaataaaacaatttaaaagc

SEQ ID NO: 147817 - DNA, 3420 bp, Homo sapiens
  Payload ID: 9247
  Gene Symbol: LEP
  Gene Name: leptin
  Uniprot ID: P41159
  ENST ID: ENST00000308868
  CDS Start-End: 52-555
atcgcagcgccagcggttgcaaggcccaagaagcccatcctgggaaggaaaatgcattggggaaccctgtgcggattcttgtggctttggccctatcttttctatgtccaagctgtgcccatccaaaaagtccaagatgacaccaaaaccctcatcaagacaattgtcaccaggatcaatgacatttcacacacgcagtcagtctcctccaaacagaaagtcaccggtttggacttcattcctgggctccaccccatcctgaccttatccaagatggaccagacactggcagtctaccaacagatcctcaccagtatgccttccagaaacgtgatccaaatatccaacgacctggagaacctccgggatcttcttcacgtgctggccttctctaagagctgccacttgccctgggccagtggcctggagaccttggacagcctggggggtgtcctggaagcttcaggctactccacagaggtggtggccctgagcaggctgcaggggtctctgcaggacatgctgtggcagctggacctcagccctgggtgctgaggccttgaaggtcactcttcctgcaaggactacgttaagggaaggaactctggcttccaggtatctccaggattgaagagcattgcatggacaccccttatccaggactctgtcaatttccctgactcctctaagccactcttccaaaggcataagaccctaagcctccttttgcttgaaaccaaagatatatacacaggatcctattctcaccaggaagggggtccacccagcaaagagtgggctgcatctgggattcccaccaaggtcttcagccatcaacaagagttgtcttgtcccctcttgacccatctccccctcactgaatgcctcaatgtgaccaggggtgatttcagagagggcagaggggtaggcagagcctttggatgaccagaacaaggttccctctgagaattccaaggagttccatgaagaccacatccacacacgcaggaactcccagcaacacaagctggaagcacatgtttatttattctgcattttattctggatggatttgaagcaaagcaccagcttctccaggctctttggggtcagccagggccaggggtctccctggagtgcagtttccaatcccatagatgggtctggctgagctgaacccattttgagtgactcgagggttgggttcatctgagcaagagctggcaaaggtggctctccagttagttctctcgtaactggtttcatttctactgtgactgatgttacatcacagtgtttgcaatggtgttgccctgagtggatctccaaggaccaggttattttaaaaagatttgttttgtcaagtgtcatatgtaggtgtctgcacccaggggtggggaatgtttgggcagaagggagaaggatctagaatgtgttttctgaataacatttgtgtggtgggttctttggaaggagtgagatcattttcttatcttctgcaattgcttaggatgtttttcatgaaaatagctctttcaggggggttgtgaggcctggccaggcaccccctggagagaagtttctggccctggctgaccccaaagagcctggagaagctgatgctttgcttcaaatccatccagaataaaacgcaaagggctgaaagccatttgttggggcagtggtaagctctggctttctccgactgctagggagtggtctttcctatcatggagtgacggtcccacactggtgactgcgatcttcagagcaggggtccttggtgtgaccctctgaatggtccagggttgatcacactctgggtttattacatggcagtgttcctatttggggcttgcatgccaaattgtagttcttgtctgattggctcacccaagcaaggccaaaattaccaaaaatcttggggggtttttactccagtggtgaagaaaactcctttagcaggtggtcctgagacctgacaagcactgctaggcgagtgccaggactccccaggccaggccaccaggatggcccttcccactggaggtcacattcaggaagatgaaagaggaggtttggggtctgccaccatcctgctgctgtgtttttgctatcacacagtgggtggtggatctgtccaaggaaacttgaatcaaagcagttaactttaagactgagcacctgcttcatgctcagccctgactggtgctataggctggagaagctcacccaataaacattaagattgaggcctgccctcagggatcttgcattcccagtggtcaaaccgcactcacccatgtgccaaggtggggtatttaccacagcagctgaacagccaaatgcatggtgcagttgacagcaggtgggaaatggtatgagctgaggggggccgtgcccaggggcccacagggaaccctgcttgcactttgtaacatgtttacttttcagggcatcttagcttctattatagccacatccctttgaaacaagataactgagaatttaaaaataagaaaatacataagaccataacagccaacaggtggcaggaccaggactatagcccaggtcctctgatacccagagcattacgtgagccaggtaatgagggactggaaccagggagaccgagcgctttctggaaaagaggagtttcgaggtagagtttgaaggaggtgagggatgtgaattgcctgcagagagaagcctgttttgttggaaggtttggtgtgtggagatgcagaggtaaaagtgtgagcagtgagttacagcgagaggcagagaaagaagagacaggagggcaagggccatgctgaagggaccttgaagggtaaagaagtttgatattaaaggagttaagagtagcaagttctagagaagaggctggtgctgtggccagggtgagagctgctctggaaaatgtgacccagatcctcacaaccacctaatcaggctgaggtgtcttaagccttttgctcacaaaacctggcacaatggctaattcccagagtgtgaaacttcctaagtataaatggttgtctgtttttgtaacttaaaaaaaaaaaaaaaagtttggccgggtgcggtggctcacgcctgtaatcccagcactttgggaggccaaggtggggggatcacaaggtcactagatggcgagcatcctggccaacatggtgaaaccccgtctctactaaaaacacaaaagttagctgagcgtggtggcgggcgcctgtagtcccagccactcgggaggctgagacaggagaatcgcttaaacctgggaggcggagagtacagtgagccaagatcgcgccactgcactccggcctgatgacagagcgagattccgtcttaaaaaaaaaaaaaaaaaagtttgtttttaaaaaaatctaaataaaataactttgccccctg

SEQ ID NO: 147818 - DNA, 8227 bp, Homo sapiens
  Payload ID: 9248
  Gene Symbol: LEPR
  Gene Name: leptin receptor
  Uniprot ID: P48357
  ENST ID: ENST00000349533
  CDS Start-End: 186-3683
ccggtctggcttgggcaggctgcccgggccgtggcaggaagccggaagcagccgcggccccagttcgggagacatggcgggcgttaaagctctcgtggcattatccttcagtggggctattggactgacttttcttatgctgggatgtgccttagaggattatgggtgtacttctctgaagtaagatgatttgtcaaaaattctgtgtggttttgttacattgggaatttatttatgtgataactgcgtttaacttgtcatatccaattactccttggagatttaagttgtcttgcatgccaccaaattcaacctatgactacttccttttgcctgctggactctcaaagaatacttcaaattcgaatggacattatgagacagctgttgaacctaagtttaattcaagtggtactcacttttctaacttatccaaaacaactttccactgttgctttcggagtgagcaagatagaaactgctccttatgtgcagacaacattgaaggaaagacatttgtttcaacagtaaattctttagtttttcaacaaatagatgcaaactggaacatacagtgctggctaaaaggagacttaaaattattcatctgttatgtggagtcattatttaagaatctattcaggaattataactataaggtccatcttttatatgttctgcctgaagtgttagaagattcacctctggttccccaaaaaggcagttttcagatggttcactgcaattgcagtgttcatgaatgttgtgaatgtcttgtgcctgtgccaacagccaaactcaacgacactctccttatgtgtttgaaaatcacatctggtggagtaattttccagtcacctctaatgtcagttcagcccataaatatggtgaagcctgatccaccattaggtttgcatatggaaatcacagatgatggtaatttaaagatttcttggtccagcccaccattggtaccatttccacttcaatatcaagtgaaatattcagagaattctacaacagttatcagagaagctgacaagattgtctcagctacatccctgctagtagacagtatacttcctgggtcttcgtatgaggttcaggtgaggggcaagagactggatggcccaggaatctggagtgactggagtactcctcgtgtctttaccacacaagatgtcatatactttccacctaaaattctgacaagtgttgggtctaatgtttcttttcactgcatctataagaaggaaaacaagattgttccctcaaaagagattgtttggtggatgaatttagctgagaaaattcctcaaagccagtatgatgttgtgagtgatcatgttagcaaagttacttttttcaatctgaatgaaaccaaacctcgaggaaagtttacctatgatgcagtgtactgctgcaatgaacatgaatgccatcatcgctatgctgaattatatgtgattgatgtcaatatcaatatctcatgtgaaactgatgggtacttaactaaaatgacttgcagatggtcaaccagtacaatccagtcacttgcggaaagcactttgcaattgaggtatcataggagcagcctttactgttctgatattccatctattcatcccatatctgagcccaaagattgctatttgcagagtgatggtttttatgaatgcattttccagccaatcttcctattatctggctacacaatgtggattaggatcaatcactctctaggttcacttgactctccaccaacatgtgtccttcctgattctgtggtgaagccactgcctccatccagtgtgaaagcagaaattactataaacattggattattgaaaatatcttgggaaaagccagtctttccagagaataaccttcaattccagattcgctatggtttaagtggaaaagaagtacaatggaagatgtatgaggtttatgatgcaaaatcaaaatctgtcagtctcccagttccagacttgtgtgcagtctatgctgttcaggtgcgctgtaagaggctagatggactgggatattggagtaattggagcaatccagcctacacagttgtcatggatataaaagttcctatgagaggacctgaattttggagaataattaatggagatactatgaaaaaggagaaaaatgtcactttactttggaagcccctgatgaaaaatgactcattgtgcagtgttcagagatatgtgataaaccatcatacttcctgcaatggaacatggtcagaagatgtgggaaatcacacgaaattcactttcctgtggacagagcaagcacatactgttacggttctggccatcaattcaattggtgcttctgttgcaaattttaatttaaccttttcatggcctatgagcaaagtaaatatcgtgcagtcactcagtgcttatcctttaaacagcagttgtgtgattgtttcctggatactatcacccagtgattacaagctaatgtattttattattgagtggaaaaatcttaatgaagatggtgaaataaaatggcttagaatctcttcatctgttaagaagtattatatccatgatcattttatccccattgagaagtaccagttcagtctttacccaatatttatggaaggagtgggaaaaccaaagataattaatagtttcactcaagatgatattgaaaaacaccagagtgatgcaggtttatatgtaattgtgccagtaattatttcctcttccatcttattgcttggaacattattaatatcacaccaaagaatgaaaaagctattttgggaagatgttccgaaccccaagaattgttcctgggcacaaggacttaattttcagaagccagaaacgtttgagcatctttttatcaagcatacagcatcagtgacatgtggtcctcttcttttggagcctgaaacaatttcagaagatatcagtgttgatacatcatggaaaaataaagatgagatgatgccaacaactgtggtctctctactttcaacaacagatcttgaaaagggttctgtttgtattagtgaccagttcaacagtgttaacttctctgaggctgagggtactgaggtaacctatgaggacgaaagccagagacaaccctttgttaaatacgccacgctgatcagcaactctaaaccaagtgaaactggtgaagaacaagggcttataaatagttcagtcaccaagtgcttctctagcaaaaattctccgttgaaggattctttctctaatagctcatgggagatagaggcccaggcattttttatattatcagatcagcatcccaacataatttcaccacacctcacattctcagaaggattggatgaacttttgaaattggagggaaatttccctgaagaaaataatgataaaaagtctatctattatttaggggtcacctcaatcaaaaagagagagagtggtgtgcttttgactgacaagtcaagggtatcgtgcccattcccagccccctgtttattcacggacatcagagttctccaggacagttgctcacactttgtagaaaataatatcaacttaggaacttctagtaagaagacttttgcatcttacatgcctcaattccaaacttgttctactcagactcataagatcatggaaaacaagatgtgtgacctaactgtgtaatttcactgaagaaaccttcagatttgtgttataatgggtaatataaagtgtaatagattatagttgtgggtgggagagagaaaagaaaccagagtcaaatttgaaaataattgttccaaatgaatgttgtctgtttgttctctcttagtaacatagacaaaaaatttgagaaagccttcataagcctaccaatgtagacacgctcttctattttattcccaagctctagtgggaaggtcccttgtttccagctagaaataagcccaacagacaccatcttttgtgagatgtaattgttttttcagagggcgtgttgttttacctcaagtttttgttttgtaccaacacacacacacacacacattcttaacacatgtccttgtgtgttttgagagtatattatgtatttatattttgtgctatcagactgtaggatttgaagtaggactttcctaaatgtttaagataaacagaattcagccctggcctaaggggttatacttgtgaagactaatgagccaattgttatgtaccaaatctaagatatgtaccatagaatgaaataacctgcaagaatggtgatgcccacaatcagtattttgatgacaacacaagcacttttgaaaacataatgtcagttttaattcttctctctgaaagatgttgaagtggtcactttctgataaagttagattgccaaatgtcactgtatatctctccggaataattgtcttcccccatccccacctggacatatcctattttttcccctcactgagcattctgtctacataaaccaaccactgtgcagtactttacataccttaacccagttaattattgaaataattgtatgagacatctgttactatgatactccttaaagatgaagacagtaaataatttgcccacagttacagtcagtgggtgatggaatcagagttcagatttaaatccagattttttaatgctaatgattatgtttttaacctataccctacatagccatcaatttaaaaaaactgacttgtaatcaaaatttattaagtagaggctggcacagtggtgcatgcctgtaatcccagcactttgggaggctgaggcgggtggatcgcttgagctcagaagtcttgaaactagccggggcaacatagtgaggcctcgtctctacaaaaaacacaaaaattagctgagtgtgacagaaaaaataaagattataaaatgtattaagtagaagtataatgctggatgagaaattaagtgagaattgcacagatctcatgtttgcctttaacaacttaagattaatacataagtttattatttattcaacttttggtacggtaaaaaaattcaaagacagcatattgggcaacaaactaaattaagaaacctgcacatttggatgttcagtggcaagaagaccttcaagaatatcagtatcatcaaaataagtactttagtgttcaaaaatatgcctatgggtttttaaaaattatcagaatttcatatttagaccgagacaagagactcccaattttactgttatcctaaataaatctctacattccatctctagtccagttgtggctatgaagtgagcagttctaaacaatgacaaagattccagaccccacttgatagatatttttcacactttataatcaatttccactcaggaatcaataaagttattccatgtcataagtatttttaagatgtctcaggatctcacatactcaactaatgacccccttacaagaaataggtaaagggctgatagcaactcattacttgatgtggtacgagagccttagttctatgcaaagataaatggagaagcgtttttttcatggataattttacatggctttagagacacagaaacagataaattattacatgtataaaaattttagtaaaattgacattttaaatacatgcttatagattattggtatttaattgaaggtacagtacagaagagatagaaaaataaattttgccccactctgaaattgaagactgacctctgagcatgtccgctgagacacagtattctcctgtgatctgggacccagaataacaggaaagagaaactgatagatgttttcatcagcccaaggatgtatgtatcttacttgagtgaattcaacagtcccaggaccactgtagtgctgtaggtctgtgtaaagaaatgtagtgacagcacattaacctgagatcattgataccatcttggttcagcctcagttccccagataagtgaacaaatgaacaaaaatgcacttcagaaatattgaaattccaaggcactatttcatggacagtgctgaacaagtatagtttggcctattggtatgtatagacttagatcatatttattgtcaatgggcttgaattctgatttccacttttgaaagtttatttcactatgtatcattacattttattgggaccttgtgaaaactacctgccatgaaatactggattttcacataatttagaaaaaatttagaatgttttatgcctcagaatggtcaggaacttcccatttcttcccacagcttctataaaaaaaatttaaaaggaaggaggagctgaaataggggctatggtcttttaaacttataaatctggaatttttaatatttcattttaaggccttaaaccgaaacacaagctactaatcagtctttctaaatctgaccttcattgaaagcaactcagaaattaataatttgtgctgtggcttcaagtttaaatagattgtttgaagagaaatcatatgtcagggtttgcaggattacaggatttctaacttaaacccccaagaacaatgaaaaagttgacgtacatgtcactatgaataggcaccttctgttggatctctgtgtccatttagagatgagctacaagttgacaagaaaaataggagcagttttttttttctttttaaacctagtcaccaaatggtaaaaggacttggatgaaattccaataccagtgtgagattctggatttagaataaggttttataaccttaggcatgtcattcttctacttctcatttttccctaataaaacttattctctcttccataatatcatatatatggtcacattacttcaggaatatttatattacctcctccaaaactgaaagaaaataaactttaggctgtaagagttgagaattatgcatacagggctcacaggcggagttggacaatatgctgatggatcaagacatactgcaaccacaaagttccatctcacttagatgtggatgaaaaaagatctcttgctaaattattttctgtgaccttaaaagaaatttgtttcacttttcatctttcaagggtcatcttgatagttaccttaacaaacctttctcagctatttattattgagaaagcccattcttaaattttaagtcacaaaattatagttgtccactctactatgactgaaagaagcagcattcaagaaaaaatttaaacatagttaccaagaaatgtgaagaagtatttataaaaggaagctacataagtaggtaattttactctttcttaaccagtttaaaacagtaaagcacacctgcatctaatcacaatgttaggcgaacaacttaaaacatgatcagcctgtatgagaactgggatattgttacatattcagcctgtatgagaactgggatattgttgttacatgtatttgtataaacattaggagatgatttccatggcttttttttttttttttttaggaagtcttgctctgttgcccagctggagtgcagtgatgtgatctcggctcactgcaacccctgcttcccaggttcaagcgattctcctgcctcagcctccccagtagctgggattacgggcacaccaccatgcccagcttttatttatttatttatttattttggatttttagtagagatggggttttgccctgttggccaggctggtcttgaactcctgacctcaagtgatccgccctcattggcctcccaaagttctgggattacaggtgtgagagctgccgcgcctagcccttcatgaggttttatagtgaatgaattatttttctataaagtttatcaatatttattttggaaagctgctgaaaatgtctttttcaaaattaattatgcttaagatgtatggcattaaattcaattttatgaggctttctgacatatttactaaaaaaacctggaactgagactgaatttggaagacatttaattttgtagtgagatatctatattgtagatattgtacttttaaaacctgtcattaagtgtttggcatgtggttaatactttctctttagtcacaactggtattttaataaatgttataaacgtaagtgccaagatatgcatcactaactgttctatgaaatttgtctacttctcctttatgttcccaaagtcacagagaaagcagtgtactttatgacagtatatttatctttttatcattatgaattataagcagtgttaattttgagaaataaaagtccaaaaagaa

SEQ ID NO: 147819 - DNA, 2935 bp, Homo sapiens
  Payload ID: 9248
  Gene Symbol: LEPR
  Gene Name: leptin receptor
  Uniprot ID: P48357
  ENST ID: ENST00000344610
  CDS Start-End: 151-2871
accttgggcgaggagttcggagcggccccatcgcagagcccacggccagccgagcgcgcgcgacgcaggtgcccgagccccggcgccgccgccatctctgccttcggtcgagttggacccccggatcaaggtgtacttctctgaagtaagatgatttgtcaaaaattctgtgtggttttgttacattgggaatttatttatgtgataactgcgtttaacttgtcatatccaattactccttggagatttaagttgtcttgcatgccaccaaattcaacctatgactacttccttttgcctgctggactctcaaagaatacttcaaattcgaatggacattatgagacagctgttgaacctaagtttaattcaagtggtactcacttttctaacttatccaaaacaactttccactgttgctttcggagtgagcaagatagaaactgctccttatgtgcagacaacattgaaggaaagacatttgtttcaacagtaaattctttagtttttcaacaaatagatgcaaactggaacatacagtgctggctaaaaggagacttaaaattattcatctgttatgtggagtcattatttaagaatctattcaggaattataactataaggtccatcttttatatgttctgcctgaagtgttagaagattcacctctggttccccaaaaaggcagttttcagatggttcactgcaattgcagtgttcatgaatgttgtgaatgtcttgtgcctgtgccaacagccaaactcaacgacactctccttatgtgtttgaaaatcacatctggtggagtaattttccagtcacctctaatgtcagttcagcccataaatatggtgaagcctgatccaccattaggtttgcatatggaaatcacagatgatggtaatttaaagatttcttggtccagcccaccattggtaccatttccacttcaatatcaagtgaaatattcagagaattctacaacagttatcagagaagctgacaagattgtctcagctacatccctgctagtagacagtatacttcctgggtcttcgtatgaggttcaggtgaggggcaagagactggatggcccaggaatctggagtgactggagtactcctcgtgtctttaccacacaagatgtcatatactttccacctaaaattctgacaagtgttgggtctaatgtttcttttcactgcatctataagaaggaaaacaagattgttccctcaaaagagattgtttggtggatgaatttagctgagaaaattcctcaaagccagtatgatgttgtgagtgatcatgttagcaaagttacttttttcaatctgaatgaaaccaaacctcgaggaaagtttacctatgatgcagtgtactgctgcaatgaacatgaatgccatcatcgctatgctgaattatatgtgattgatgtcaatatcaatatctcatgtgaaactgatgggtacttaactaaaatgacttgcagatggtcaaccagtacaatccagtcacttgcggaaagcactttgcaattgaggtatcataggagcagcctttactgttctgatattccatctattcatcccatatctgagcccaaagattgctatttgcagagtgatggtttttatgaatgcattttccagccaatcttcctattatctggctacacaatgtggattaggatcaatcactctctaggttcacttgactctccaccaacatgtgtccttcctgattctgtggtgaagccactgcctccatccagtgtgaaagcagaaattactataaacattggattattgaaaatatcttgggaaaagccagtctttccagagaataaccttcaattccagattcgctatggtttaagtggaaaagaagtacaatggaagatgtatgaggtttatgatgcaaaatcaaaatctgtcagtctcccagttccagacttgtgtgcagtctatgctgttcaggtgcgctgtaagaggctagatggactgggatattggagtaattggagcaatccagcctacacagttgtcatggatataaaagttcctatgagaggacctgaattttggagaataattaatggagatactatgaaaaaggagaaaaatgtcactttactttggaagcccctgatgaaaaatgactcattgtgcagtgttcagagatatgtgataaaccatcatacttcctgcaatggaacatggtcagaagatgtgggaaatcacacgaaattcactttcctgtggacagagcaagcacatactgttacggttctggccatcaattcaattggtgcttctgttgcaaattttaatttaaccttttcatggcctatgagcaaagtaaatatcgtgcagtcactcagtgcttatcctttaaacagcagttgtgtgattgtttcctggatactatcacccagtgattacaagctaatgtattttattattgagtggaaaaatcttaatgaagatggtgaaataaaatggcttagaatctcttcatctgttaagaagtattatatccatgatcattttatccccattgagaagtaccagttcagtctttacccaatatttatggaaggagtgggaaaaccaaagataattaatagtttcactcaagatgatattgaaaaacaccagagtgatgcaggtttatatgtaattgtgccagtaattatttcctcttccatcttattgcttggaacattattaatatcacaccaaagaatgaaaaagctattttgggaagatgttccgaaccccaagaattgttcctgggcacaaggacttaattttcagaagaaaatgcctggcacaaaggaactactgggtggaggttggttgacttaggaaatgcttgtagactacgtcctacctcgctgccgcacctgctctccctgaggtgtgcacaatg

SEQ ID NO: 147820 - DNA, 2805 bp, Homo sapiens
  Payload ID: 9248
  Gene Symbol: LEPR
  Gene Name: leptin receptor
  Uniprot ID: P48357
  ENST ID: ENST00000371058
  CDS Start-End: 21-2741
gtgtacttctctgaagtaagatgatttgtcaaaaattctgtgtggttttgttacattgggaatttatttatgtgataactgcgtttaacttgtcatatccaattactccttggagatttaagttgtcttgcatgccaccaaattcaacctatgactacttccttttgcctgctggactctcaaagaatacttcaaattcgaatggacattatgagacagctgttgaacctaagtttaattcaagtggtactcacttttctaacttatccaaaacaactttccactgttgctttcggagtgagcaagatagaaactgctccttatgtgcagacaacattgaaggaaagacatttgtttcaacagtaaattctttagtttttcaacaaatagatgcaaactggaacatacagtgctggctaaaaggagacttaaaattattcatctgttatgtggagtcattatttaagaatctattcaggaattataactataaggtccatcttttatatgttctgcctgaagtgttagaagattcacctctggttccccaaaaaggcagttttcagatggttcactgcaattgcagtgttcatgaatgttgtgaatgtcttgtgcctgtgccaacagccaaactcaacgacactctccttatgtgtttgaaaatcacatctggtggagtaattttccagtcacctctaatgtcagttcagcccataaatatggtgaagcctgatccaccattaggtttgcatatggaaatcacagatgatggtaatttaaagatttcttggtccagcccaccattggtaccatttccacttcaatatcaagtgaaatattcagagaattctacaacagttatcagagaagctgacaagattgtctcagctacatccctgctagtagacagtatacttcctgggtcttcgtatgaggttcaggtgaggggcaagagactggatggcccaggaatctggagtgactggagtactcctcgtgtctttaccacacaagatgtcatatactttccacctaaaattctgacaagtgttgggtctaatgtttcttttcactgcatctataagaaggaaaacaagattgttccctcaaaagagattgtttggtggatgaatttagctgagaaaattcctcaaagccagtatgatgttgtgagtgatcatgttagcaaagttacttttttcaatctgaatgaaaccaaacctcgaggaaagtttacctatgatgcagtgtactgctgcaatgaacatgaatgccatcatcgctatgctgaattatatgtgattgatgtcaatatcaatatctcatgtgaaactgatgggtacttaactaaaatgacttgcagatggtcaaccagtacaatccagtcacttgcggaaagcactttgcaattgaggtatcataggagcagcctttactgttctgatattccatctattcatcccatatctgagcccaaagattgctatttgcagagtgatggtttttatgaatgcattttccagccaatcttcctattatctggctacacaatgtggattaggatcaatcactctctaggttcacttgactctccaccaacatgtgtccttcctgattctgtggtgaagccactgcctccatccagtgtgaaagcagaaattactataaacattggattattgaaaatatcttgggaaaagccagtctttccagagaataaccttcaattccagattcgctatggtttaagtggaaaagaagtacaatggaagatgtatgaggtttatgatgcaaaatcaaaatctgtcagtctcccagttccagacttgtgtgcagtctatgctgttcaggtgcgctgtaagaggctagatggactgggatattggagtaattggagcaatccagcctacacagttgtcatggatataaaagttcctatgagaggacctgaattttggagaataattaatggagatactatgaaaaaggagaaaaatgtcactttactttggaagcccctgatgaaaaatgactcattgtgcagtgttcagagatatgtgataaaccatcatacttcctgcaatggaacatggtcagaagatgtgggaaatcacacgaaattcactttcctgtggacagagcaagcacatactgttacggttctggccatcaattcaattggtgcttctgttgcaaattttaatttaaccttttcatggcctatgagcaaagtaaatatcgtgcagtcactcagtgcttatcctttaaacagcagttgtgtgattgtttcctggatactatcacccagtgattacaagctaatgtattttattattgagtggaaaaatcttaatgaagatggtgaaataaaatggcttagaatctcttcatctgttaagaagtattatatccatgatcattttatccccattgagaagtaccagttcagtctttacccaatatttatggaaggagtgggaaaaccaaagataattaatagtttcactcaagatgatattgaaaaacaccagagtgatgcaggtttatatgtaattgtgccagtaattatttcctcttccatcttattgcttggaacattattaatatcacaccaaagaatgaaaaagctattttgggaagatgttccgaaccccaagaattgttcctgggcacaaggacttaattttcagaagaaaatgcctggcacaaaggaactactgggtggaggttggttgacttaggaaatgcttgtagactacgtcctacctcgctgccgcacctgctctccctgaggtgtgcacaatg

SEQ ID NO: 147821 - DNA, 3079 bp, Homo sapiens
  Payload ID: 9248
  Gene Symbol: LEPR
  Gene Name: leptin receptor
  Uniprot ID: P48357
  ENST ID: ENST00000371059
  CDS Start-End: 186-3062
ccggtctggcttgggcaggctgcccgggccgtggcaggaagccggaagcagccgcggccccagttcgggagacatggcgggcgttaaagctctcgtggcattatccttcagtggggctattggactgacttttcttatgctgggatgtgccttagaggattatgggtgtacttctctgaagtaagatgatttgtcaaaaattctgtgtggttttgttacattgggaatttatttatgtgataactgcgtttaacttgtcatatccaattactccttggagatttaagttgtcttgcatgccaccaaattcaacctatgactacttccttttgcctgctggactctcaaagaatacttcaaattcgaatggacattatgagacagctgttgaacctaagtttaattcaagtggtactcacttttctaacttatccaaaacaactttccactgttgctttcggagtgagcaagatagaaactgctccttatgtgcagacaacattgaaggaaagacatttgtttcaacagtaaattctttagtttttcaacaaatagatgcaaactggaacatacagtgctggctaaaaggagacttaaaattattcatctgttatgtggagtcattatttaagaatctattcaggaattataactataaggtccatcttttatatgttctgcctgaagtgttagaagattcacctctggttccccaaaaaggcagttttcagatggttcactgcaattgcagtgttcatgaatgttgtgaatgtcttgtgcctgtgccaacagccaaactcaacgacactctccttatgtgtttgaaaatcacatctggtggagtaattttccagtcacctctaatgtcagttcagcccataaatatggtgaagcctgatccaccattaggtttgcatatggaaatcacagatgatggtaatttaaagatttcttggtccagcccaccattggtaccatttccacttcaatatcaagtgaaatattcagagaattctacaacagttatcagagaagctgacaagattgtctcagctacatccctgctagtagacagtatacttcctgggtcttcgtatgaggttcaggtgaggggcaagagactggatggcccaggaatctggagtgactggagtactcctcgtgtctttaccacacaagatgtcatatactttccacctaaaattctgacaagtgttgggtctaatgtttcttttcactgcatctataagaaggaaaacaagattgttccctcaaaagagattgtttggtggatgaatttagctgagaaaattcctcaaagccagtatgatgttgtgagtgatcatgttagcaaagttacttttttcaatctgaatgaaaccaaacctcgaggaaagtttacctatgatgcagtgtactgctgcaatgaacatgaatgccatcatcgctatgctgaattatatgtgattgatgtcaatatcaatatctcatgtgaaactgatgggtacttaactaaaatgacttgcagatggtcaaccagtacaatccagtcacttgcggaaagcactttgcaattgaggtatcataggagcagcctttactgttctgatattccatctattcatcccatatctgagcccaaagattgctatttgcagagtgatggtttttatgaatgcattttccagccaatcttcctattatctggctacacaatgtggattaggatcaatcactctctaggttcacttgactctccaccaacatgtgtccttcctgattctgtggtgaagccactgcctccatccagtgtgaaagcagaaattactataaacattggattattgaaaatatcttgggaaaagccagtctttccagagaataaccttcaattccagattcgctatggtttaagtggaaaagaagtacaatggaagatgtatgaggtttatgatgcaaaatcaaaatctgtcagtctcccagttccagacttgtgtgcagtctatgctgttcaggtgcgctgtaagaggctagatggactgggatattggagtaattggagcaatccagcctacacagttgtcatggatataaaagttcctatgagaggacctgaattttggagaataattaatggagatactatgaaaaaggagaaaaatgtcactttactttggaagcccctgatgaaaaatgactcattgtgcagtgttcagagatatgtgataaaccatcatacttcctgcaatggaacatggtcagaagatgtgggaaatcacacgaaattcactttcctgtggacagagcaagcacatactgttacggttctggccatcaattcaattggtgcttctgttgcaaattttaatttaaccttttcatggcctatgagcaaagtaaatatcgtgcagtcactcagtgcttatcctttaaacagcagttgtgtgattgtttcctggatactatcacccagtgattacaagctaatgtattttattattgagtggaaaaatcttaatgaagatggtgaaataaaatggcttagaatctcttcatctgttaagaagtattatatccatgatcattttatccccattgagaagtaccagttcagtctttacccaatatttatggaaggagtgggaaaaccaaagataattaatagtttcactcaagatgatattgaaaaacaccagagtgatgcaggtttatatgtaattgtgccagtaattatttcctcttccatcttattgcttggaacattattaatatcacaccaaagaatgaaaaagctattttgggaagatgttccgaaccccaagaattgttcctgggcacaaggacttaattttcagaagatgcttgaaggcagcatgttcgttaagagtcatcaccactccctaatctcaagtacccagggacacaaacactgcggaaggccacagggtcctctgcataggaaaaccagagacctttgttcacttgtttatctgctgaccctccctccactattgtcctatgaccctgccaaatccccctctgtgagaaacacccaagaatgatcaataaaaaaaaaaaa

SEQ ID NO: 147822 - DNA, 5135 bp, Homo sapiens
  Payload ID: 9248
  Gene Symbol: LEPR
  Gene Name: leptin receptor
  Uniprot ID: P48357
  ENST ID: ENST00000371060
  CDS Start-End: 186-2876
ccggtctggcttgggcaggctgcccgggccgtggcaggaagccggaagcagccgcggccccagttcgggagacatggcgggcgttaaagctctcgtggcattatccttcagtggggctattggactgacttttcttatgctgggatgtgccttagaggattatgggtgtacttctctgaagtaagatgatttgtcaaaaattctgtgtggttttgttacattgggaatttatttatgtgataactgcgtttaacttgtcatatccaattactccttggagatttaagttgtcttgcatgccaccaaattcaacctatgactacttccttttgcctgctggactctcaaagaatacttcaaattcgaatggacattatgagacagctgttgaacctaagtttaattcaagtggtactcacttttctaacttatccaaaacaactttccactgttgctttcggagtgagcaagatagaaactgctccttatgtgcagacaacattgaaggaaagacatttgtttcaacagtaaattctttagtttttcaacaaatagatgcaaactggaacatacagtgctggctaaaaggagacttaaaattattcatctgttatgtggagtcattatttaagaatctattcaggaattataactataaggtccatcttttatatgttctgcctgaagtgttagaagattcacctctggttccccaaaaaggcagttttcagatggttcactgcaattgcagtgttcatgaatgttgtgaatgtcttgtgcctgtgccaacagccaaactcaacgacactctccttatgtgtttgaaaatcacatctggtggagtaattttccagtcacctctaatgtcagttcagcccataaatatggtgaagcctgatccaccattaggtttgcatatggaaatcacagatgatggtaatttaaagatttcttggtccagcccaccattggtaccatttccacttcaatatcaagtgaaatattcagagaattctacaacagttatcagagaagctgacaagattgtctcagctacatccctgctagtagacagtatacttcctgggtcttcgtatgaggttcaggtgaggggcaagagactggatggcccaggaatctggagtgactggagtactcctcgtgtctttaccacacaagatgtcatatactttccacctaaaattctgacaagtgttgggtctaatgtttcttttcactgcatctataagaaggaaaacaagattgttccctcaaaagagattgtttggtggatgaatttagctgagaaaattcctcaaagccagtatgatgttgtgagtgatcatgttagcaaagttacttttttcaatctgaatgaaaccaaacctcgaggaaagtttacctatgatgcagtgtactgctgcaatgaacatgaatgccatcatcgctatgctgaattatatgtgattgatgtcaatatcaatatctcatgtgaaactgatgggtacttaactaaaatgacttgcagatggtcaaccagtacaatccagtcacttgcggaaagcactttgcaattgaggtatcataggagcagcctttactgttctgatattccatctattcatcccatatctgagcccaaagattgctatttgcagagtgatggtttttatgaatgcattttccagccaatcttcctattatctggctacacaatgtggattaggatcaatcactctctaggttcacttgactctccaccaacatgtgtccttcctgattctgtggtgaagccactgcctccatccagtgtgaaagcagaaattactataaacattggattattgaaaatatcttgggaaaagccagtctttccagagaataaccttcaattccagattcgctatggtttaagtggaaaagaagtacaatggaagatgtatgaggtttatgatgcaaaatcaaaatctgtcagtctcccagttccagacttgtgtgcagtctatgctgttcaggtgcgctgtaagaggctagatggactgggatattggagtaattggagcaatccagcctacacagttgtcatggatataaaagttcctatgagaggacctgaattttggagaataattaatggagatactatgaaaaaggagaaaaatgtcactttactttggaagcccctgatgaaaaatgactcattgtgcagtgttcagagatatgtgataaaccatcatacttcctgcaatggaacatggtcagaagatgtgggaaatcacacgaaattcactttcctgtggacagagcaagcacatactgttacggttctggccatcaattcaattggtgcttctgttgcaaattttaatttaaccttttcatggcctatgagcaaagtaaatatcgtgcagtcactcagtgcttatcctttaaacagcagttgtgtgattgtttcctggatactatcacccagtgattacaagctaatgtattttattattgagtggaaaaatcttaatgaagatggtgaaataaaatggcttagaatctcttcatctgttaagaagtattatatccatgatcattttatccccattgagaagtaccagttcagtctttacccaatatttatggaaggagtgggaaaaccaaagataattaatagtttcactcaagatgatattgaaaaacaccagagtgatgcaggtttatatgtaattgtgccagtaattatttcctcttccatcttattgcttggaacattattaatatcacaccaaagaatgaaaaagctattttgggaagatgttccgaaccccaagaattgttcctgggcacaaggacttaattttcagaagagaacggacattctttgaagtctaatcatgatcactacagatgaacccaatgtgccaacttcccaacagtctatagagtattagaagatttttacattttgaagaaggggagcaaatctaaaaaaaattcagttgaacttctgagagttaacatatggtggattatgttgatttagaacttaaaatagatgtgtaaatttgggttcaaaatgtagatttgagtccagtttggatgtgtgattaattttcaaatcatctaaagtttaaaagtagtattcatgatttctggcttttgatttgtcatattcctggtcataaaacattaagaaaattatggctgttgctgtcattacatatctattaaatgtcatcaaatatgtagtagacaatgctgtaattaggtgaactctaaaactgcaacatctgacaaatagctttaaaaatacaatgattataagtatggaatcagtgaaaatatttagtttgtatttttatgtccaaacttttccattttagattcctttatagacacgtcagcctaaaaatcagcctattcgggtgttcttttgaatatctcctggcatttttgtatctaactttgttcaatctgggaatttcagttttcaatatccttgaaaatggcttaagtgataacttccgtttcagttaaaaggaagcccgaagttgtgtttgtgctgcccacaggacagtgggagttacagttcatatcaggatgaccctacatacccaggtcagattgacgggaccagaagggaacatcgacttctaatccagctttcttgtttaattatgacctaaatctaatttacttccactgaaccatccaagacctctggcaggcagggaaatgggcagtgatgcaaaaaagggagactctttggagcttttatgaatagttcatggtgaggacagaacttttctactttcagacagactgcttgctagttttatgaattcagcacacgaattatgctgcgttgctcacattcaaaccaaaccaacgactatgtttaatgaactcagtattcaaatttattatatatgcgtatatatgtatatatggatcccttatatttagatttaactcgtagttttatttgaaagtagaaaagaactctacaaaaacgggaagaatgtgtctttcttcccttcttgacttctaataggtgtcattgaaatgtaaaatctaagtatgaaattatgaaaggacattctttaattactgcccactcaacacatatttaatatgtgcccagattattctaaaatcttaaaaaaagatgcatatagtgaaattttttaaatggatatacttttaataaagttttataactcactgacaaaacatatttcaatagtatatgagtatgagatttcttatcaattatgagtgaaatattctatctgaatgcattggaaggcatttacagtatttgctttcaacagttactgagtatgacattttagcatgaaatatatcaaacacatcatttgaaggacatatgtaatcttgactatggttatggtttttttgtatgtattccttgttttcatattgatagcatctaattcttttgacaatcttaatatgtaggttcatttaaattttaagacagttcagtgcatatatagtagaagccttaagaaaaaagaaaatgagcaagcaaatatttgaagaaatgtataaaaccatagatttctttcagaaaaaaaaaacaggcataggaacagttttctcttcatatattatgattatgaataataggaaagttgtattaattcagtatttgtcattatgcagtattttaatacctacataagtctattccattattatattttgcgcttggcatatttattcctttatgcttttaatcactaacatattttacttaagagtataaaactatgctaaataaattgtattgtatatggaatatgcttgccattatgaagaacagctgggtataccattatttcaagtaataaatctgaattctattagtttaaaaattgtaaaattcaagttaaatgacgtgtatgatatataagctgaacacattttctatagcccttaatttagttgtgttaatttttcaaggtgatgtatcaacagctttttttattttgcatttgttttttcaatgtgtttacattgtatgaattgagctttttgcccacagattcttgatttgtagttgtttggcaggatttttctttgtgatataatcacttctataaaaaatatgatgtaca

SEQ ID NO: 147823 - DNA, 1523 bp, Homo sapiens
  Payload ID: 9248
  Gene Symbol: LEPR
  Gene Name: leptin receptor
  ENST ID: ENST00000406510
  CDS Start-End: 738-1436
gagacatggcgggcgttaaagctctcgtggcattatccttcagtggggctattggactgacttttcttatgctgggatgtgccttagaggattatgggtgtacttctctgaagtaagatgatttgtcaaaaattctgtgtggttttgttacattgggaatttatttatgtgataactgcgtttaacttgtcatatccaattactccttggagatttaagttgtcttgcatgccaccaaattcaacctatgactacttccttttgcctgctggactctcaaagaatacttcaaattcgaatggacattatgagacagctgttgaacctaagtttaattcaagtggtactcacttttctaacttatccaaaacaactttccactgttgctttcggagtgagcaagatagaaactgctccttatgtgcagacaacattgaaggaaagacatttgtttcaacagtaaattctttagtttttcaacaaatagatgcaaactggaacatacagtgctggctaaaaggagacttaaaattattcatctgttatgtggagtcattatttaagaatctattcaggaattataactataaggtccatcttttatatgttctccagaaacgtttgagcatctttttatcaagcatacagcatcagtgacatgtggtcctcttcttttggagcctgaaacaatttcagaagatatcagtgttgatacatcatggaaaaataaagatgagatgatgccaacaactgtggtctctctactttcaacaacagatcttgaaaagggttctgtttgtattagtgaccagttcaacagtgttaacttctctgaggctgagggtactgaggtaacctatgaggacgaaagccagagacaaccctttgttaaatacgccacgctgatcagcaactctaaaccaagtgaaactggtgaagaacaagggcttataaatagttcagtcaccaagtgcttctctagcaaaaattctccgttgaaggattctttctctaatagctcatgggagatagaggcccaggcattttttatattatcagatcagcatcccaacataatttcaccacacctcacattctcagaaggattggatgaacttttgaaattggagggaaatttccctgaagaaaataatgataaaaagtctatctattatttaggggtcacctcaatcaaaaagagagagagtggtgtgcttttgactgacaagtcaagggtatcgtgcccattcccagccccctgtttattcacggacatcagagttctccaggacagttgctcacactttgtagaaaataatatcaacttaggaacttctagtaagaagacttttgcatcttacatgcctcaattccaaacttgttctactcagactcataagatcatggaaaacaagatgtgtgacctaactgtgtaatttcactgaagaaaccttcagatttgtgttataatgggtaatataaagtgtaatagattatagttgtgggtgggagagagaaaagaa

SEQ ID NO: 147824 - DNA, 5081 bp, Homo sapiens
  Payload ID: 9248
  Gene Symbol: LEPR
  Gene Name: leptin receptor
  Uniprot ID: P48357
  ENST ID: ENST00000616738
  CDS Start-End: 151-2841
accttgggcgaggagttcggagcggccccatcgcagagcccacggccagccgagcgcgcgcgacgcaggtgcccgagccccggcgccgccgccatctctgccttcggtcgagttggacccccggatcaaggtgtacttctctgaagtaagatgatttgtcaaaaattctgtgtggttttgttacattgggaatttatttatgtgataactgcgtttaacttgtcatatccaattactccttggagatttaagttgtcttgcatgccaccaaattcaacctatgactacttccttttgcctgctggactctcaaagaatacttcaaattcgaatggacattatgagacagctgttgaacctaagtttaattcaagtggtactcacttttctaacttatccaaaacaactttccactgttgctttcggagtgagcaagatagaaactgctccttatgtgcagacaacattgaaggaaagacatttgtttcaacagtaaattctttagtttttcaacaaatagatgcaaactggaacatacagtgctggctaaaaggagacttaaaattattcatctgttatgtggagtcattatttaagaatctattcaggaattataactataaggtccatcttttatatgttctgcctgaagtgttagaagattcacctctggttccccaaaaaggcagttttcagatggttcactgcaattgcagtgttcatgaatgttgtgaatgtcttgtgcctgtgccaacagccaaactcaacgacactctccttatgtgtttgaaaatcacatctggtggagtaattttccagtcacctctaatgtcagttcagcccataaatatggtgaagcctgatccaccattaggtttgcatatggaaatcacagatgatggtaatttaaagatttcttggtccagcccaccattggtaccatttccacttcaatatcaagtgaaatattcagagaattctacaacagttatcagagaagctgacaagattgtctcagctacatccctgctagtagacagtatacttcctgggtcttcgtatgaggttcaggtgaggggcaagagactggatggcccaggaatctggagtgactggagtactcctcgtgtctttaccacacaagatgtcatatactttccacctaaaattctgacaagtgttgggtctaatgtttcttttcactgcatctataagaaggaaaacaagattgttccctcaaaagagattgtttggtggatgaatttagctgagaaaattcctcaaagccagtatgatgttgtgagtgatcatgttagcaaagttacttttttcaatctgaatgaaaccaaacctcgaggaaagtttacctatgatgcagtgtactgctgcaatgaacatgaatgccatcatcgctatgctgaattatatgtgattgatgtcaatatcaatatctcatgtgaaactgatgggtacttaactaaaatgacttgcagatggtcaaccagtacaatccagtcacttgcggaaagcactttgcaattgaggtatcataggagcagcctttactgttctgatattccatctattcatcccatatctgagcccaaagattgctatttgcagagtgatggtttttatgaatgcattttccagccaatcttcctattatctggctacacaatgtggattaggatcaatcactctctaggttcacttgactctccaccaacatgtgtccttcctgattctgtggtgaagccactgcctccatccagtgtgaaagcagaaattactataaacattggattattgaaaatatcttgggaaaagccagtctttccagagaataaccttcaattccagattcgctatggtttaagtggaaaagaagtacaatggaagatgtatgaggtttatgatgcaaaatcaaaatctgtcagtctcccagttccagacttgtgtgcagtctatgctgttcaggtgcgctgtaagaggctagatggactgggatattggagtaattggagcaatccagcctacacagttgtcatggatataaaagttcctatgagaggacctgaattttggagaataattaatggagatactatgaaaaaggagaaaaatgtcactttactttggaagcccctgatgaaaaatgactcattgtgcagtgttcagagatatgtgataaaccatcatacttcctgcaatggaacatggtcagaagatgtgggaaatcacacgaaattcactttcctgtggacagagcaagcacatactgttacggttctggccatcaattcaattggtgcttctgttgcaaattttaatttaaccttttcatggcctatgagcaaagtaaatatcgtgcagtcactcagtgcttatcctttaaacagcagttgtgtgattgtttcctggatactatcacccagtgattacaagctaatgtattttattattgagtggaaaaatcttaatgaagatggtgaaataaaatggcttagaatctcttcatctgttaagaagtattatatccatgatcattttatccccattgagaagtaccagttcagtctttacccaatatttatggaaggagtgggaaaaccaaagataattaatagtttcactcaagatgatattgaaaaacaccagagtgatgcaggtttatatgtaattgtgccagtaattatttcctcttccatcttattgcttggaacattattaatatcacaccaaagaatgaaaaagctattttgggaagatgttccgaaccccaagaattgttcctgggcacaaggacttaattttcagaagagaacggacattctttgaagtctaatcatgatcactacagatgaacccaatgtgccaacttcccaacagtctatagagtattagaagatttttacattttgaagaaggggagcaaatctaaaaaaaattcagttgaacttctgagagttaacatatggtggattatgttgatttagaacttaaaatagatgtgtaaatttgggttcaaaatgtagatttgagtccagtttggatgtgtgattaattttcaaatcatctaaagtttaaaagtagtattcatgatttctggcttttgatttgtcatattcctggtcataaaacattaagaaaattatggctgttgctgtcattacatatctattaaatgtcatcaaatatgtagtagacaatgctgtaattaggtgaactctaaaactgcaacatctgacaaatagctttaaaaatacaatgattataagtatggaatcagtgaaaatatttagtttgtatttttatgtccaaacttttccattttagattcctttatagacacgtcagcctaaaaatcagcctattcgggtgttcttttgaatatctcctggcatttttgtatctaactttgttcaatctgggaatttcagttttcaatatccttgaaaatggcttaagtgataacttccgtttcagttaaaaggaagcccgaagttgtgtttgtgctgcccacaggacagtgggagttacagttcatatcaggatgaccctacatacccaggtcagattgacgggaccagaagggaacatcgacttctaatccagctttcttgtttaattatgacctaaatctaatttacttccactgaaccatccaagacctctggcaggcagggaaatgggcagtgatgcaaaaaagggagactctttggagcttttatgaatagttcatggtgaggacagaacttttctactttcagacagactgcttgctagttttatgaattcagcacacgaattatgctgcgttgctcacattcaaaccaaaccaacgactatgtttaatgaactcagtattcaaatttattatatatgcgtatatatgtatatatggatcccttatatttagatttaactcgtagttttatttgaaagtagaaaagaactctacaaaaacgggaagaatgtgtctttcttcccttcttgacttctaataggtgtcattgaaatgtaaaatctaagtatgaaattatgaaaggacattctttaattactgcccactcaacacatatttaatatgtgcccagattattctaaaatcttaaaaaaagatgcatatagtgaaattttttaaatggatatacttttaataaagttttataactcactgacaaaacatatttcaatagtatatgagtatgagatttcttatcaattatgagtgaaatattctatctgaatgcattggaaggcatttacagtatttgctttcaacagttactgagtatgacattttagcatgaaatatatcaaacacatcatttgaaggacatatgtaatcttgactatggttatggtttttttgtatgtattccttgttttcatattgatagcatctaattcttttgacaatcttaatatgtaggttcatttaaattttaagacagttcagtgcatatatagtagaagccttaagaaaaaagaaaatgagcaagcaaatatttgaagaaatgtataaaaccatagatttctttcagaaaaaaaaaacaggcataggaacagttttctcttcatatattatgattatgaataataggaaagttgtattaattcagtatttgtcattatgcagtattttaatacctacataagtctattccattattatattttgcgcttggcatatttattcctttatgcttttaatcactaacatattttacttaagagtataaaactatgctaaataaattgtattgtatatggaatatgcttgccattatgaagaacagctgggtataccattatttcaagtaataaatctgaattctattagtttaaaaattgtaaaattcaagttaaatgacgtgtatgatatataagctgaacacattttctatagcccttaatttagttgtgttaatttttcaaggtgatgtatcaacagctttttttattttgcatttgttttttcaatgtgtttacattgtatgaattgagctttttgcccacagattcttgatttgtagttgtttggcaggatttttctttgtgatataatcacttct

SEQ ID NO: 147825 - DNA, 4622 bp, Homo sapiens
  Payload ID: 9249
  Gene Symbol: LEPROT
  Gene Name: leptin receptor overlapping transcript
  Uniprot ID: O15243
  ENST ID: ENST00000371065
  CDS Start-End: 139-534
gttctgcaccggcgggggcggggctctgcgtggccggggcgggctcgggatccgcggggcgactcccggtctggcttgggcaggctgcccgggccgtggcaggaagccggaagcagccgcggccccagttcgggagacatggcgggcgttaaagctctcgtggcattatccttcagtggggctattggactgacttttcttatgctgggatgtgccttagaggattatggcgtttactggcccttattcgtcctgattttccacgccatctcccccatcccccatttcattgccaaaagagtcacctatgactcagatgcaaccagtagtgcctgtcgggaactggcatatttcttcactactggaattgttgtttctgcctttggatttcctgttattcttgctcgtgtggctgtgatcaaatggggagcctgcggccttgtgttggcaggcaatgcagtcattttccttacaattcaagggtttttccttatatttggaagaggagatgattttagctgggagcagtggtagcactttattctgattacagtgcattgaatttcttagaactcatactatctgtatacatgtgcacatgcggcattttactatgaaatttaatatgctgggttttttaatacctttatatatcatgttcactttaagaaagacttcataagtaggagatgagttttattctcagcaaatagacctgtcaaatttagattatgttactcaaattatgttacttgtttggctgttcatgtagtcacggtgctctcagaaaatatattaacgcagtcttgtaggcagctgccaccttatgcagtgcatcgaaaccttttgcttggggatgtgcttggagaggcagataacgctgaagcaggcctctcatgacccaggaaggccggggtggatccctctttgtgttgtagtccatgctattaaaagtgtggcccacagaccaagagcctcaacatttcctagagccttattagaaatgcagaatctgaagccccactctggacccaggacattttgatgagatccaaaggagttgtatgcacatgaaagtttgagaagcatcatcatagagaagtaaacatcacacccaacttccttatctttccagtggctaaaccacttaacctctctgggtgttacctgctcatttgtttaaaaaaaaaaaaaaagtctcacctgctttcatgctgaggacaagttcagatgttcaagcctataatatttaggcagttcctcaaatttatgaaaagtgttctcagaattgggagacagtcaaagggtacaaagcctcagttaggaggaataagtgtgatttttttttaaagatcacttgcacagcatgctaaatataggaataattgaatgtatatttcaatattgctaagagagtaaatttctaatgttctcataaaaaagttaaatatttgagatcatatgttaattagtgtaatcattccaccttatattcaaaaatcataaaaccgtattgtaccctataaaaatatacaataatttgtcaatatataatcaaaataaaaaacaaaacatactctctcccccaaaaaaacatctcagtggggaacagatgtatcttttcatctgaaagacaatgctgggggaagagctccactgagatgcgggcagggaggctgggctcgagccagcccctgcgttagcaggagggggagaacagataggtaactcttttacatttcctttatgatctggcacttctccccagctccttccctctgccccccacccctactcctcaacagttctggtttgccctgacttctctacggctctggcttcttcccgaagagatataggagccatgtaagcacgcagtgggtgaactgcttaatttcactacgtgttgatgtacttgtcttccgtcctgtaggtcttttctatataactttatgccacccttaaatgaatcattgggtatacctgtcatgttggatcctgtaatcacagttttccctgctcacctttttgtctaagatctattgagaaagggaaatatgggaaggagaaccatttgatcagaatacaaccaatagtctttaagcattgttaaagtatgaaactgaaatacattcaaaacacttaatccttgaggcttgtgatctgagtaattagcaggtatgatgctgggactggaaaatagaaagtaataactaaagggttaatgtgcaacgttattttttggccttgttcatgattttatgttttcagtgtcctgtgtacatatagaattgttaaagttgtcatttccaatatttatattagaaaaattatttagatactttataattttaaccggcatttttaataatgacacttgcatttattgtattgtaataaatttcacttttaactttaaaagtttaactttaaaatttttttgtgatgttgccttgcctgaaaagataacaaaaatgagagaatttcttgatgttttaaaatgggcagttttgagcaataatctgtcctaacagaacagtagcaataagttttaggataccatcttgaatgtctagttggtgtgcaatagcttttctttctaagatggcaataatgattcatttctactacattttgcaaaagtgtttttgttgcttatacacattttcaataaccaaggtagccttcatatgtagccttaaagcattacctcttgattgtatctttagattgatataaagtacttgcatatagagtatttgaagtgatagattattagatttgctctatgtctgaaaagagagctattctgcagtgcctaaatatcatttaaacagtaaatattaataggaaatattgctatatctgaatatataatacaaaagtttgatcatggtgacacaaatgttggacatttttttccttataaaaggctctttttttatatattgtacaatatatttggagattcagagcatagtgactatagtcgaaaactgagattgcacttccaaaattggccacaagtaaataatcttatgaagggattctttatcatgtttcaaacaagtgggttacaagcagactttgagacacttttccacagaaacaatactatgaattggtgattgagttcccaggccaagcctccctcaacaggttcaactctaatatacctaacctgtgatactgaaggtgcctgcctgagttttgggtctctgagacagggtagtgtgagtagtttggaggaaggacagtgcaactttccaccccttttcctaagaacaaggtctttctccttttaatttttccactcattttcacctcctaatgcccttgagatccaggtacactcctgggagttttgttcacctctcccaactgagaaccttcccactgggctccatcctccctcctgaggttcttcatattccagagtcacccacccttctcctcccattagtcagttctctaagtacagctgatgtcatgtggtgctgagaagaaagcagatcacacttcatcacagaaagaatgccttgtgattatcttctccacatctgaaattccttttgacacctgcattgggccgactgccattcccatgactgctgcacctgcgtttttagagaatgcctcataacccactgattctcattcacagagaatgggagaacggaatgaagaaagattccagcagcttatagaaggatagcaatattttgggacagggaaaatcctgtcatacctcatctcttcctcaggaggagttctgagctggtcctgcttttcatagttgtttcttttcttccacttaagaactcatagatttttcttactgtcctaaggaagtccttacctctgaggtatctcctcaatgaatactgttttcaaggctgaaatagttcattatgttaataaccttctttatgttctcagggaaatgcttaggtggtgtcacaaaatgtgccttttcttttctttttttttttttttttttgaggcagagtctcgctctgttgcccaggctggagtgcagtggtgcgatcttggctcactgcaagctccgcctcccgggttcacgccattctcctgcctcagcctcccaaggagctgggactacaggctcccgccaccacgcctggctaatttttttgtatttttagtaaagacgggtttcatcgtgttagccaggatggtctcgatctcctgacctcatgatccgcccgcctctgcctcccaaagtgctgggattacaggcctgagccactgtgcccagccaaaatgtgcctttgcaaagtttgcgaaatcagattttgtatcccaatagaaccaaaatatttatgaggatgctagcattttccaagcatagtaattagttcacaactgagaaatattatgtctgtagtagataaatattagttgtgcattttaatttaattctcctttttccattttgtctcatgaagtaccttattgcaaaaatcccactgagtaatagctcataaattataatctttcaaatagccatgctaccagcgtacaacagtgatacatgtaaccccaaatgtgatgtgagaggacgattactttgtaaataaaacttgttattgacattttaa

SEQ ID NO: 147826 - DNA, 4625 bp, Homo sapiens
  Payload ID: 9249
  Gene Symbol: LEPROT
  Gene Name: leptin receptor overlapping transcript
  ENST ID: ENST00000613538
  CDS Start-End: 115-537
tcgggagacatggcgggcgttaaagagaagaaaccagtgtgtgtgtagtatgtgttttttgcatggggcagttggtaaaaacaccgcgtcccttatctgtatggcttcagagcaatgcgagacggaaaaggttttttgcaaggcttcctgtattttgctctcgtggcattatccttcagtggggctattggactgacttttcttatgctgggatgtgccttagaggattatggcgtttactggcccttattcgtcctgattttccacgccatctcccccatcccccatttcattgccaaaagagtcacctatgactcagatgcaaccagtagtgcctgtcgggaactggcatatttcttcactactggaattgttgtttctgcctttggatttcctgttattcttgctcgtgtggctgtgatcaaatggggagcctgcggccttgtgttggcaggcaatgcagtcattttccttacaattcaagggtttttccttatatttggaagaggagatgattttagctgggagcagtggtagcactttattctgattacagtgcattgaatttcttagaactcatactatctgtatacatgtgcacatgcggcattttactatgaaatttaatatgctgggttttttaatacctttatatatcatgttcactttaagaaagacttcataagtaggagatgagttttattctcagcaaatagacctgtcaaatttagattatgttactcaaattatgttacttgtttggctgttcatgtagtcacggtgctctcagaaaatatattaacgcagtcttgtaggcagctgccaccttatgcagtgcatcgaaaccttttgcttggggatgtgcttggagaggcagataacgctgaagcaggcctctcatgacccaggaaggccggggtggatccctctttgtgttgtagtccatgctattaaaagtgtggcccacagaccaagagcctcaacatttcctagagccttattagaaatgcagaatctgaagccccactctggacccaggacattttgatgagatccaaaggagttgtatgcacatgaaagtttgagaagcatcatcatagagaagtaaacatcacacccaacttccttatctttccagtggctaaaccacttaacctctctgggtgttacctgctcatttgtttaaaaaaaaaaaaaaagtctcacctgctttcatgctgaggacaagttcagatgttcaagcctataatatttaggcagttcctcaaatttatgaaaagtgttctcagaattgggagacagtcaaagggtacaaagcctcagttaggaggaataagtgtgatttttttttaaagatcacttgcacagcatgctaaatataggaataattgaatgtatatttcaatattgctaagagagtaaatttctaatgttctcataaaaaagttaaatatttgagatcatatgttaattagtgtaatcattccaccttatattcaaaaatcataaaaccgtattgtaccctataaaaatatacaataatttgtcaatatataatcaaaataaaaaacaaaacatactctctcccccaaaaaaacatctcagtggggaacagatgtatcttttcatctgaaagacaatgctgggggaagagctccactgagatgcgggcagggaggctgggctcgagccagcccctgcgttagcaggagggggagaacagataggtaactcttttacatttcctttatgatctggcacttctccccagctccttccctctgccccccacccctactcctcaacagttctggtttgccctgacttctctacggctctggcttcttcccgaagagatataggagccatgtaagcacgcagtgggtgaactgcttaatttcactacgtgttgatgtacttgtcttccgtcctgtaggtcttttctatataactttatgccacccttaaatgaatcattgggtatacctgtcatgttggatcctgtaatcacagttttccctgctcacctttttgtctaagatctattgagaaagggaaatatgggaaggagaaccatttgatcagaatacaaccaatagtctttaagcattgttaaagtatgaaactgaaatacattcaaaacacttaatccttgaggcttgtgatctgagtaattagcaggtatgatgctgggactggaaaatagaaagtaataactaaagggttaatgtgcaacgttattttttggccttgttcatgattttatgttttcagtgtcctgtgtacatatagaattgttaaagttgtcatttccaatatttatattagaaaaattatttagatactttataattttaaccggcatttttaataatgacacttgcatttattgtattgtaataaatttcacttttaactttaaaagtttaactttaaaatttttttgtgatgttgccttgcctgaaaagataacaaaaatgagagaatttcttgatgttttaaaatgggcagttttgagcaataatctgtcctaacagaacagtagcaataagttttaggataccatcttgaatgtctagttggtgtgcaatagcttttctttctaagatggcaataatgattcatttctactacattttgcaaaagtgtttttgttgcttatacacattttcaataaccaaggtagccttcatatgtagccttaaagcattacctcttgattgtatctttagattgatataaagtacttgcatatagagtatttgaagtgatagattattagatttgctctatgtctgaaaagagagctattctgcagtgcctaaatatcatttaaacagtaaatattaataggaaatattgctatatctgaatatataatacaaaagtttgatcatggtgacacaaatgttggacatttttttccttataaaaggctctttttttatatattgtacaatatatttggagattcagagcatagtgactatagtcgaaaactgagattgcacttccaaaattggccacaagtaaataatcttatgaagggattctttatcatgtttcaaacaagtgggttacaagcagactttgagacacttttccacagaaacaatactatgaattggtgattgagttcccaggccaagcctccctcaacaggttcaactctaatatacctaacctgtgatactgaaggtgcctgcctgagttttgggtctctgagacagggtagtgtgagtagtttggaggaaggacagtgcaactttccaccccttttcctaagaacaaggtctttctccttttaatttttccactcattttcacctcctaatgcccttgagatccaggtacactcctgggagttttgttcacctctcccaactgagaaccttcccactgggctccatcctccctcctgaggttcttcatattccagagtcacccacccttctcctcccattagtcagttctctaagtacagctgatgtcatgtggtgctgagaagaaagcagatcacacttcatcacagaaagaatgccttgtgattatcttctccacatctgaaattccttttgacacctgcattgggccgactgccattcccatgactgctgcacctgcgtttttagagaatgcctcataacccactgattctcattcacagagaatgggagaacggaatgaagaaagattccagcagcttatagaaggatagcaatattttgggacagggaaaatcctgtcatacctcatctcttcctcaggaggagttctgagctggtcctgcttttcatagttgtttcttttcttccacttaagaactcatagatttttcttactgtcctaaggaagtccttacctctgaggtatctcctcaatgaatactgttttcaaggctgaaatagttcattatgttaataaccttctttatgttctcagggaaatgcttaggtggtgtcacaaaatgtgccttttcttttctttttttttttttttttttgaggcagagtctcgctctgttgcccaggctggagtgcagtggtgcgatcttggctcactgcaagctccgcctcccgggttcacgccattctcctgcctcagcctcccaaggagctgggactacaggctcccgccaccacgcctggctaatttttttgtatttttagtaaagacgggtttcatcgtgttagccaggatggtctcgatctcctgacctcatgatccgcccgcctctgcctcccaaagtgctgggattacaggcctgagccactgtgcccagccaaaatgtgcctttgcaaagtttgcgaaatcagattttgtatcccaatagaaccaaaatatttatgaggatgctagcattttccaagcatagtaattagttcacaactgagaaatattatgtctgtagtagataaatattagttgtgcattttaatttaattctcctttttccattttgtctcatgaagtaccttattgcaaaaatcccactgagtaatagctcataaattataatctttcaaatagccatgctaccagcgtacaacagtgatacatgtaaccccaaatgtgatgtgagaggacgattactttgtaaataaaacttgttattgacattttaa

SEQ ID NO: 147827 - DNA, 3173 bp, Homo sapiens
  Payload ID: 9250
  Gene Symbol: LEPROTL1
  Gene Name: leptin receptor overlapping transcript-like 1
  Uniprot ID: O95214
  ENST ID: ENST00000321250
  CDS Start-End: 116-511
gctgcgtcgcgcacttccgggtgttgtctggccgccgtagcgcgtcttgggtctcccggctgccgctgctgccgccgccgcctcgggtcgtggagccaggagcgacgtcaccgccatggcaggcatcaaagctttgattagtttgtcctttggaggagcaatcggactgatgtttttgatgcttggatgtgcccttccaatatacaacaaatactggcccctctttgttctatttttttacatcctttcacctattccatactgcatagcaagaagattagtggatgatacagatgctatgagtaacgcttgtaaggaacttgccatctttcttacaacgggcattgtcgtgtcagcttttggactccctattgtatttgccagagcacatctgattgagtggggagcttgtgcacttgttctcacaggaaacacagtcatctttgcaactatactaggctttttcttggtctttggaagcaatgacgacttcagctggcagcagtggtgaaaagaaattactgaactattgtcaaatggacttcctgtcatttgttggccattcacgcacacaggagatggggcagttaatgctgaatggtatagcaagcctcttgggggtattttaggtgctcccttctcacttttattgtaagcatactattttcacagagacttgctgaaggattaaaaggattttctcttttggaaaagcttgactgatttcacacttatctatagtatgctttttgtggtgtcctgctgaatttaaatatttatgtgtttttcctgttaggttgattttttttggaatcaatatgcaatgttaaacacttttttaatgtaatcatttgcattggttaggaattcagaattccgccggctctattactggtcaagtacatcttttctcttaaaattatttagcctccattattacaaaaaattataaaaataagttttcagtcagtcaggatgacatcactcccaatgttatgcagacatacagacggttggcatacgttatagactgtatactcagtgcaaatatagctgcatttatacctcagaggggccaagtgttaatgcccatgccctccgttaagggttgttggttttactggtagacagatgttttgtggattgaaaattattttatggaattgctacagaggagtgcttttcttctcaattgttagaagaatttatgttaaactttaaggtaagggtgtaaaaacatttttgagataaggtttttatttatgtttattattgttagagtgagttgcaatgtgggaagaaatgacattgaaattccagtttttgaatcctgtttctatttataagtgaaatttgtgatctcctatcaacctttcatgttttaccctgttaaaatggacatacatggaaccactactgatgagggacagttgtatgtttgcatcatatatgccagaaaaccttcctctgcttcctccttttgacttatttggtatgttgtatatattacataaaataacttttcaaatatagtttaataacacttagaagtgtttacttacctggaaaataattgctatgccgtacattcagagtgccccctcccctgcaaggccttgccatgattaacaagtaacttgttagtcttacagataattcatgcattaacagtttaagatttagaccatggtaatagtagttcttattctctaaggttatatcatatgtaatttaaaagtatttttaagacaagtttcctgtatacctctgaactgttttgattttgagttcatcatgatagatctgctgtttccttataaaaggcatttgttgtgtgagttaatgcaaagtagccaagtccagctatatagcagcttcagaaacatacctgaccaaaaaattcccagtaaccaggcatgatcaatttatagtggtcgtttacatctaataattatcaggacttttttcaggagtgggttataaaaacattcaagttggtctgacagtattttgttaaggatatttgtttgtatgtttattcagtatacttacataaaaattatttcgccatcagccaaaactcagtaatcatgacagctgtctgttgttttatgaagtttatttctcaagaaaatgggaataaatttgggatttgttcagcttttttactaaagatgcctaaagccacaggttttattgcctaacttaagccatgacttttagatatgagatgacgggaagcaggacgaaatatcggcgtgtggctggagccttcccactggaggctgaaagtggcttgtggtattataatgttcagatttcaagaggaaggtgcaggtacacatgagttagagagctggtgagacagttgggaactctttgtgcttgtgatctactggacttttttttgcaggaagtgcattctctggtccttccctattttctgttctggatgtcagtgcagtgcactgctactgttttatccacttggccacagactttttctaacagctgcgtattatttctatatactaactgcattggcagcattgtgtctttgaccttgtatactagcttgacatagtgctgtctctgatttctaggctagttacttgagatatgaattttccatagaatatgcactgatacaatattaccattcttctatggaaagaaaacttttgatgatgaaacaataaagattttaaatatctattttagtttgtgggtgtttttgaaatgaaaatatatggcacactttcattctgaagtgcattaacattctaataaggtgatgtaaagcaagatgacattggtgtaatgttagagttgcagaagtttccattccaaaataaaatggaaaccatagttacagatattacaatgcagccctgtaattttgagctgtagtaaaaggattggtaatctgggaagtagaatttttacaaaatcttttacaaaaatagtcataaaaggttttgttgacatttaagactactactgatctaaaggcaaggtcctacttcttaaattttcagaacatttttatgacttcttattatgtatttattaccactcattattatagcatgttactttttgcaaacattttaaacaaaaaatatttctgtttggtacactgtgaagagagaaaagtactgttctgtattttc

SEQ ID NO: 147828 - DNA, 908 bp, Homo sapiens
  Payload ID: 9250
  Gene Symbol: LEPROTL1
  Gene Name: leptin receptor overlapping transcript-like 1
  ENST ID: ENST00000442880
  CDS Start-End: 89-523
ctggccgccgtagcgcgtcttgggtctcccggctgccgctgctgccgccgccgcctcgggtcgtggagccaggagcgacgtcaccgccatggcaggcatcaaagctttgattagtttgtcctttggaggagcaatcggactgatgtttttgatgcttggatgtgcccttccaatatacaacaaatactggcccctctttgttctatttttttacatcctttcacctattccatactgcatagcaagaagattagtggatgatacagatgctatgagtaacgcttgtaaggaacttgccatctttcttacaacgggcattgtcgtgtcagcttttggactccctattgtatttgccagagcacatctgggtccagatgtctgcatcggggacatatccctcctctccagggctctgaccaagctcaggcccaaagcccgctgcgtggaggagggagtcgtccaggatccagtgggagtagtagatggggcgcctacccttcttcagcaagatgggaacagctgagtctgaaggaagagaaacactgacacagcagctgcctctcccagcagccgccatgagaagattgttacctgcaagcagagtgtccactcaacccgtgctgaggctggcagacagtgctgagtcacttctgggcaggcctgctctgtgggctctaggattcctgctttgccctccctctcaggcacaatgacaactactgctcagtgccagacactgcaccatgtaggcaacacgtggcagtgatgattagtcacaaaatcacatttatattcattctaatgaaactgccattgcaaaattataactgagacagtgaaagaagtctgacctaaccaactccatcttgcttctaacctccaagctgtccttgttcattcccgggact

SEQ ID NO: 147829 - DNA, 847 bp, Homo sapiens
  Payload ID: 9250
  Gene Symbol: LEPROTL1
  Gene Name: leptin receptor overlapping transcript-like 1
  ENST ID: ENST00000518192
  CDS Start-End: 156-620
ggggaagcgacccccgccccggccctgcgcttggcccggaggtgggcgcggcgccctcgggcaacggacggttgcgaccccggcttcgccccgcagcccccactttctgccgatttcggcagcctctctcccacccatcgccccccggacaaaatatgaagtggttggcggtcagtgaggagtcccgtcgcgacttggacggccacacacgttttgcaggagtttgcatccgagagagagctttgattagtttgtcctttggaggagcaatcggactgatgtttttgatgcttggatgtgcccttccaatatacaacaaatactggcccctctttgttctatttttttacatcctttcacctattccatactgcatagcaagaagattagtggatgatacagatgctatgagtaacgcttgtaaggaacttgccatctttcttacaacgggcattgtcgtgtcagcttttggactccctattgtatttgccagagcacatctgattgagtggggagcttgtgcacttgttctcacaggaaacacagtcatctttgcaactatactaggctttttcttggtctttggaagcaatgacgacttcagctggcagcagtggtgaaaagaaattactgaactattgtcaaatggacttcctgtcatttgttggccattcacgcacacaggagatggggcagttaatgctgaatggtatagcaagcctcttgggggtattttaggtgctcccttctcacttttattgtaagcatactattttcacagagacttgctgaaggattaaaaggattttctcttttggaaaagcttgactgatttcacacttatcta

SEQ ID NO: 147830 - DNA, 1389 bp, Homo sapiens
  Payload ID: 9250
  Gene Symbol: LEPROTL1
  Gene Name: leptin receptor overlapping transcript-like 1
  Uniprot ID: O95214
  ENST ID: ENST00000523116
  CDS Start-End: 34-543
tcgggtcgtggagccaggagcgacgtcaccgccatggcaggcatcaaagctttgattagtttgtcctttggaggagcaatcggactgatgtttttgatgcttggatgtgcccttccaatatacaacaaatactggcccctctttgttctatttttttacatcctttcacctattccatactgcatagcaagaagattagtggatgatacagatgctatgagtaacgcttgtaaggaacttgccatctttcttacaacgggcattgtcgtgtcagcttttggactccctattgtatttgccagagcacatctgatggggcgcctacccttcttcagcaagatgggaacagctgagtctgaaggaagagaaacactgacacagcagctgcctctcccagcagccgccatgagaagattgttacctgcaagcagagtgtccactcaacccgtgctgaggctggcagacagtgctgagtcacttctgggcaggcctgctctgtgggctctaggattcctgctttgccctccctctcaggcacaatgacaactactgctcagtgccagacactgcaccatgtaggcaacacgtggcagtgatgattagtcacaaaatcacatttatattcattctaatgaaactgccattgcaaaattataactgagacagtgaaagaagtctgacctaaccaactccatcttgcttctaacctccaagctgtccttgttcattcccgggactcattttgggaggaacttagttaatagcttacagtttaaaacaaagacaatcacagacctttcccaaaacaaacccccttcttgcctggaaactagactgcctttgtaggattaacaaattagccgaaagattagaaattatggtttaggagtcatgcagctggagatgacaagattctgacactcctccaattgctcctggggataacattactattctaaggcctaacatcagtgcttgagatgttttgtagaccctgcccttgatggatcagctggtactacccagaccgataaactggctcgtcttatcttgtggcccccacccaggagctgactcaatgcaagaagactgttctgactccctatgatttcatctccaacccaaccaagcggcactgtcaactcactggcctccccctacccaccaaattatccttaaaaactcagatccccaaatgctcagggaaactgattatgattaccccaaagcttggagtaataataaaactggcctgtctcccgcacagccagctctctgtgaattactctttctttactgcaattcccctgtttgtctaggcagtggagaaggtgaacccactgggcggttacactaacattcacaacaatcttgcaacacagtattgtt

SEQ ID NO: 147831 - DNA, 575 bp, Homo sapiens
  Payload ID: 9250
  Gene Symbol: LEPROTL1
  Gene Name: leptin receptor overlapping transcript-like 1
  ENST ID: ENST00000519466
  CDS Start-End: 1-410
ttttgatgcttggatgtgcccttccaatatacaacaaatactggcccctctttgttctatttttttacatcctttcacctattccatactgcatagcaagaagattagtggatgatacagatgctatgagtaacgcttgtaaggaacttgccatctttcttacaacgggcattgtcgtgtcagcttttggactccctattgtatttgccagagcacatctgatggagtcttgctctgtcgcccagcctggagtgcagtggcgtgatctcacctcactgcaagctctgcctcccgggttcacgccattctcctgcctcagcctcccgagtagctgggactacaggtgcccgccaccacgcccagctgatattttttgtgtttttagtggagacgaggtttcaccgtgttagccagaatggtctcgacctcctgacctcgtgatccgtccgcctcggcctcccaaagtgctgggattacaggcatgagccaccgcacccgtctggcttgctaatacttaactgtcagagttgagcatatcaactcccccagtgctgaacaacccaggcctatcctgt

SEQ ID NO: 147832 - DNA, 559 bp, Homo sapiens
  Payload ID: 9250
  Gene Symbol: LEPROTL1
  Gene Name: leptin receptor overlapping transcript-like 1
  ENST ID: ENST00000520739
  CDS Start-End: 27-347
gtggagccaggagcgacgtcaccgccatggcaggcatcaaagctttgattagtttgtcctttggaggagcaatcggactgatgtttttgatgcttggatgtgcccttccaatatacaacaaatactggcccctctttgttctatttttttacatcctttcacctattccatactgcatagcaagaagattagtggatgatacagatgctatgagtaacgcttgtaaggaacttgccatctttcttacaacgggcattgtcgtgtcagcttttggactccctattgtatttgccagagcacatctgtgtgaagattgctcctggagcagttgtatgtgtagaaagtgaaatcagaggagatgtaactatcggacctcggacagtgatccaccctaaagcaagaattattgcggaagccgggccaatagtgattggcgaagggaacctaatagaagaacaggcccttatcataaatgcttacccagataatatcactcctgacactgaagatccagaaccaaaacctatgatcattggcaccaataatgtgtttgaagttg

SEQ ID NO: 147833 - DNA, 580 bp, Homo sapiens
  Payload ID: 9250
  Gene Symbol: LEPROTL1
  Gene Name: leptin receptor overlapping transcript-like 1
  ENST ID: ENST00000520682
  CDS Start-End: 94-580
gttgtctggccgccgtagcgcgtcttgggtctcccggctgccgctgctgccgccgccgcctcgggtcgtggagccaggagcgacgtcaccgccatggcaggcatcaaagctttgattagtttgtcctttggaggagcaatcggactgatgtttttgatgcttggatgtgcccttccaatatacaacaaatactggcccctctttgttctatttttttacatcctttcacctattccatactgcatagcaagaagattagtggatgatacagatgctatgagtaacgcttgtaaggaacttgccatctttcttacaacgggcattgtcgtgtcagcttttggactccctattgtatttgccagagcacatctgcaaaagcagaatacagtacaccatgggaaagacactgttgtacgaattacagagcaaccagagagaggagagactcctgacctccacagccagcatgatgtaggcaatgatcaactgggtgtgggcccaggtgagggttctatagaacagcctcatcggccaggatctgataaactcattggcaaaggagtgaatcaggtagtcagct

SEQ ID NO: 147834 - DNA, 589 bp, Homo sapiens
  Payload ID: 9250
  Gene Symbol: LEPROTL1
  Gene Name: leptin receptor overlapping transcript-like 1
  ENST ID: ENST00000518001
  CDS Start-End: 211-423
acttccgggtgttgtctggccgccgtagcgcgtcttgggtctcccggctgccgctgctgccgccgccgcctcgggtcgtggagccaggagcgacgtcaccgccatggcaggcatcaaagcaaatactggcccctctttgttctatttttttacatcctttcacctattccatactgcatagcaagaagattagtggatgatacagatgctatgagtaacgcttgtaaggaacttgccatctttcttacaacgggcattgtcgtgtcagcttttggactccctattgtatttgccagagcacatctgattgagtggggagcttgtgcacttgttctcacaggaaacacagtcatctttgcaactatactaggctttttcttggtctttggaagcaatgacgacttcagctggcagcagtggtgaaaagaaattactgaactattgtcaaatggacttcctgtcatttgttggccattcacgcacacaggagatggggcagttaatgctgaatggtatagcaagcctcttgggggtattttaggtgctcccttctcacttttattgtaagcatactattttcacagagact

SEQ ID NO: 147835 - DNA, 4260 bp, Homo sapiens
  Payload ID: 9251
  Gene Symbol: LLGL1
  Gene Name: lethal giant larvae homolog 1 (Drosophila)
  Uniprot ID: Q15334
  ENST ID: ENST00000316843
  CDS Start-End: 97-3291
cgcctggcgccccgcccgcgccttaggacccgcggggccgcgcggcgcatcctgcgggcggcggcggcgggcgaggcgcctgcagccgggcgcaagatgatgaagtttcggttccggcggcagggcgccgacccgcagcgcgagaagctcaagcaggagcttttcgccttcaacaagactgtggagcatggcttccccaatcagcccagcgccctggccttcgacccggaacttcgcatcatggccatcggcaccaggtctggggctgtcaagatctatggtgcacctggcgtggagttcacaggcctgcaccgggatgcagccactgtcacacagatgcacttcttgaccggccagggccgcctcctgtccctgcttgatgacagcagtctgcatctctgggagattgtccaccataatggctgtgcccacctggaagaagcactcagtttccagctgcccagccggcccggctttgatggtgccagtgctccgctcagccttacccgagtcacagtggtcctgctggtggctgccagcgacatagcagccctgggcactgagggcagcagtgtcttcttcctggatgttaccaccctgaccctgctcgaggggcagacgcttgccccaggcgaggttctgcgcagcgtgccagacgactaccgctgtgggaaggcactgggccccgtggagtcactccagggacacctgcgggaccccacaaagattctcattggctacagccggggcctgctggtcatctggaaccaggcctcgcagtgtgtggaccacatcttcctggggaaccagcagctggagagcctatgctgggggcgtgatagcagcactgtggtcagctcacacagcgatggcagctatgctgtctggtctgtggatgccggcagcttcccaacgctgcagcccacggtagccaccacaccttacggcccctttccctgcaaggccattaacaagattctgtggcggaactgtgaatctgggggccactttatcatcttcagcggtggcatgccccgtgccagctatggtgaccgccactgtgtaagtgtgcttcgagccgagacattggtgacgctggacttcacttcccgcatcatcgacttcttcacagtgcacagcacacggcccgaggatgaatttgatgacccccaggccctggctgtgctgctggaagaggagctggtggtgctggacctgcagactcctggctggccagctgtgcctgccccatacctggccccgctgcactcctctgcaatcacttgctcggcccacgtggccagtgtccccgccaagctgtgggcccgcattgtgagcgctggcgagcagcagagcccccagcctgtctccagtgccttgagctggcccatcactgggggccgaaacctggcccaggagccgtcacagcgagggctgctgctgacgggccatgaggacggcaccgtgaggttctgggatgcctcgggtgtggcgctgcggccgctctataagctgagcacagctggcctcttccagacagactgtgagcacgctgacagcctggcccaggctgccgaggacgactggccacccttccgcaaggtgggctgcttcgatccctacagtgacgatccccggcttggcgtgcagaaggttgctctctgcaagtatacagcccagatggtggtggctggcactgcaggccaggtgctggtactggagcttagtgatgtgccggtggagcaggcggtcagcgtggccatcatagacctcctccaggaccgcgagggcttcacatggaagggccacgagcggctgagcccacgcacggggccgctgccctggcctgctggcttccagccccgtgtcctggtgcagtgcctgccgccagctgctgtaaccgctgtcacactccacaccgagtggagcctcgtggcttttggcaccagtcatggctttggcctcttcgactaccagcgcaagagccctgtgctggccaggtgcactcttcaccccaatgactccctggccatggagggtccgctctcccgggtgaagtctctcaagaagtcactgcgccagtctttccggcgcattcgcaagagtcgtgtctctggcaagaagcgggctgctaatgccagcagcaagttgcaggaagccaatgcacagctggctgagcaggcctgcccccacgacgtggagatgacgcccgtgcagcgccgcattgagccccgctctgccgatgactccttgtcgggtgtcgtgcgttgcctatactttgccgacacattccttcgagatggggcccaccacgggcccaccatgtgggctggcaccaactcaggctctgtgttcgcctatgcactggaggtgccggcagcagcagtgggtggtgagaagcggcctgagcaagcggtggaggccgtgctgggcaaggaggtgcagctgatgcaccgggcgcctgtggtggccattgccgtgttggacgggcgtggccgcccactgcccgagccctacgaggcctcacgggacctggcgcaggcacctgacatgcagggtggtcacgctgtgctcatcgcatctgaggagcagttcaaggtgttcacactgcccaaggtgagcgcgaagaccaagttcaagctgacggcccatgagggctgtcgtgtgcgcaaggtggcactggccacgtttgccagtgtggcctgcgaggactatgctgagacctgcctggcctgcctcaccaacctgggtgacgtccacgtcttctcggtgcctggcctgcggccccaggtgcactattcctgcatccggaaggaggacatcagcggcatcgcttcgtgcgtctttacgcgccatggccagggcttttacctgatatccccatcagaatttgaacgcttctccctaagtgcccggaacatcacagagccgctctgctctctggacattaactggccccgcgatgccacccaggccagttacaggatccgagagtcacccaagctgagccaggctaacgggaccccaagcatcctgctggccccacagagccttgatggaagccctgatccagcccacagcatgggacctgacaccccggagccacccgaggctgcactctcacccatgtccatcgactcagccaccagtgctgacaccacgctggacacgacaggggacgtcacagtggaagatgtgaaggatttcctgggctcctctgaggagtcagagaagaacctgaggaacctggcagaagacgaggcccacgcctgtgccatcctgatcaaatgaggaaggccagaactatcccgacctccacctgccctgctcggagctggagtgctggatccctggcacctgcctggccccttaacatagaaccacgcctgctaacctgtaggctccactgggacctgctgtcctgtcccgcctgaccctgggccctggagcagcaccagccccagggtgtgggcctgggacctgggccagaactgagccctcctgcaggcatttggctgccctgggggcccactgcctagggaagaggacaggtggggcccagcacctgtgccacctccccccctccacacaccatccttccccctcactttgcagagtatttttccttttttttttttttcttaaagacggagtcttgctctgtcgcccaggctggagtgcagtggccccatctctgctcactgcaagccccgccttctgggttcccgccattcttctgcctcagcctcccaagtagctgggactacaggcgcccaccaccacgcccagctaattttttctgtatttttagtagagatggggtttcaccatgttagccaggatggtctcgatctcctgacctcgtgatccacccacctcagcctcccaaagtgctgggattacaggcgtgagccaccatgcccagccctgcaaagagtatttttctagcgcctgggctggacagttgtttctaaaactaaactattttggtacctgcttctgggccagtccccagcctgtcatgagtgtgtgtgtgcgggcatggatgtgactgggagctctgctgggcacccacatctggggcctagtcaggtgtgtgtgtccggcggggggggggggcaggggggggggtcaagatgagtttccctgtagattgtaccttggggtttttttctgtcgttttgttaaaattagcgccattttaatattaaaaatactgatttttaatattgaaaataaaagcatttaatatctcttaaa

SEQ ID NO: 147836 - DNA, 3187 bp, Homo sapiens
  Payload ID: 9251
  Gene Symbol: LLGL1
  Gene Name: lethal giant larvae homolog 1 (Drosophila)
  ENST ID: ENST00000621229
  CDS Start-End: 7-3177
cgcaagatgatgaagtttcggttccggcggcagggcgccgacccgcagcgcgagaagctcaagcaggagcttttcgccttcaacaagactgtggagcatggcttccccaatcagcccagcgccctggccttcgacccggaacttcgcatcatggccatcggcaccaggtctggggctgtcaagatctatggtgcacctggcgtggagttcacaggcctgcaccgggatgcagccactgtcacacagatgcacttcttgaccggccagggccgcctcctgtccctgcttgatgacagcagtctgcatctctgggagattgtccaccataatggctgtgcccacctggaagaagcactcagtttccagctgcccagccggcccggctttgatggtgccagtgctccgctcagccttacccgagtcacagtggtcctgctggtggctgccagcgacatagcagccctgggcactgagggcagcagtgtcttcttcctggatgttaccaccctgaccctgctcgaggggcagacgcttgccccaggcgaggttctgcgcagcgtgccagacgactaccgctgtgggaaggcactgggccccgtggagtcactccagggacacctgcgggaccccacaaagattctcattggctacagccggggcctgctggtcatctggaaccaggcctcgcagtgtgtggaccacatcttcctggggaaccagcagctggagagcctatgctgggggcgtgatagcagcactgtggtcagctcacacagcgatggcagctatgctgtctggtctgtggatgccggcagcttcccaacgctgcagcccacggtagccaccacaccttacggcccctttccctgcaaggccattaacaagattctgtggcggaactgtgaatctgggggccactttatcatcttcagcggtggcatgccccgtgccagctatggtgaccgccactgtgtaagtgtgcttcgagccgagacattggtgacgctggacttcacttcccgcatcatcgacttcttcacagtgcacagcacacggcccgaggatgaatttgatgacccccaggccctggctgtgctgctggaagaggagctggtggtgctggacctgcagactcctggctggccagctgtgcctgccccatacctggccccgctgcactcctctgcaatcacttgctcggcccacgtggccagtgtccccgccaagctgtgggcccgcattgtgagcgctggcgagcagcagagcccccagcctgtctccagtgccttgagctggcccatcactgggggccgaaacctggcccaggagccgtcacagcgagggctgctgctgacgggccatgaggacggcaccgtgaggttctgggatgcctcgggtgtggcgctgcggccgctctataagctgagcacagctggcctcttccagacagactgtgagcacgctgacagcctggcccaggctgccgaggacgactggccacccttccgcaaggtgggctgcttcgatccctacagtgacgatccccggcttggcgtgcagaaggttgctctctgcaagtatacagcccagatggtggtggctggcactgcaggccaggtgctggtactggagcttagtgatgtgccggtggagcaggcggtcagcgtggccatcatagacctcctccaggaccgcgagggcttcacatggaagggccacgagcggctgagcccacgcacggggccgctgccctggcctgctggcttccagccccgtgtcctggtgcagtgcctgccgccagctgctgtaaccgctgtcacactccacaccgagtggagcctcgtggcttttggcaccagtcatggctttggcctactggaccctgtcttccccaggtgcactcttcaccccaatgactccctggccatggagggtccgctctcccgggtgaagtctctcaagaagtcactgcgccagtctttccggcgcattcgcaagagtcgtgtctctggcaagaagcgggctgctaatgccagcagcaagttgcaggaagccaatgcacagctggctgagcaggcctgcccccacgacgtggagatgacgcccgtgcagcgccgcattgagccccgctctgccgatgactccttgtcgggtgtcgtgcgttgcctatactttgccgacacattccttcgagatggggcccaccacgggcccaccatgtgggctggcaccaactcaggctctgtgttcgcctatgcactggaggtgccggcagcagcagtgggtggtgagaagcggcctgagcaagcggtggaggccgtgctgggcaaggaggtgcagctgatgcaccgggcgcctgtggtggccattgccgtgttggacgggcgtggccgcccactgcccgagccctacgaggcctcacgggacctggcgcaggcacctgacatgcagggtggtcacgctgtgctcatcgcatctgaggagcagttcaaggtgttcacactgcccaaggtgagcgcgaagaccaagttcaagctgacggcccatgagggctgtcgtgtgcgcaaggtggcactggccacgtttgccagtgtggcctgcgaggactatgctgagacctgcctggcctgcctcaccaacctgggtgacgtccacgtcttctcggtgcctggcctgcggccccaggtgcactattcctgcatccggaaggaggacatcagcggcatcgcttcgtgcgtctttacgcgccatggccagggcttttacctgatatccccatcagaatttgaacgcttctccctaagtgcccggaacatcacagagccgctctgctctctggacattaactggccccgcgatgccacccaggccagttacaggatccgagagtcacccaagctgagccaggctaacgggaccccaagcatcctgctggccccacagagccttgatggaagccctgatccagcccacagcatgggacctgacaccccggagccacccgaggctgcactctcacccatgtccatcgactcagccaccagtgctgacaccacgctggacacgacaggggacgtcacagtggaagatgtgaaggatttcctgggctcctctgaggagtcagagaagaacctgaggaacctggcagaagacgaggcccacgcctgtgccatctgatcaaatgagg

SEQ ID NO: 147837 - DNA, 3480 bp, Homo sapiens
  Payload ID: 9252
  Gene Symbol: LLGL2
  Gene Name: lethal giant larvae homolog 2 (Drosophila)
  Uniprot ID: Q6P1M3
  ENST ID: ENST00000167462
  CDS Start-End: 131-3178
cgcccagcagcccgtgggcaggcgcggcggagcgagcggggccggcggcgggcgccgagggacgccgaggcctcgggcgggggctggcccggggttccaggtctccagtgggggctgcagactaagcaaaatgaggcggttcctgaggccagggcatgaccctgtgcgggagaggctcaagcgggacctgttccagtttaacaagacggtggagcatggcttcccgcaccagcccagcgccctcggctacagcccgtccctgcgcatcctggccatcggcacccgttctggagccatcaagctctacggagccccaggcgtggagttcatggggctgcaccaggagaacaacgctgtgacgcagatccacctcctgcccggccagtgccagctggtcaccctgctggatgacaacagcctgcacctttggagcctgaaggtcaagggcggggcatcggagctgcaggaggatgagagcttcacactgcgtggacccccaggggctgcccccagtgccacacagatcaccgtggtcctgccacattcctcctgcgagctgctctacctgggcaccgagagtggcaacgtgtttgtggtgcagctgccagcttttcgtgcgctggaggaccggaccatcagctcggacgcggtgctgcagcggttgccagaggaggcccgccaccggcgtgtgttcgagatggtggaggcactgcaggagcaccctcgagaccccaaccagatcctgatcggctacagccgaggcctcgttgtcatctgggacctacagggcagccgcgtgctctaccacttcctcagcagccagcaactggagaacatctggtggcagcgggacggccgcctgctcgtcagctgtcactctgacggcagctactgccagtggcccgtgtccagcgaagcccagcaaccagagcccctccgcagcctcgtgccttacggtccctttccttgcaaagcgattaccagaatcctctggctgaccactaggcaggggttgcccttcaccatcttccagggtggcatgccacgggccagctacggggaccgccactgcatctcagtgatccacgatggccagcagacggccttcgacttcacctcccgtgtcatcggcttcactgtcctcacagaggcagaccctgcagccacctttgacgacccctatgccctggtggtgctggctgaggaggagctggtggtgattgacctgcagacagcaggctggccaccggtccagctgccctacctggcttctctgcactgttccgccatcacctgctctcaccacgtctccaacatcccgctgaagctgtgggagcggatcattgccgccggcagccggcagaacgcacacttctccaccatggagtggccaattgatggtggcaccagcctgaccccagccccaccccagagggacctgctgctcacagggcacgaggacggcacggtgcggttctgggatgcctcgggtgtctgcctgcggctgctctacaaactcagcactgtgcgcgtgttcctcaccgacacggaccccaacgagaacttcagtgcccagggcgaggacgagtggcccccactccgcaaggtgggctcctttgacccctacagtgatgacccccggctgggcatccagaagatcttcctctgcaagtacagcggctacctggctgtggcaggcacggcagggcaggtgctggtactggaactgaatgacgaggcagcggagcaggctgtggagcaggtggaggccgacctgctgcaggaccaagagggctaccgctggaaggggcacgagcgcctggcagcccgctcagggcccgtgcgctttgagcctggctttcagcccttcgtgttggtgcagtgtcagcccccggctgtggtcacctccttggccctgcactctgagtggcggctcgtggccttcggcaccagccatggctttggcctctttgaccaccagcagcggcggcaggtctttgttaagtgcacactgcaccccagtgaccagctggccttggagggcccactctcccgcgtcaagtccctcaagaagtccttgcgtcagtcattccgccggatgcgtcggagccgggtgtccagccggaagcggcacccggctggccccccaggagaggcacaggaggggagtgccaaggctgagcggccaggcctccagaacatggagctggcgcctgtgcagcgcaagatcgaggctcgctcggcagaggactccttcacaggcttcgtccggaccctgtactttgctgacacctacctgaaggacagctcccggcactgcccctcgctgtgggctggcaccaatgggggcaccatctatgccttctccctgcgtgtgcctcccgccgagcggagaatggatgagcctgtgcgggcagagcaggccaaggagatccagctgatgcaccgggcgccggtggtgggcatcctggtgctcgacggacacagcgtaccccttcccgagcccctcgaagtggcccatgatctgtcgaagagccctgacatgcagggaagccaccagctgctcgtcgtatcagaggagcagttcaaggtgttcacgctgcccaaggtgagtgccaagctgaagttgaagctgacggccctggagggctcaagagtgcggcgggtcagcgtggcccacttcggcagtcgtcgagccgaggactacggggagcaccacctggcagtccttaccaacctgggcgacatccaggtggtctcgctgcccctgctcaagccccaggtgcgctacagctgcatccgccgggaggacgtcagtggcatcgcctcctgcgtcttcaccaaatatggccaaggcttctacctgatctcaccctcggagtttgagcgcttctctctctccaccaagtggctggtggagccccggtgtctggtggattcagcagaaaccaagaaccaccgccctggtaacggtgcgggccccaagaaggccccgagccgagccaggaactcagggactcagagtgatggcgaggagaagcagcccggcctggtgatggagcgcgctctgctcagtgatgagagagcggcaactggcgttcacatcgagccgccgtggggtgcagcctcagcaatggcggagcagagtgagtggctgagcgtccaggctgcgcgatgagcacacactactactgatggcctttcgggggtccctgccccaaccggagaggccggtgcacagggccccgccaggggctgggggcatcccggcttccacaatgcagctgctctgggcctcgggagaggagagaccccagtcccctgggctgcccttcccgggcctcgtctgtctgggtcctttggtcaatgttgcacagtttttattgctcccatccctttttgtagtgggctgggttttaagttataaatgttaactgcctctgggtgaaaaagtttttaataaacacctattacctcttg

SEQ ID NO: 147838 - DNA, 1374 bp, Homo sapiens
  Payload ID: 9252
  Gene Symbol: LLGL2
  Gene Name: lethal giant larvae homolog 2 (Drosophila)
  Uniprot ID: Q6P1M3
  ENST ID: ENST00000375227
  CDS Start-End: 125-1195
gcagcccgtgggcaggcgcggcggagcgagcggggccggcggcgggcgccgagggacgccgaggcctcgggcgggggctggcccggggttccaggtctccagtgggggctgcagactaagcaaaatgaggcggttcctgaggccagggcatgaccctgtgcgggagaggctcaagcgggacctgttccagtttaacaagacggtggagcatggcttcccgcaccagcccagcgccctcggctacagcccgtccctgcgcatcctggccatcggcacccgttctggagccatcaagctctacggagccccaggcgtggagttcatggggctgcaccaggagaacaacgctgtgacgcagatccacctcctgcccggccagtgccagctggtcaccctgctggatgacaacagcctgcacctttggagcctgaaggtcaagggcggggcatcggagctgcaggaggatgagagcttcacactgcgtggacccccaggggctgcccccagtgccacacagatcaccgtggtcctgccacattcctcctgcgagctgctctacctgggcaccgagagtggcaacgtgtttgtggtgcagctgccagcttttcgtgcgctggaggaccggaccatcagctcggacgcggtgctgcagcggttgccagaggaggcccgccaccggcgtgtgttcgagatggtggaggcactgcaggagcaccctcgagaccccaaccagatcctgatcggctacagccgaggcctcgttgtcatctgggacctacagggcagccgcgtgctctaccacttcctcagcagccagcaactggagaacatctggtggcagcgggacggccgcctgctcgtcagctgtcactctgacggcagctactgccagtggcccgtgtccagcgaagcccagcaaccagagcccctccgcagcctcgtgccttacggtccctttccttgcaaagcgattaccagaatcctctggctgaccactaggcaggggttgcccttcaccatcttccagggtggcatgccacgggccagctacggggaccgccactgcatctcagtgatccacgatggccagcagacggccttcgacttcacctcccgtgtcatcggcttcactgtcctcacagaggcagaccctgcagccagtaggagagcttcgggagtgggtgcccagggttaggtgtgggaggcatggggcaggaccatcagtaaagacagggccaggtgcagtggctcctgcctgtaaccccagtgctgtgggaggccaaggtggtaggatcgcttgaacccaggagttcaagtccagcctggacaacgtagggagacccttgtctctacaaaaaataaaaaaattagcca

SEQ ID NO: 147839 - DNA, 3509 bp, Homo sapiens
  Payload ID: 9252
  Gene Symbol: LLGL2
  Gene Name: lethal giant larvae homolog 2 (Drosophila)
  Uniprot ID: Q6P1M3
  ENST ID: ENST00000392550
  CDS Start-End: 118-3180
gtgggcaggcgcggcggagcgagcggggccggcggcgggcgccgagggacgccgaggcctcgggcgggggctggcccggggttccaggtctccagtgggggctgcagactaagcaaaatgaggcggttcctgaggccagggcatgaccctgtgcgggagaggctcaagcgggacctgttccagtttaacaagacggtggagcatggcttcccgcaccagcccagcgccctcggctacagcccgtccctgcgcatcctggccatcggcacccgttctggagccatcaagctctacggagccccaggcgtggagttcatggggctgcaccaggagaacaacgctgtgacgcagatccacctcctgcccggccagtgccagctggtcaccctgctggatgacaacagcctgcacctttggagcctgaaggtcaagggcggggcatcggagctgcaggaggatgagagcttcacactgcgtggacccccaggggctgcccccagtgccacacagatcaccgtggtcctgccacattcctcctgcgagctgctctacctgggcaccgagagtggcaacgtgtttgtggtgcagctgccagcttttcgtgcgctggaggaccggaccatcagctcggacgcggtgctgcagcggttgccagaggaggcccgccaccggcgtgtgttcgagatggtggaggcactgcaggagcaccctcgagaccccaaccagatcctgatcggctacagccgaggcctcgttgtcatctgggacctacagggcagccgcgtgctctaccacttcctcagcagccagcaactggagaacatctggtggcagcgggacggccgcctgctcgtcagctgtcactctgacggcagctactgccagtggcccgtgtccagcgaagcccagcaaccagagcccctccgcagcctcgtgccttacggtccctttccttgcaaagcgattaccagaatcctctggctgaccactaggcaggggttgcccttcaccatcttccagggtggcatgccacgggccagctacggggaccgccactgcatctcagtgatccacgatggccagcagacggccttcgacttcacctcccgtgtcatcggcttcactgtcctcacagaggcagaccctgcagccacctttgacgacccctatgccctggtggtgctggctgaggaggagctggtggtgattgacctgcagacagcaggctggccaccggtccagctgccctacctggcttctctgcactgttccgccatcacctgctctcaccacgtctccaacatcccgctgaagctgtgggagcggatcattgccgccggcagccggcagaacgcacacttctccaccatggagtggccaattgatggtggcaccagcctgaccccagccccaccccagagggacctgctgctcacagggcacgaggacggcacggtgcggttctgggatgcctcgggtgtctgcctgcggctgctctacaaactcagcactgtgcgcgtgttcctcaccgacacggaccccaacgagaacttcagtgcccagggcgaggacgagtggcccccactccgcaaggtgggctcctttgacccctacagtgatgacccccggctgggcatccagaagatcttcctctgcaagtacagcggctacctggctgtggcaggcacggcagggcaggtgctggtactggaactgaatgacgaggcagcggagcaggctgtggagcaggtggaggccgacctgctgcaggaccaagagggctaccgctggaaggggcacgagcgcctggcagcccgctcagggcccgtgcgctttgagcctggctttcagcccttcgtgttggtgcagtgtcagcccccggctgtggtcacctccttggccctgcactctgagtggcggctcgtggccttcggcaccagccatggctttggcctctttgaccaccagcagcggcggcaggtctttgttaagtgcacactgcaccccagtgaccagctggccttggagggcccactctcccgcgtcaagtccctcaagaagtccttgcgtcagtcattccgccggatgcgtcggagccgggtgtccagccggaagcggcacccggctggccccccaggagaggcacaggaggggagtgccaaggctgagcggccaggcctccagaacatggagctggcgcctgtgcagcgcaagatcgaggctcgctcggcagaggactccttcacaggcttcgtccggaccctgtactttgctgacacctacctgaaggacagctcccggcactgcccctcgctgtgggctggcaccaatgggggcaccatctatgccttctccctgcgtgtgcctcccgccgagcggagaatggatgagcctgtgcgggcagagcaggccaaggagatccagctgatgcaccgggcgccggtggtgggcatcctggtgctcgacggacacagcgtaccccttcccgagcccctcgaagtggcccatgatctgtcgaagagccctgacatgcagggaagccaccagctgctcgtcgtatcagaggagcagttcaaggtgttcacgctgcccaaggtgagtgccaagctgaagttgaagctgacggccctggagggctcaagagtgcggcgggtcagcgtggcccacttcggcagtcgtcgagccgaggactacggggagcaccacctggcagtccttaccaacctgggcgacatccaggtggtctcgctgcccctgctcaagccccaggtgcgctacagctgcatccgccgggaggacgtcagtggcatcgcctcctgcgtcttcaccaaatatggccaaggcttctacctgatctcaccctcggagtttgagcgcttctctctctccaccaagtggctggtggagccccggtgtctggtggattcagcagaaaccaagaaccaccgccctggtaacggtgcgggccccaagaaggccccgagccgagccaggaactcagggactcagagtgatggcgaggagaagcagcccggcctggtgatggagcgcgctctgctcagtgatgagagagtcctgaaggaaatccagagcacactggagggagaccgcgggagcggcaactggcgttcacatcgagccgccgtggggtgcagcctcagcaatggcggagcagagtgagtggctgagcgtccaggctgcgcgatgagcacacactactactgatggcctttcgggggtccctgccccaaccggagaggccggtgcacagggccccgccaggggctgggggcatcccggcttccacaatgcagctgctctgggcctcgggagaggagagaccccagtcccctgggctgcccttcccgggcctcgtctgtctgggtcctttggtcaatgttgcacagtttttattgctcccatccctttttgtagtgggctgggttttaagttataaatgttaactgcctctgggtgaaaaagtttttaataaacacctattacctctt

SEQ ID NO: 147840 - DNA, 204 bp, Homo sapiens
  Payload ID: 9252
  Gene Symbol: LLGL2
  Gene Name: lethal giant larvae homolog 2 (Drosophila)
  ENST ID: ENST00000580925
  CDS Start-End: 86-204
agcttttcctacccccattataaggccacaggtggtgacagccttcagccctgaggtctccagtgggggctgcagactaagcaaaatgaggcggttcctgaggccagggcatgaccctgtgcgggagaggctcaagcgggacctgttccagtttaacaagacggtggagcatggcttcccgcaccagcccagcgccctcggcta

SEQ ID NO: 147841 - DNA, 409 bp, Homo sapiens
  Payload ID: 9252
  Gene Symbol: LLGL2
  Gene Name: lethal giant larvae homolog 2 (Drosophila)
  ENST ID: ENST00000583514
  CDS Start-End: 1-189
ctggtggattcagcagaaaccaagaaccaccgccctggtaacggtgcgggccccaagaaggccccgagccgagccaggaactcagggactcagagtgatggcgaggccctgggccctgggcttccacatcctgacctcagtaaggagagagagagccaggccgaggagggcccaggcggggcgccctgacccggcctctaccttccagagaagcagcccggcctggtgatggagcgcgctctgctcagtgatgagagagtcctgaaggaaatccagagcacactggagggagaccgcgggagcggcaactggcgttcacatcgagccgccgtggggtgcagcctcagcaatggcggagcagagtgagtggctgagcgtccaggctgcgcgatgagcacacactactact

SEQ ID NO: 147842 - DNA, 680 bp, Homo sapiens
  Payload ID: 9252
  Gene Symbol: LLGL2
  Gene Name: lethal giant larvae homolog 2 (Drosophila)
  ENST ID: ENST00000578719
  CDS Start-End: 1-317
agagggacctgctgctcacagggtgggttctgcccacaggcacgaggacggcacggtgcggttctgggatgcctcgggtgtctgcctgcggctgctctacaaactcagcactgtgcgcgtgttcctcaccgacacggaccccaacgagaacttcagtgcccagggcgaggacgagtggcccccactccgcaaggtgggctcctttgacccctacagtgatgacccccggctgggcatccagaagatcttcctctgcaagtacagcggctacctggctgtggcaggcacggcagggcaggtgctggtactggaactgaatgacgaggcagcggagcaggctgtggagcaggtggaggccgacctgctgcaggaccaagagggctaccgctggaaggggcacgagcgcctggcagcccgctcagggcccgtgcgctttgagcctggctttcagcccttcgtgttggtgcagtgtcagcccccggctgtggtcacctccttggccctgcactctgagtggcggctcgtggccttcggcaccagccatggctttggcctctttgaccaccagcagcggcggcaggtctttgttaagtgcacactgcaccccagtgaccagctggccttggagggcccactctcccgcgtcaagtccctcaagaagtccttgcgtcagtcattcc

SEQ ID NO: 147843 - DNA, 585 bp, Homo sapiens
  Payload ID: 9252
  Gene Symbol: LLGL2
  Gene Name: lethal giant larvae homolog 2 (Drosophila)
  ENST ID: ENST00000581713
  CDS Start-End: 167-585
actgtgaagctggcctggccccggggtggcagcctactggacttggagagagaggccctgctccacctgtttgggccgggcctaatcgatacctgagtgccaggacagacccctgcagctccttctgtttctccaggtctccagtgggggctgcagactaagcaaaatgaggcggttcctgaggccagggcatgaccctgtgcgggagaggctcaagcgggacctgttccagtttaacaagacggtggagcatggcttcccgcaccagcccagcgccctcggctacagcccgtccctgcgcatcctggccatcggcacccgttctggagccatcaagctctacggagccccaggcgtggagttcatggggctgcaccaggagaacaacgctgtgacgcagatccacctcctgcccggccagtgccagctggtcaccctgctggatgacaacagcctgcacctttggagcctgaaggtcaagggcggggcatcggagctgcaggaggatgagagcttcacactgcgtggacccccaggggctgcccccagtgccacacagatcaccgtggtcctgccacattcctc

SEQ ID NO: 147844 - DNA, 2367 bp, Homo sapiens
  Payload ID: 9252
  Gene Symbol: LLGL2
  Gene Name: lethal giant larvae homolog 2 (Drosophila)
  ENST ID: ENST00000578638
  CDS Start-End: 1-259
taccagaatcctctggctgaccactaggcaggggttgcccttcaccatcttccagggtggcatgccacgggccagctacggggaccgccactgcatctcagtgatccacgatggccagcagacggccttcgacttcacctcccgtgtcatcggcttcactgtcctcacagaggcagaccctgcagccactgtgggagcggatcattgccgccggcagccggcagaacgcacacttctccaccatggagtggccaattgatggtggcaccagcctgaccccagccccaccccagagggacctgctgctcacagggcacgaggacggcacggtgcggttctgggatgcctcgggtgtctgcctgcggctgctctacaaactcagcactgtgcgcgtgttcctcaccgacacggaccccaacgagaacttcagtgcccagggcgaggacgagtggcccccactccgcaaggtgggctcctttgacccctacagtgatgacccccggctgggcatccagaagatcttcctctgcaagtacagcggctacctggctgtggcaggcacggcagggcaggtgctggtactggaactgaatgacgaggcagcggagcaggctgtggagcaggtggaggccgacctgctgcaggaccaagagggctaccgctggaaggggcacgagcgcctggcagcccgctcagggcccgtgcgctttgagcctggctttcagcccttcgtgttggtgcagtgtcagcccccggctgtggtcacctccttggccctgcactctgagtggcggctcgtggccttcggcaccagccatggctttggcctctttgaccaccagcagcggcggcaggtctttgttaagtgcacactgcaccccagtgaccagctggccttggagggcccactctcccgcgtcaagtccctcaagaagtccttgcgtcagtcattccgccggatgcgtcggagccgggtgtccagccggaagcggcacccggctggccccccaggagaggcacaggaggggagtgccaaggctgagcggccaggcctccagaacatggagctggcgcctgtgcagcgcaagatcgaggctcgctcggcagaggactccttcacaggcttcgtccggaccctgtactttgctgacacctacctgaaggacagctcccggcactgcccctcgctgtgggctggcaccaatgggggcaccatctatgccttctccctgcgtgtgcctcccgccgagcggagaatggatgagcctgtgcgggcagagcaggccaaggagatccagctgatgcaccgggcgccggtggtgggcatcctggtgctcgacggacacagcgtaccccttcccgagcccctcgaagtggcccatgatctgtcgaagagccctgacatgcagggaagccaccagctgctcgtcgtatcagaggagcagttcaaggtgttcacgctgcccaaggtgagtgccaagctgaagttgaagctgacggccctggagggctcaagagtgcggcgggtcagcgtggcccacttcggcagtcgtcgagccgaggactacggggagcaccacctggcagtccttaccaacctgggcgacatccaggtggtctcgctgcccctgctcaagccccaggtgcgctacagctgcatccgccgggaggacgtcagtggcatcgcctcctgcgtcttcaccaaatatggccaaggcttctacctgatctcaccctcggagtttgagcgcttctctctctccaccaagtggctggtggagccccggtgtctggtggattcagcagaaaccaagaaccaccgccctggtaacggtgcgggccccaagaaggccccgagccgagccaggaactcagggactcagagtgatggcgaggagaagcagcccggcctggtgatggagcgcgctctgctcagtgatgagagagtcctgaaggaaatccagagcacactggagggagaccgcgggagcggcaactggcgttcacatcgagccgccgtggggtgcagcctcagcaatggcggagagtgagtggctgagcgtccaggctgcgcgatgagcacacactactactgatggcctttcgggggtccctgccccaaccggagaggccggtgcacagggccccgccaggggctgggggcatcccggcttccacaatgcagctgctctgggcctcgggagaggagagaccccagtcccctgggctgcccttcccgggcctcgtctgtctgggtcctttggtcaatgttgcacagtttttattgctcccatccctttttgtagtgggctgggttttaagttataaatgttaactgcctctgggtgaaaaagtttttaataaaca

SEQ ID NO: 147845 - DNA, 483 bp, Homo sapiens
  Payload ID: 9252
  Gene Symbol: LLGL2
  Gene Name: lethal giant larvae homolog 2 (Drosophila)
  ENST ID: ENST00000579392
  CDS Start-End: 174-483
gccgaggcctcgggcgggggctggcccggggttccagataacgagtgaggactcgctgtgtgcactcggatacagcagtgaataaaaggacaaaaggtcttgaatgggaaaaagaaagctgctgcttgtgggggattccacaggtctccagtgggggctgcagactaagcaaaatgaggcggttcctgaggccagggcatgaccctgtgcgggagaggctcaagcgggacctgttccagtttaacaagacggtggagcatggcttcccgcaccagcccagcgccctcggctacagcccgtccctgcgcatcctggccatcggcacccgttctggagccatcaagctctacggagccccaggcgtggagttcatggggctgcaccaggagaacaacgctgtgacgcagatccacctcctgcccggccagtgccagctggtcaccctgctggatgacaacagcctgcacctttggagcctgaagg

SEQ ID NO: 147846 - DNA, 3192 bp, Homo sapiens
  Payload ID: 9252
  Gene Symbol: LLGL2
  Gene Name: lethal giant larvae homolog 2 (Drosophila)
  ENST ID: ENST00000577200
  CDS Start-End: 105-3164
ggctcactgcaacctctgcctcccgggttcaagcaattctcctgcctcggcctcctgagtagctgggattacaggtctccagtgggggctgcagactaagcaaaatgaggcggttcctgaggccagggcatgaccctgtgcgggagaggctcaagcgggacctgttccagtttaacaagacggtggagcatggcttcccgcaccagcccagcgccctcggctacagcccgtccctgcgcatcctggccatcggcacccgttctggagccatcaagctctacggagccccaggcgtggagttcatggggctgcaccaggagaacaacgctgtgacgcagatccacctcctgcccggccagtgccagctggtcaccctgctggatgacaacagcctgcacctttggagcctgaaggtcaagggcggggcatcggagctgcaggaggatgagagcttcacactgcgtggacccccaggggctgcccccagtgccacacagatcaccgtggtcctgccacattcctcctgcgagctgctctacctgggcaccgagagtggcaacgtgtttgtggtgcagctgccagcttttcgtgcgctggaggaccggaccatcagctcggacgcggtgctgcagcggttgccagaggaggcccgccaccggcgtgtgttcgagatggtggaggcactgcaggagcaccctcgagaccccaaccagatcctgatcggctacagccgaggcctcgttgtcatctgggacctacagggcagccgcgtgctctaccacttcctcagcagccagcaactggagaacatctggtggcagcgggacggccgcctgctcgtcagctgtcactctgacggcagctactgccagtggcccgtgtccagcgaagcccagcaaccagagcccctccgcagcctcgtgccttacggtccctttccttgcaaagcgattaccagaatcctctggctgaccactaggcaggggttgcccttcaccatcttccagggtggcatgccacgggccagctacggggaccgccactgcatctcagtgatccacgatggccagcagacggccttcgacttcacctcccgtgtcatcggcttcactgtcctcacagaggcagaccctgcagccacctttgacgacccctatgccctggtggtgctggctgaggaggagctggtggtgattgacctgcagacagcaggctggccaccggtccagctgccctacctggcttctctgcactgttccgccatcacctgctctcaccacgtctccaacatcccgctgaagctgtgggagcggatcattgccgccggcagccggcagaacgcacacttctccaccatggagtggccaattgatggtggcaccagcctgaccccagccccaccccagagggacctgctgctcacagggcacgaggacggcacggtgcggttctgggatgcctcgggtgtctgcctgcggctgctctacaaactcagcactgtgcgcgtgttcctcaccgacacggaccccaacgagaacttcagtgcccagggcgaggacgagtggcccccactccgcaaggtgggctcctttgacccctacagtgatgacccccggctgggcatccagaagatcttcctctgcaagtacagcggctacctggctgtggcaggcacggcagggcaggtgctggtactggaactgaatgacgaggcagcggagcaggctgtggagcaggtggaggccgacctgctgcaggaccaagagggctaccgctggaaggggcacgagcgcctggcagcccgctcagggcccgtgcgctttgagcctggctttcagcccttcgtgttggtgcagtgtcagcccccggctgtggtcacctccttggccctgcactctgagtggcggctcgtggccttcggcaccagccatggctttggcctctttgaccaccagcagcggcggcaggtctttgttaagtgcacactgcaccccagtgaccagctggccttggagggcccactctcccgcgtcaagtccctcaagaagtccttgcgtcagtcattccgccggatgcgtcggagccgggtgtccagccggaagcggcacccggctggccccccaggagaggcacaggaggggagtgccaaggctgagcggccaggcctccagaacatggagctggcgcctgtgcagcgcaagatcgaggctcgctcggcagaggactccttcacaggcttcgtccggaccctgtactttgctgacacctacctgaaggacagctcccggcactgcccctcgctgtgggctggcaccaatgggggcaccatctatgccttctccctgcgtgtgcctcccgccgagcggagaatggatgagcctgtgcgggcagagcaggccaaggagatccagctgatgcaccgggcgccggtggtgggcatcctggtgctcgacggacacagcgtaccccttcccgagcccctcgaagtggcccatgatctgtcgaagagccctgacatgcagggaagccaccagctgctcgtcgtatcagaggagcagttcaaggtgttcacgctgcccaaggtgagtgccaagctgaagttgaagctgacggccctggagggctcaagagtgcggcgggtcagcgtggcccacttcggcagtcgtcgagccgaggactacggggagcaccacctggcagtccttaccaacctgggcgacatccaggtggtctcgctgcccctgctcaagccccaggtgcgctacagctgcatccgccgggaggacgtcagtggcatcgcctcctgcgtcttcaccaaatatggccaaggcttctacctgatctcaccctcggagtttgagcgcttctctctctccaccaagtggctggtggagccccggtgtctggtggattcagcagaaaccaagaaccaccgccctggtaacggtgcgggccccaagaaggccccgagccgagccaggaactcagggactcagagtgatggcgaggagaagcagcccggcctggtgatggagcgcgctctgctcagtgatgagagagtcctgaaggaaatccagagcacactggagggagaccgcgggagcggcaactggcgttcacatcgagccgccgtggggtgcagcctcagcaatggcggagagtgagtggctgagcgtccaggctgcgcgatga

SEQ ID NO: 147847 - DNA, 784 bp, Homo sapiens
  Payload ID: 9252
  Gene Symbol: LLGL2
  Gene Name: lethal giant larvae homolog 2 (Drosophila)
  ENST ID: ENST00000578536
  CDS Start-End: 469-784
cctgattattctccactagggcccgtgggaaagagaacctttctgagcacagcccatgagcgcacagggaagctggactggggctagccagagagaggggaggggaccggcagagaccccaggcacggtggcatgggccagcaccccctgaccgagtgctctgtgccacccgtgcccacttgagtttctcatggctgtggctggttggagaggctgaggccgagagtccctggacagccttccccgaggtcagaaggaggaagcatctgcccggtgccctggcctggagtcactgcaggcctctcccctgccccgacttgggctctgatctgggaaggatggccttggtgtttctaccttccacaagactttggaggaagaggcttgcgaagtttccctttctgcttagctggagtttcatggtttctcagaaaacaggtctccagtgggggctgcagactaagcaaaatgaggcggttcctgaggccagggcatgaccctgtgcgggagaggctcaagcgggacctgttccagtttaacaagacggtggagcatggcttcccgcaccagcccagcgccctcggctacagcccgtccctgcgcatcctggccatcggcacccgttctggagccatcaagctctacggagccccaggcgtggagttcatggggctgcaccaggagaacaacgctgtgacgcagatccacctcctgcccggccagtgccagctggtcaccctgctggatgacaacagcctgcacctttggagcctgaaggtcaagg

SEQ ID NO: 147848 - DNA, 566 bp, Homo sapiens
  Payload ID: 9252
  Gene Symbol: LLGL2
  Gene Name: lethal giant larvae homolog 2 (Drosophila)
  ENST ID: ENST00000583658
  CDS Start-End: 99-566
atgaccgtgaagtctctgacctgggtaggtggtggtgccaggccttgggagggggagcccaggccaggagtggcgaagaacagatttgaggaaaagtaatgtattttgatcgttttgatttggacacaatcgcaacaacagtgctctccatttttggagaggcagcttgcccagagacggtggagcatggcttcccgcaccagcccagcgccctcggctacagcccgtccctgcgcatcctggccatcggcacccgttctggagccatcaagctctacggagccccaggcgtggagttcatggggctgcaccaggagaacaacgctgtgacgcagatccacctcctgcccggccagtgccagctggtcaccctgctggatgacaacagcctgcacctttggagcctgaaggtcaagggcggggcatcggagctgcaggaggatgagagcttcacactgcgtggacccccaggggctgcccccagtgccacacagatcaccgtggtcctgccacattcctcctgcgagctgctctacctgggcaccgagagtggcaacgtgtttgtg

SEQ ID NO: 147849 - DNA, 577 bp, Homo sapiens
  Payload ID: 9252
  Gene Symbol: LLGL2
  Gene Name: lethal giant larvae homolog 2 (Drosophila)
  ENST ID: ENST00000580578
  CDS Start-End: 126-577
ctttccgctcccgcctctcgtcgctccaacctcctccctcgcttgtgctaaaaattccacccgctgttgcagaccctccggccgacacggaggaggtctccagtgggggctgcagactaagcaaaatgaggcggttcctgaggccagggcatgaccctgtgcgggagaggctcaagcgggacctgttccagtttaacaagacggtggagcatggcttcccgcaccagcccagcgccctcggctacagcccgtccctgcgcatcctggccatcggcacccgttctggagccatcaagctctacggagccccaggcgtggagttcatggggctgcaccaggagaacaacgctgtgacgcagatccacctcctgcccggccagtgccagctggtcaccctgctggatgacaacagcctgcacctttggagcctgaaggtcaagggcggggcatcggagctgcaggaggatgagagcttcacactgcgtggacccccaggggctgcccccagtgccacacagatcaccgtggtcctgccacattcctcctgcgagctgctctacctgggcaccgagagtgg

SEQ ID NO: 147850 - DNA, 1393 bp, Homo sapiens
  Payload ID: 9252
  Gene Symbol: LLGL2
  Gene Name: lethal giant larvae homolog 2 (Drosophila)
  Uniprot ID: Q6P1M3
  ENST ID: ENST00000578363
  CDS Start-End: 142-1212
gccgagggacgccgaggcctcgggcgggggctggcccggggttccagatgttggatgtgatccttaaacaaagcaaagatgtctgccgtcgttgaaagttgtttctaaaaggtctccagtgggggctgcagactaagcaaaatgaggcggttcctgaggccagggcatgaccctgtgcgggagaggctcaagcgggacctgttccagtttaacaagacggtggagcatggcttcccgcaccagcccagcgccctcggctacagcccgtccctgcgcatcctggccatcggcacccgttctggagccatcaagctctacggagccccaggcgtggagttcatggggctgcaccaggagaacaacgctgtgacgcagatccacctcctgcccggccagtgccagctggtcaccctgctggatgacaacagcctgcacctttggagcctgaaggtcaagggcggggcatcggagctgcaggaggatgagagcttcacactgcgtggacccccaggggctgcccccagtgccacacagatcaccgtggtcctgccacattcctcctgcgagctgctctacctgggcaccgagagtggcaacgtgtttgtggtgcagctgccagcttttcgtgcgctggaggaccggaccatcagctcggacgcggtgctgcagcggttgccagaggaggcccgccaccggcgtgtgttcgagatggtggaggcactgcaggagcaccctcgagaccccaaccagatcctgatcggctacagccgaggcctcgttgtcatctgggacctacagggcagccgcgtgctctaccacttcctcagcagccagcaactggagaacatctggtggcagcgggacggccgcctgctcgtcagctgtcactctgacggcagctactgccagtggcccgtgtccagcgaagcccagcaaccagagcccctccgcagcctcgtgccttacggtccctttccttgcaaagcgattaccagaatcctctggctgaccactaggcaggggttgcccttcaccatcttccagggtggcatgccacgggccagctacggggaccgccactgcatctcagtgatccacgatggccagcagacggccttcgacttcacctcccgtgtcatcggcttcactgtcctcacagaggcagaccctgcagccagtaggagagcttcgggagtgggtgcccagggttaggtgtgggaggcatggggcaggaccatcagtaaagacagggccaggtgcagtggctcctgcctgtaaccccagtgctgtgggaggccaaggtggtaggatcgcttgaacccaggagttcaagtccagcctggacaacgtagggagacccttgtctctacaaaaaataaaaaaattagccagg

SEQ ID NO: 147851 - DNA, 2112 bp, Homo sapiens
  Payload ID: 9253
  Gene Symbol: LETMD1
  Gene Name: LETM1 domain containing 1
  Uniprot ID: Q6P1Q0
  ENST ID: ENST00000262055
  CDS Start-End: 40-1122
aaagacaacctcttctctcccgcttctctcgctgtgaagatggcgctctccagggtgtgctgggctcggtcggctgtgtggggctcggcagtcacccctggacattttgtcacccggaggctgcaacttggtcgctctggcctggcttggggggcccctcggtcttcaaagcttcacctttctccaaaggcagatgtgaagaacttgatgtcttatgtggtaaccaagacaaaagcgattaatgggaaataccatcgtttcttgggtcgtcatttcccccgcttctatgtcctgtacacaatcttcatgaaaggattgcagatgttatgggctgatgccaaaaaggctagaagaataaagacaaatatgtggaagcacaatataaagtttcatcaacttccataccgggagatggagcatttgagacagttccgccaagacgtcaccaagtgtcttttcctaggtattatttccattccaccttttgccaactacctggtcttcttgctaatgtacctgtttcccaggcaactactgatcaggcatttctggaccccaaaacaacaaactgatttcttagatatctatcatgctttccggaagcagtcccacccagaaattattagttatttagaaaaggtcatccctctcatttctgatgcaggactccggtggcgtctgacagatctgtgcaccaagatacagcgtggtacccacccagcaatacatgatatcttggctctgagagagtgtttctctaaccatcctctgggcatgaaccaactccaggctttgcacgtgaaagccttgagccgggccatgcttctcacatcttacctgcctcctcccttgttgagacatcgtttgaagactcatacaactgtgattcaccaactggacaaggctttggcaaagctggggattggccagctgactgctcaggaagtaaaatcggcttgttatctccgtggcctgaattctacgcatattggtgaagataggtgtcgaacttggctgggagaatggctgcagatttcctgcagcctgaaagaagctgagctgtctctcttgctgcacaacgtggtcctgctctccaccaactaccttgggacaaggcgctgaatgaaccatggagcggatggcattgtcctgcagtcgtatagtatagcagtgcaggaacaaacagcacttgccagcaaagtctgtgtgtactgttaagtgtgtgggaggcagagagaggagcaggggccatgggcttcacagcatggcacacatgtgggaactgcagacattcctctcacagctagaactgaaacaaaccctcttgctaggggtggtccgtgtgaggtgtcatcctgtccccctcataattactaatagctggaactggcagcagcctctactgggcttttactgtgatgtgttcagttcatgtcctaggaagtcagcttttgccccaggtgggaatccttatttggcttaggactgatccacttccatgttacttacatctgtgggtttttgttgttgctgttagaaaatttgtggctggtgaaaacagcactcctttggctggagcacatgtgtccgtgcatgtacttgggtgtttccctccatcctttctgatatgaccaaaaatcaagttgttttgttttttgtcaccttcactggcatgggctaaccacttctttttcaaaccctctgaacacctttttctgatgggtaacttgcaggaatattctattggaaaagataacaggaagtacaagtgcttcttgaccccttcctcaatgtttctagccttcactctccattgtcttttctgggctgtattacagccctctgtggatcttcaactctgctgcctccactgtgatgcagcagtccaactgtaactgacagtggctgccttctctgggccatggatcacacctgtaaggtactaattactgcccagcctggggagatcaggagaggtctgcatagttagtaagttgggtttagcttttgtgtgtgcatcagtgacttagagttctgtaataacttattgtaaatgcatgaagcactgtttttaaacccaagtaaagactgcttgaaacctgttgatggaaa

SEQ ID NO: 147852 - DNA, 1566 bp, Homo sapiens
  Payload ID: 9253
  Gene Symbol: LETMD1
  Gene Name: LETM1 domain containing 1
  ENST ID: ENST00000380135
  CDS Start-End: 14-457
tctcgctgtgaagatggcgctctccagggtgtgctgggctcggtcggctgtgtggggctcggcagtcacccctggacattttgtcacccggaggctgcaacttggtcgctctggcctggcttggggggcccctcggtcttcaaagcttcacctttctccaaaggcagatgtgaagaacttgatgtcttatgtggtaaccaagacaaaagcgattaatgggaaataccatcgtttcttgggtcgtcatttcccccgcttctatgtcctgtacacaatcttcatgaaagaaagccttgagccgggccatgcttctcacatcttacctgcctcctcccttgttgagacatcgtttgaagactcatacaactgtgattcaccaactggacaaggctttggcaaagctggggattggccagctgactgctcaggaagtaaaatcggaccatttctgttctgagtggtataggcttgttatctccgtggcctgaattctacgcatattggtgaagataggtgtcgaacttggctgggagaatggctgcagatttcctgcagcctgaaagaagctgagctgtctctcttgctgcacaacgtggtcctgctctccaccaactaccttgggacaaggcgctgaatgaaccatggagcggatggcattgtcctgcagtcgtatagtatagcagtgcaggaacaaacagcacttgccagcaaagtctgtgtgtactgttaagtgtgtgggaggcagagagaggagcaggggccatgggcttcacagcatggcacacatgtgggaactgcagacattcctctcacagctagaactgaaacaaaccctcttgctaggggtggtccgtgtgaggtgtcatcctgtccccctcataattactaatagctggaactggcagcagcctctactgggcttttactgtgatgtgttcagttcatgtcctaggaagtcagcttttgccccaggtgggaatccttatttggcttaggactgatccacttccatgttacttacatctgtgggtttttgttgttgctgttagaaaatttgtggctggtgaaaacagcactcctttggctggagcacatgtgtccgtgcatgtacttgggtgtttccctccatcctttctgatatgaccaaaaatcaagttgttttgttttttgtcaccttcactggcatgggctaaccacttctttttcaaaccctctgaacacctttttctgatgggtaacttgcaggaatattctattggaaaagataacaggaagtacaagtgcttcttgaccccttcctcaatgtttctagccttcactctccattgtcttttctgggctgtattacagccctctgtggatcttcaactctgctgcctccactgtgatgcagcagtccaactgtaactgacagtggctgccttctctgggccatggatcacacctgtaaggtactaattactgcccagcctggggagatcaggagaggtctgcatagttagtaagttgggtttagcttttgtgtgtgcatcagtgacttagagttctgtaataacttattgtaaa

SEQ ID NO: 147853 - DNA, 2123 bp, Homo sapiens
  Payload ID: 9253
  Gene Symbol: LETMD1
  Gene Name: LETM1 domain containing 1
  Uniprot ID: Q6P1Q0
  ENST ID: ENST00000418425
  CDS Start-End: 20-1141
cgcttctctcgctgtgaagatggcgctctccagggtgtgctgggctcggtcggctgtgtggggctcggcagtcacccctggacattttgtcacccggaggctgcaacttggtcgctctggcctggcttggggggcccctcggtcttcaaagcttcacctttctccaaaggcagatgtgaagaacttgatgtcttatgtggtaaccaagacaaaagcgattaatgggaaataccatcgtttcttgggtcgtcatttcccccgcttctatgtcctgtacacaatcttcatgaaaggattgcagatgttatgggctgatgccaaaaaggctagaagaataaagacaaatatgtggaagcacaatataaagtttcatcaacttccataccgggagatggagcatttgagacaggtatgggccaggggcagatatccagaagttcatggtgagttccgccaagacgtcaccaagtgtcttttcctaggtattatttccattccaccttttgccaactacctggtcttcttgctaatgtacctgtttcccaggcaactactgatcaggcatttctggaccccaaaacaacaaactgatttcttagatatctatcatgctttccggaagcagtcccacccagaaattattagttatttagaaaaggtcatccctctcatttctgatgcaggactccggtggcgtctgacagatctgtgcaccaagatacagcgtggtacccacccagcaatacatgatatcttggctctgagagagtgtttctctaaccatcctctgggcatgaaccaactccaggctttgcacgtgaaagccttgagccgggccatgcttctcacatcttacctgcctcctcccttgttgagacatcgtttgaagactcatacaactgtgattcaccaactggacaaggctttggcaaagctggggattggccagctgactgctcaggaagtaaaatcggcttgttatctccgtggcctgaattctacgcatattggtgaagataggtgtcgaacttggctgggagaatggctgcagatttcctgcagcctgaaagaagctgagctgtctctcttgctgcacaacgtggtcctgctctccaccaactaccttgggacaaggcgctgaatgaaccatggagcggatggcattgtcctgcagtcgtatagtatagcagtgcaggaacaaacagcacttgccagcaaagtctgtgtgtactgttaagtgtgtgggaggcagagagaggagcaggggccatgggcttcacagcatggcacacatgtgggaactgcagacattcctctcacagctagaactgaaacaaaccctcttgctaggggtggtccgtgtgaggtgtcatcctgtccccctcataattactaatagctggaactggcagcagcctctactgggcttttactgtgatgtgttcagttcatgtcctaggaagtcagcttttgccccaggtgggaatccttatttggcttaggactgatccacttccatgttacttacatctgtgggtttttgttgttgctgttagaaaatttgtggctggtgaaaacagcactcctttggctggagcacatgtgtccgtgcatgtacttgggtgtttccctccatcctttctgatatgaccaaaaatcaagttgttttgttttttgtcaccttcactggcatgggctaaccacttctttttcaaaccctctgaacacctttttctgatgggtaacttgcaggaatattctattggaaaagataacaggaagtacaagtgcttcttgaccccttcctcaatgtttctagccttcactctccattgtcttttctgggctgtattacagccctctgtggatcttcaactctgctgcctccactgtgatgcagcagtccaactgtaactgacagtggctgccttctctgggccatggatcacacctgtaaggtactaattactgcccagcctggggagatcaggagaggtctgcatagttagtaagttgggtttagcttttgtgtgtgcatcagtgacttagagttctgtaataacttattgtaaatgcatgaagcactgtttttaaacccaagtaaagactgcttgaaacctgtt

SEQ ID NO: 147854 - DNA, 618 bp, Homo sapiens
  Payload ID: 9253
  Gene Symbol: LETMD1
  Gene Name: LETM1 domain containing 1
  ENST ID: ENST00000547256
  CDS Start-End: 1-332
tgatgtcttatgtggtaaccaagacaaaagcgattaatgggaaataccatcgtttcttgggtcgtcatttcccccgcttctatgtcctgtacacaatcttcatgaaagaaagccttgagccgggccatgcttctcacatcttacctgcctcctcccttgttgagacatcgtttgaagactcatacaactgtgattcaccaactggacaaggctttggcaaagctggggattggccagctgactgctcaggaagtaaaatcgaagctgagctgtctctcttgctgcacaacgtggtcctgctctccaccaactaccttgggacaaggcgctgaatgaaccatggagcggatggcattgtcctgcagtcgtatagtatagcagtgcaggaacaaacagcacttgccagcaaagtctgtgtgtactgttaagtgtgtgggaggcagagagaggagcaggggccatgggcttcacagcatggcacacatgtgggaactgcagacattcctctcacagctagaactgaaacaaaccctcttgctaggggtggtccgtgtgaggtgtcatcctgtccccctcataattactaatagctggaactggcagcagcctctactgggc

SEQ ID NO: 147855 - DNA, 1186 bp, Homo sapiens
  Payload ID: 9253
  Gene Symbol: LETMD1
  Gene Name: LETM1 domain containing 1
  ENST ID: ENST00000551477
  CDS Start-End: 315-1186
aacagtcgaggctccgacgccccgagtccaggcagagggcaagggcggcgctgggaagccctgaggccctaaggaatcgcggagggtcactgggcgcctcaaggacagggtgccctccgcgtcgcaaacccacaccagtggcataagaactcgctccctctgggacaccctgtttccggcgcctttaaacctggaagtactgctgtgtccaatcctggccctccttccgcacttagtctttgagtccttccctctcctggcttgtgctggagccaagcaggctatggctaccaatcagcgctcagaaaagacgcatgcgtcttcgaacgaacgcgacgtcttcaaagcttcacctttctccaaaggcagatgtgaagaacttgatgtcttatgtggtaaccaagacaaaagcgattaatgggaaataccatcgtttcttgggtcgtcatttcccccgcttctatgtcctgtacacaatcttcatgaaaggattgcagatgttatgggctgatgccaaaaaggctagaagaataaagacaaatatgtggaagcacaatataaagtttcatcaacttccataccgggagatggagcatttgagacagttccgccaagacgtcaccaagtgtcttttcctaggtattatttccattccaccttttgccaactacctggtcttcttgctaatgtacctgtttcccaggcaactactgatcaggcatttctggaccccaaaacaacaaactgatttcttagatatctatcatgctttccggaagcagtcccacccagaaattattagttatttagaaaaggtcatccctctcatttctgatgcaggactccggtggcgtctgacagatctgtgcaccaagatacagcgtggtacccacccagcaatacatgatatcttggctctgagagagtgtttctctaaccatcctctgggcatgaaccaactccaggctttgcacgtgaaagccttgagccgggccatgcttctcacatcttacctgcctcctcccttgttgagacatcgtttgaagactcatacaactgtgattcaccaactggacaaggctttggcaaagctggggattggccagctgactgctcaggaagtaaaatcggcttgttatctccgtggcctgaattctacgcatattggtgaagataggtgtcgaac

SEQ ID NO: 147856 - DNA, 727 bp, Homo sapiens
  Payload ID: 9253
  Gene Symbol: LETMD1
  Gene Name: LETM1 domain containing 1
  ENST ID: ENST00000553043
  CDS Start-End: 1-295
cttggctctgagagagtgtttctctaaccatcctctgggcatgaaccaactccaggctttgcacgtgaaagccttgagccgggccatgcttctcacatcttacctgcctcctcccttgttgagacatcgtttgaagactcatacaactgtgattcaccaactggacaaggctttggcaaagctggggattggccagctgactgctcaggaagtaaaatcgaagctgagctgtctctcttgctgcacaacgtggtcctgctctccaccaactaccttgggacaaggcgctgaatgaaccatggagcggatggcattgtcctgcagtcgtatagtatagcagtgcaggaacaaacagcacttgccagcaaagtctgtgtgtactgttaagtgtgtgggaggcagagagaggagcaggggccatgggcttcacagcatggcacacatgtgggaactgcagacattcctctcacagctagaactgaaacaaaccctcttgctaggggtggtccgtgtgaggtgtcatcctgtccccctcataattactaatagctggaactggcagcagcctctactgggcttttactgtgatgtgttcagttcatgtcctaggaagtcagcttttgccccaggtgggaatccttatttggcttaggactgatccacttccatgttacttacatctgtgggtttttgttgttgctgttagaaaatttgtggctggtgaaaa

SEQ ID NO: 147857 - DNA, 1480 bp, Homo sapiens
  Payload ID: 9253
  Gene Symbol: LETMD1
  Gene Name: LETM1 domain containing 1
  Uniprot ID: Q6P1Q0
  ENST ID: ENST00000550100
  CDS Start-End: 14-481
tctcgctgtgaagatggcgctctccagggtgtgctgggctcggtcggctgtgtggggctcggcagtcacccctggacattttgtcacccggaggctgcaacttggtcgctctggcctggcttggggggcccctcggtcttcaaagcttcacctttctccaaaggcagatgtgaagaacttgatgtcttatgtggtaaccaagacaaaagcgattaatgggaaataccatcgtttcttgggtcgtcatttcccccgcttctatgtcctgtacacaatcttcatgaaagaaagccttgagccgggccatgcttctcacatcttacctgcctcctcccttgttgagacatcgtttgaagactcatacaactgtgattcaccaactggacaaggctttggcaaagctggggattggccagctgactgctcaggaagtaaaatcggcttgttatctccgtggcctgaattctacgcatattggtgaagataggtgtcgaacttggctgggagaatggctgcagatttcctgcagcctgaaagaagctgagctgtctctcttgctgcacaacgtggtcctgctctccaccaactaccttgggacaaggcgctgaatgaaccatggagcggatggcattgtcctgcagtcgtatagtatagcagtgcaggaacaaacagcacttgccagcaaagtctgtgtgtactgttaagtgtgtgggaggcagagagaggagcaggggccatgggcttcacagcatggcacacatgtgggaactgcagacattcctctcacagctagaactgaaacaaaccctcttgctaggggtggtccgtgtgaggtgtcatcctgtccccctcataattactaatagctggaactggcagcagcctctactgggcttttactgtgatgtgttcagttcatgtcctaggaagtcagcttttgccccaggtgggaatccttatttggcttaggactgatccacttccatgttacttacatctgtgggtttttgttgttgctgttagaaaatttgtggctggtgaaaacagcactcctttggctggagcacatgtgtccgtgcatgtacttgggtgtttccctccatcctttctgatatgaccaaaaatcaagttgttttgttttttgtcaccttcactggcatgggctaaccacttctttttcaaaccctctgaacacctttttctgatgggtaacttgcaggaatattctattggaaaagataacaggaagtacaagtgcttcttgaccccttcctcaatgtttctagccttcactctccattgtcttttctgggctgtattacagccctctgtggatcttcaactctgctgcctccactgtgatgcagcagtccaactgtaactgacagtggctgccttctctgggccatggatcacacctgtaaggtactaattactgcccagcctggggagatcaggagaggtctgcatagttagtaag

SEQ ID NO: 147858 - DNA, 582 bp, Homo sapiens
  Payload ID: 9253
  Gene Symbol: LETMD1
  Gene Name: LETM1 domain containing 1
  ENST ID: ENST00000548251
  CDS Start-End: 31-582
ctcttctctcccgcttctctcgctgtgaagatggcgctctccagggtgtgctgggctcggtcggctgtgtggggctcggcagtcacccctggacattttgtcacccggaggctgcaacttggtcgctctggcctggcttggggggcccctcggtcttcaaagcttcacctttctccaaaggcagatgtgaagaacttgatgtcttatgtggtaaccaagacaaaagcgattaatgggaaataccatcgtttcttgggtcgtcatttcccccgcttctatgtcctgtacacaatcttcatgaaaggactccggtggcgtctgacagatctgtgcaccaagatacagcgtggtacccacccagcaatacatgatatcttggctctgagagagtgtttctctaaccatcctctgggcatgaaccaactccaggctttgcacgtgaaagccttgagccgggccatgcttctcacatcttacctgcctcctcccttgttgagacatcgtttgaagactcatacaactgtgattcaccaactggacaaggctttggcaaagctggggattggccagctgactgctcag

SEQ ID NO: 147859 - DNA, 1665 bp, Homo sapiens
  Payload ID: 9253
  Gene Symbol: LETMD1
  Gene Name: LETM1 domain containing 1
  ENST ID: ENST00000547008
  CDS Start-End: 17-727
ttctctcgctgtgaagatggcgctctccagggtgtgctgggctcggtcggctgtgtggggctcggcagtcacccctggacattttgtcacccggaggctgcaacttggtcgctctggcctggcttggggggcccctcggtcttcaaagcttcacctttctccaaaggcagatgtgaagaacttgatgtcttatgtggtaaccaagacaaaagcgattaatgggaaataccatcgtttcttgggtcgtcatttcccccgcttctatgtcctgtacacaatcttcatgaaaggattgcagatgttatgggctgatgccaaaaaggctagaagaataaagacaaatatgtggaagcacaatataaagtttcatcaacttccataccgggagatggagcatttgagacagaaagccttgagccgggccatgcttctcacatcttacctgcctcctcccttgttgagacatcgtttgaagactcatacaactgtgattcaccaactggacaaggctttggcaaagctggggattggccagctgactgctcaggaagtaaaatcggcttgttatctccgtggcctgaattctacgcatattggtgaagataggtgtcgaacttggctgggagaatggctgcagatttcctgcagcctgaaagaagctgagctgtctctcttgctgcacaacgtggtcctgctctccaccaactaccttgggacaaggcgctgaatgaaccatggagcggatggcattgtcctgcagtcgtatagtatagcagtgcaggaacaaacagcacttgccagcaaagtctgtgtgtactgttaagtgtgtgggaggcagagagaggagcaggggccatgggcttcacagcatggcacacatgtgggaactgcagacattcctctcacagctagaactgaaacaaaccctcttgctaggggtggtccgtgtgaggtgtcatcctgtccccctcataattactaatagctggaactggcagcagcctctactgggcttttactgtgatgtgttcagttcatgtcctaggaagtcagcttttgccccaggtgggaatccttatttggcttaggactgatccacttccatgttacttacatctgtgggtttttgttgttgctgttagaaaatttgtggctggtgaaaacagcactcctttggctggagcacatgtgtccgtgcatgtacttgggtgtttccctccatcctttctgatatgaccaaaaatcaagttgttttgttttttgtcaccttcactggcatgggctaaccacttctttttcaaaccctctgaacacctttttctgatgggtaacttgcaggaatattctattggaaaagataacaggaagtacaagtgcttcttgaccccttcctcaatgtttctagccttcactctccattgtcttttctgggctgtattacagccctctgtggatcttcaactctgctgcctccactgtgatgcagcagtccaactgtaactgacagtggctgccttctctgggccatggatcacacctgtaaggtactaattactgcccagcctggggagatcaggagaggtctgcatagttagtaagttgggtttagcttttgtgtgtgcatcagtgacttagagttctgtaataacttattgtaaatgcatg

SEQ ID NO: 147860 - DNA, 563 bp, Homo sapiens
  Payload ID: 9253
  Gene Symbol: LETMD1
  Gene Name: LETM1 domain containing 1
  ENST ID: ENST00000549686
  CDS Start-End: 20-151
cgcttctctcgctgtgaagatggcgctctccagggtgtgctgggctcggtcggctgtgtggggctcggcagtcacccctggacattttgtcacccggaggctgcaacttggtcgctctggcctggcttggggggcccctcgaaagccttgagccgggccatgcttctcacatcttacctgcctcctcccttgttgagacatcgtttgaagactcatacaactgtgattcaccaactggacaaggctttggcaaagctggggattggccagctgactgctcaggaagtaaaatcggcttgttatctccgtggcctgaattctacgcatattggtgaagataggtgtcgaacttggctgggagaatggctgcagatttcctgcagcctgaaagaagctgagctgtctctcttgctgcacaacgtggtcctgctctccaccaactaccttgggacaaggcgctgaatgaaccatggagcggatggcattgtcctgcagtcgtatagtatagcagtgcaggaacaaacagcacttgccagcaaagtctgtgtgtactgttaagtgtg

SEQ ID NO: 147861 - DNA, 469 bp, Homo sapiens
  Payload ID: 9253
  Gene Symbol: LETMD1
  Gene Name: LETM1 domain containing 1
  ENST ID: ENST00000550442
  CDS Start-End: 38-469
agacaacctcttctctcccgcttctctcgctgtgaagatggcgctctccagggtgtgctgggctcggtcggctgtgtggggctcggcagtcacccctggacattttgtcacccggaggctgcaacttggtcgctctggcctggcttggggggcccctcggtcttcaaagcttcacctttctccaaaggcagatgtgaagaacttgatgtcttatgtggtaaccaagacaaaagcgattaatgggaaataccatcgtttcttgggtcgtcatttcccccgcttctatgtcctgtacacaatcttcatgaaaggattgcagatgttatgggctgatgccaaaaaggctagaagaataaagacaaatatgtggaagcacaatataaagtttcatcaacttccataccgggagatggagcatttgagacagaaagccttgagccgggccatgcttctcacatcttacctgcct

SEQ ID NO: 147862 - DNA, 565 bp, Homo sapiens
  Payload ID: 9253
  Gene Symbol: LETMD1
  Gene Name: LETM1 domain containing 1
  ENST ID: ENST00000550814
  CDS Start-End: 92-565
ctcttctctcccgcttctctcgctgtgaagatggcgctctccagggtcttcaaagcttcacctttctccaaaggcagatgtgaagaacttgatgtcttatgtggtaaccaagacaaaagcgattaatgggaaataccatcgtttcttgggtcgtcatttcccccgcttctatgtcctgtacacaatcttcatgaaagttccgccaagacgtcaccaagtgtcttttcctaggtattatttccattccaccttttgccaactacctggtcttcttgctaatcgtggtacccacccagcaatacatgatatcttggctctgagagagtgtttctctaaccatcctctgggcatgaaccaactccaggctttgcacgtgaaagccttgagccgggccatgcttctcacatcttacctgcctcctcccttgttgagacatcgtttgaagactcatacaactgtgattcaccaactggacaaggctttggcaaagctggggattggccagctgactgctcaggaagtaaaatcggcttgttatctccgtggcctgaattctacgcatatt

SEQ ID NO: 147863 - DNA, 2001 bp, Homo sapiens
  Payload ID: 9253
  Gene Symbol: LETMD1
  Gene Name: LETM1 domain containing 1
  ENST ID: ENST00000547318
  CDS Start-End: 57-473
acggttaactttgacccaaagacaacctcttctctcccgcttctctcgctgtgaagatggcgctctccagggtgtgctgggctcggtcggctgtgtggggctcggcagtcacccctggacattttgtcacccggaggctgcaacttggtcgctctggcctggcttggggggcccctcggtcttcaaagcttcacctttctccaaaggcagatgtgaagaacttgatgtcttatgtggtaaccaagacaaaagcgattaatgggaaataccatcgtttcttgggtcgtcatttcccccgcttctatgtcctgtacacaatcttcatgaaagttccgccaagacgtcaccaagtgtcttttcctaggtattatttccattccaccttttgccaactacctggtcttcttgctaatgtacctgtttcccaggcaactactgatcaggcatttctggaccccaaaacaacaaactgatttcttagatatctatcatgctttccggaagcagtcccacccagaaattattagttatttagaaaaggtcatccctctcatttctgatgcaggactccggtggcgtctgacagatctgtgcaccaagatacagcgtggtacccacccagcaatacatgatatcttggctctgagagagtgtttctctaaccatcctctgggcatgaaccaactccaggctttgcacgtgaaagccttgagccgggccatgcttctcacatcttacctgcctcctcccttgttgagacatcgtttgaagactcatacaactgtgattcaccaactggacaaggctttggcaaagctggggattggccagctgactgctcaggaagtaaaatcggcttgttatctccgtggcctgaattctacgcatattggtgaagataggtgtcgaacttggctgggagaatggctgcagatttcctgcagcctgaaagaagctgagctgtctctcttgctgcacaacgtggtcctgctctccaccaactaccttgggacaaggcgctgaatgaaccatggagcggatggcattgtcctgcagtcgtatagtatagcagtgcaggaacaaacagcacttgccagcaaagtctgtgtgtactgttaagtgtgtgggaggcagagagaggagcaggggccatgggcttcacagcatggcacacatgtgggaactgcagacattcctctcacagctagaactgaaacaaaccctcttgctaggggtggtccgtgtgaggtgtcatcctgtccccctcataattactaatagctggaactggcagcagcctctactgggcttttactgtgatgtgttcagttcatgtcctaggaagtcagcttttgccccaggtgggaatccttatttggcttaggactgatccacttccatgttacttacatctgtgggtttttgttgttgctgttagaaaatttgtggctggtgaaaacagcactcctttggctggagcacatgtgtccgtgcatgtacttgggtgtttccctccatcctttctgatatgaccaaaaatcaagttgttttgttttttgtcaccttcactggcatgggctaaccacttctttttcaaaccctctgaacacctttttctgatgggtaacttgcaggaatattctattggaaaagataacaggaagtacaagtgcttcttgaccccttcctcaatgtttctagccttcactctccattgtcttttctgggctgtattacagccctctgtggatcttcaactctgctgcctccactgtgatgcagcagtccaactgtaactgacagtggctgccttctctgggccatggatcacacctgtaaggtactaattactgcccagcctggggagatcaggagaggtctgcatagttagtaagttgggtttagcttttgtgtgtgcatcagtgacttagagttctgtaataacttattgtaaatgcatgaagcactgtttttaaacccaagtaaagactgcttgaaacc

SEQ ID NO: 147864 - DNA, 521 bp, Homo sapiens
  Payload ID: 9253
  Gene Symbol: LETMD1
  Gene Name: LETM1 domain containing 1
  ENST ID: ENST00000551261
  CDS Start-End: 31-330
ctcttctctcccgcttctctcgctgtgaagatggcgctctccagggtgtgctgggctcggtcggctgtgtggggctcggcagtcacccctggacattttgtcacccggaggctgcaacttggtcgctctggcctggcttggggggcccctcggtcttcaaagcttcacctttctccaaaggcagatgtgaagaacttgatgtcttatgtggtaaccaagacaaaagcgattaatgggaaataccatcgtttcttgggtcgtcatttcccccgcttctatgtcctgtacacaatcttcatgaaaggcaggattgcagatgttatgggctgatgccaaaaaggctagaagaataaagacaaatatgtggaagcacaatataaagtttcatcaacttccataccgggagatggagcatttgagacagttccgccaagacgtcaccaagtgtcttttcctaggtattatttccattccaccttttgccaactacctggtcttcttgctaatgtacctgtttccca

SEQ ID NO: 147865 - DNA, 552 bp, Homo sapiens
  Payload ID: 9253
  Gene Symbol: LETMD1
  Gene Name: LETM1 domain containing 1
  ENST ID: ENST00000550755
  CDS Start-End: 101-232
aaagacaacctcttctctcccgcttctctcgctgtgaagatggcgctctccagggtcttcaaagcttcacctttctccaaaggcagatgtgaagaacttgatgtcttatgtggtaaccaagacaaaagcgattaatgggaaataccatcgtttcttgggtcgtcatttcccccgcttctatgtcctgtacacaatcttcatgaaaggcaggattgcagatgttatgggctgatgccaaaaaggctagaagaataaagacaaatatgtggaagcacaatataaagtttcatcaacttccataccgggagatggagcatttgagacagttccgccaagacgtcaccaagtgtcttttcctaggtattatttccattccaccttttgccaactacctggtcttcttgctaatgtacctgtttcccaggcaactactgatcaggcatttctggaccccaaaacaacaaactgatttcttagatatctatcatgctttccggaagcagtcccacccagaaattattagttatttagaaaaggtcatccctctcattt

SEQ ID NO: 147866 - DNA, 818 bp, Homo sapiens
  Payload ID: 9253
  Gene Symbol: LETMD1
  Gene Name: LETM1 domain containing 1
  ENST ID: ENST00000549340
  CDS Start-End: 37-818
gacaacctcttctctcccgcttctctcgctgtgaagatggcgctctccagggtgtgctgggctcggtcggctgtgtggggctcggcagtcacccctggacattttgtcacccggaggctgcaacttggtcgctctggcctggcttggggggcccctcggtcttcaaagcttcacctttctccaaaggcagatgtgaagaacttgatgtcttatgtggtaaccaagacaaaagcgattaatgggaaataccatcgtttcttgggtcgtcatttcccccgcttctatgtcctgtacacaatcttcatgaaaggtattatttccattccaccttttgccaactacctggtcttcttgctaatgtacctgtttcccaggcaactactgatcaggcatttctggaccccaaaacaacaaactgatttcttagatatctatcatgctttccggaagcagtcccacccagaaattattagttatttagaaaaggtcatccctctcatttctgatgcaggactccggtggcgtctgacagatctgtgcaccaagatacagcgtggtacccacccagcaatacatgatatcttggctctgagagagtgtttctctaaccatcctctgggcatgaaccaactccaggctttgcacgtgaaagccttgagccgggccatgcttctcacatcttacctgcctcctcccttgttgagacatcgtttgaagactcatacaactgtgattcaccaactggacaaggctttggcaaagctggggattggccagctgactgctcaggaagtaaaatcggcttgttatctccgtgg

SEQ ID NO: 147867 - DNA, 433 bp, Homo sapiens
  Payload ID: 9253
  Gene Symbol: LETMD1
  Gene Name: LETM1 domain containing 1
  ENST ID: ENST00000548401
  CDS Start-End: 29-433
cttctctcccgcttctctcgctgtgaagatggcgctctccagggtgtgctgggctcggtcggctgtgtggggctcggcagtcacccctggacattttgtcacccggaggctgcaacttggtcgctctggcctggcttggggggcccctcgtctctttgatcttccttgtaggtcttcaaagcttcacctttctccaaaggcagatgtgaagaacttgatgtcttatgtggtaaccaagacaaaagcgattaatgggaaataccatcgtttcttgggtcgtcatttcccccgcttctatgtcctgtacacaatcttcatgaaaggattgcagatgttatgggctgatgccaaaaaggctagaagaataaagacaaatatgtggaagcacaatataaagtttcatcaacttccataccgggagatggagcatttg

SEQ ID NO: 147868 - DNA, 1389 bp, Homo sapiens
  Payload ID: 9253
  Gene Symbol: LETMD1
  Gene Name: LETM1 domain containing 1
  Uniprot ID: Q6P1Q0
  ENST ID: ENST00000550929
  CDS Start-End: 101-1015
aaagacaacctcttctctcccgcttctctcgctgtgaagatggcgctctccagggtcttcaaagcttcacctttctccaaaggcagatgtgaagaacttgatgtcttatgtggtaaccaagacaaaagcgattaatgggaaataccatcgtttcttgggtcgtcatttcccccgcttctatgtcctgtacacaatcttcatgaaaggattgcagatgttatgggctgatgccaaaaaggctagaagaataaagacaaatatgtggaagcacaatataaagtttcatcaacttccataccgggagatggagcatttgagacagttccgccaagacgtcaccaagtgtcttttcctaggtattatttccattccaccttttgccaactacctggtcttcttgctaatgtacctgtttcccaggcaactactgatcaggcatttctggaccccaaaacaacaaactgatttcttagatatctatcatgctttccggaagcagtcccacccagaaattattagttatttagaaaaggtcatccctctcatttctgatgcaggactccggtggcgtctgacagatctgtgcaccaagatacagcgtggtacccacccagcaatacatgatatcttggctctgagagagtgtttctctaaccatcctctgggcatgaaccaactccaggctttgcacgtgaaagccttgagccgggccatgcttctcacatcttacctgcctcctcccttgttgagacatcgtttgaagactcatacaactgtgattcaccaactggacaaggctttggcaaagctggggattggccagctgactgctcaggaagtaaaatcggcttgttatctccgtggcctgaattctacgcatattggtgaagataggtgtcgaacttggctgggagaatggctgcagatttcctgcagcctgaaagaagctgagctgtctctcttgctgcacaacgtggtcctgctctccaccaactaccttgggacaaggcgctgaatgaaccatggagcggatggcattgtcctgcagtcgtatagtatagcagtgcaggaacaaacagcacttgccagcaaagtctgtgtgtactgttaagtgtgtgggaggcagagagaggagcaggggccatgggcttcacagcatggcacacatgtgggaactgcagacattcctctcacagctagaactgaaacaaaccctcttgctaggggtggtccgtgtgaggtgtcatcctgtccccctcataattactaatagctggaactggcagcagcctctactgggcttttactgtgatgtgttcagttcatgtcctaggaagtcagcttttgccccaggtgggaatccttatttggcttaggactgatccactt

SEQ ID NO: 147869 - DNA, 705 bp, Homo sapiens
  Payload ID: 9253
  Gene Symbol: LETMD1
  Gene Name: LETM1 domain containing 1
  ENST ID: ENST00000551931
  CDS Start-End: 1-434
atcatgctttccggaagcagtcccacccagaaattattagttatttagaaaaggtcatccctctcatttctgatgcaggactccggtggcgtctgacagatctgtgcaccaagaaagccttgagccgggccatgcttctcacatcttacctgcctcctcccttgttgagacatcgtttgaagactcatacaactgtgattcaccaactggacaaggctttggcaaagctggggattggccagctgactgctcaggaagtaaaatcggcttgttatctccgtggcctgaattctacgcatattggtgaagataggtgtcgaacttggctgggagaatggctgcagatttcctgcagcctgaaagaagctgagctgtctctcttgctgcacaacgtggtcctgctctccaccaactaccttgggacaaggcgctgaatgaaccatggagcggatggcattgtcctgcagtcgtatagtatagcagtgcaggaacaaacagcacttgccagcaaagtctgtgtgtactgttaagtgtgtgggaggcagagagaggagcaggggccatgggcttcacagcatggcacacatgtgggaactgcagacattcctctcacagctagaactgaaacaaaccctcttgctaggggtggtccgtgtgaggtgtcatcctgtccccctcataattactaatagctggaactggcag

SEQ ID NO: 147870 - DNA, 568 bp, Homo sapiens
  Payload ID: 9253
  Gene Symbol: LETMD1
  Gene Name: LETM1 domain containing 1
  ENST ID: ENST00000548209
  CDS Start-End: 31-568
ctcttctctcccgcttctctcgctgtgaagatggcgctctccagggtgtgctgggctcggtcggctgtgtggggctcggcagtcacccctggacattttgtcacccggaggctgcaacttggtcgctctggcctggcttggggggcccctcggtcttcaaagcttcacctttctccaaaggcagatgtgaagaacttgatgtcttatgtggtaaccaagacaaaagcgattaatgggaaataccatcgtttcttgggtcgtcatttcccccgcttctatgtcctgtacacaatcttcatgaaagttccgccaagacgtcaccaagtgtcttttcctaggtattatttccattccaccttttgccaactacctggtcttcttgctaatatacagcgtggtacccacccagcaatacatgatatcttggctctgagagagtgtttctctaaccatcctctgggcatgaaccaactccaggctttgcacgtgaaagccttgagccgggccatgcttctcacatcttacctgcctcctcccttgttgagacatcgtttgaagactcatacaa

SEQ ID NO: 147871 - DNA, 1713 bp, Homo sapiens
  Payload ID: 9253
  Gene Symbol: LETMD1
  Gene Name: LETM1 domain containing 1
  ENST ID: ENST00000552739
  CDS Start-End: 12-743
tcgctgtgaagatggcgctctccagggtgtgctgggctcggtcggctgtgtggggctcggcagtcacccctggacattttgtcacccggaggctgcaacttggtcgctctggcctggcttggggggcccctcggtacctgtttcccaggcaactactgatcaggcatttctggaccccaaaacaacaaactgatttcttagatatctatcatgctttccggaagcagtcccacccagaaattattagttatttagaaaaggtcatccctctcatttctgatgcaggactccggtggcgtctgacagatctgtgcaccaagatacagcgtggtacccacccagcaatacatgatatcttggctctgagagagtgtttctctaaccatcctctgggcatgaaccaactccaggctttgcacgtgaaagccttgagccgggccatgcttctcacatcttacctgcctcctcccttgttgagacatcgtttgaagactcatacaactgtgattcaccaactggacaaggctttggcaaagctggggattggccagctgactgctcaggaagtaaaatcggcttgttatctccgtggcctgaattctacgcatattggtgaagataggtgtcgaacttggctgggagaatggctgcagatttcctgcagcctgaaagaagctgagctgtctctcttgctgcacaacgtggtcctgctctccaccaactaccttgggacaaggcgctgaatgaaccatggagcggatggcattgtcctgcagtcgtatagtatagcagtgcaggaacaaacagcacttgccagcaaagtctgtgtgtactgttaagtgtgtgggaggcagagagaggagcaggggccatgggcttcacagcatggcacacatgtgggaactgcagacattcctctcacagctagaactgaaacaaaccctcttgctaggggtggtccgtgtgaggtgtcatcctgtccccctcataattactaatagctggaactggcagcagcctctactgggcttttactgtgatgtgttcagttcatgtcctaggaagtcagcttttgccccaggtgggaatccttatttggcttaggactgatccacttccatgttacttacatctgtgggtttttgttgttgctgttagaaaatttgtggctggtgaaaacagcactcctttggctggagcacatgtgtccgtgcatgtacttgggtgtttccctccatcctttctgatatgaccaaaaatcaagttgttttgttttttgtcaccttcactggcatgggctaaccacttctttttcaaaccctctgaacacctttttctgatgggtaacttgcaggaatattctattggaaaagataacaggaagtacaagtgcttcttgaccccttcctcaatgtttctagccttcactctccattgtcttttctgggctgtattacagccctctgtggatcttcaactctgctgcctccactgtgatgcagcagtccaactgtaactgacagtggctgccttctctgggccatggatcacacctgtaaggtactaattactgcccagcctggggagatcaggagaggtctgcatagttagtaagttgggtttagcttttgtgtgtgcatcagtgacttagagttctgtaataacttattgtaaatgcatgaagcactgtttttaaacccaagtaaagactgc

SEQ ID NO: 147872 - DNA, 1658 bp, Homo sapiens
  Payload ID: 9253
  Gene Symbol: LETMD1
  Gene Name: LETM1 domain containing 1
  ENST ID: ENST00000547555
  CDS Start-End: 31-156
ctcttctctcccgcttctctcgctgtgaagatggcgctctccagggtgtgctgggctcggtcggctgtgtggggctcggcagtcacccctggacattttgtcacccggaggctgcaacttggtcgctctggcctggcttggggggcccctcggtgagggacctgtagcgagaaaagcatttttgacgtccaggtcttcaaagcttcacctttctccaaaggcagatgtgaagaacttgatgtcttatgtggtaaccaagacaaaagcgattaatgggaaataccatcgtttcttgggtcgtcatttcccccgcttctatgtcctgtacacaatcttcatgaaagaaagccttgagccgggccatgcttctcacatcttacctgcctcctcccttgttgagacatcgtttgaagactcatacaactgtgattcaccaactggacaaggctttggcaaagctggggattggccagctgactgctcaggaagtaaaatcggcttgttatctccgtggcctgaattctacgcatattggtgaagataggtgtcgaacttggctgggagaatggctgcagatttcctgcagcctgaaagaagctgagctgtctctcttgctgcacaacgtggtcctgctctccaccaactaccttgggacaaggcgctgaatgaaccatggagcggatggcattgtcctgcagtcgtatagtatagcagtgcaggaacaaacagcacttgccagcaaagtctgtgtgtactgttaagtgtgtgggaggcagagagaggagcaggggccatgggcttcacagcatggcacacatgtgggaactgcagacattcctctcacagctagaactgaaacaaaccctcttgctaggggtggtccgtgtgaggtgtcatcctgtccccctcataattactaatagctggaactggcagcagcctctactgggcttttactgtgatgtgttcagttcatgtcctaggaagtcagcttttgccccaggtgggaatccttatttggcttaggactgatccacttccatgttacttacatctgtgggtttttgttgttgctgttagaaaatttgtggctggtgaaaacagcactcctttggctggagcacatgtgtccgtgcatgtacttgggtgtttccctccatcctttctgatatgaccaaaaatcaagttgttttgttttttgtcaccttcactggcatgggctaaccacttctttttcaaaccctctgaacacctttttctgatgggtaacttgcaggaatattctattggaaaagataacaggaagtacaagtgcttcttgaccccttcctcaatgtttctagccttcactctccattgtcttttctgggctgtattacagccctctgtggatcttcaactctgctgcctccactgtgatgcagcagtccaactgtaactgacagtggctgccttctctgggccatggatcacacctgtaaggtactaattactgcccagcctggggagatcaggagaggtctgcatagttagtaagttgggtttagcttttgtgtgtgcatcagtgacttagagttctgtaataacttattgtaaatgcatgaagcactgtttttaaacccaagtaaagactgcttgaaacctgttgatggaaatga

SEQ ID NO: 147873 - DNA, 601 bp, Homo sapiens
  Payload ID: 9253
  Gene Symbol: LETMD1
  Gene Name: LETM1 domain containing 1
  ENST ID: ENST00000547660
  CDS Start-End: 273-601
ctcttctctcccgcttctctcgctgtgaagatggcgctctccagggtcttcaaagcttcacctttctccaaaggcagatgtgaagaacttgatgtcttatgtggtaaccaagacaaaagcgattaatgggaaataccatcgtttcttgggtcgtcatttcccccgcttctatgtcctgtacacaatcttcatgaaagatacagcgtggtacccacccagcaatacatgatatcttggctctgagagagtgtttctctaaccatcctctgggcatgaaccaactccaggctttgcacgtgaaagccttgagccgggccatgcttctcacatcttacctgcctcctcccttgttgagacatcgtttgaagactcatacaactgtgattcaccaactggacaaggctttggcaaagctggggattggccagctgactgctcaggaagtaaaatcggcttgttatctccgtggcctgaattctacgcatattggtgaagataggtgtcgaacttggctgggagaatggctgcagatttcctgcagcctgaaagaagctgagctgtctctcttgctgcacaacgtggtcctgctctccaccaacta

SEQ ID NO: 147874 - DNA, 2213 bp, Homo sapiens
  Payload ID: 9254
  Gene Symbol: LAP3
  Gene Name: leucine aminopeptidase 3
  Uniprot ID: P28838
  ENST ID: ENST00000226299
  CDS Start-End: 275-1834
gcgggcgcacacgaatgcgggcgcacacgaatgcgggcgcacacgaatgcgggcgcacccttgagtcccctccacaaccgcggtttgatcccagcggtccagtcggccggtgctgcccatccgtcccgccccctagacgcacgtccgctcgcccggcgcccgagccagtccgcgcgcacgccgtctgcgccccgaaagccccgccccaaggcgcgcccgcccaccgctctccacgtgctcgctggagggcggtgcgaggggccgagccgacaagatgttcttgctgcctcttccggctgcggggcgagtagtcgtccgacgtctggccgtgagacgtttcgggagccggagtctctccaccgcagacatgacgaagggccttgttttaggaatctattccaaagaaaaagaagatgatgtgccacagttcacaagtgcaggagagaattttgataaattgttagctggaaagctgagagagactttgaacatatctggaccacctctgaaggcagggaagactcgaaccttttatggtctgcatcaggacttccccagcgtggtgctagttggcctcggcaaaaaggcagctggaatcgacgaacaggaaaactggcatgaaggcaaagaaaacatcagagctgctgttgcagcggggtgcaggcagattcaagacctggagctctcgtctgtggaggtggatccctgtggagacgctcaggctgctgcggagggagcggtgcttggtctctatgaatacgatgacctaaagcaaaaaaagaagatggctgtgtcggcaaagctctatggaagtggggatcaggaggcctggcagaaaggagtcctgtttgcttctgggcagaacttggcacgccaattgatggagacgccagccaatgagatgacgccaaccagatttgctgaaattattgagaagaatctcaaaagtgctagtagtaaaaccgaggtccatatcagacccaagtcttggattgaggaacaggcaatgggatcattcctcagtgtggccaaaggatctgacgagcccccagtcttcttggaaattcactacaaaggcagccccaatgcaaacgaaccacccctggtgtttgttgggaaaggaattacctttgacagtggtggtatctccatcaaggcttctgcaaatatggacctcatgagggctgacatgggaggagctgcaactatatgctcagccatcgtgtctgctgcaaagcttaatttgcccattaatattataggtctggcccctctttgtgaaaatatgcccagcggcaaggccaacaagccgggggatgttgttagagccaaaaacgggaagaccatccaggttgataacactgatgctgaggggaggctcatactggctgatgcgctctgttacgcacacacgtttaacccgaaggtcatcctcaatgccgccaccttaacaggtgccatggatgtagctttgggatcaggtgccactggggtctttaccaattcatcctggctctggaacaaactcttcgaggccagcattgaaacaggggaccgtgtctggaggatgcctctcttcgaacattatacaagacaggttgtagattgccagcttgctgatgttaacaacattggaaaatacagatctgcaggagcatgtacagctgcagcattcctgaaagaattcgtaactcatcctaagtgggcacatttagacatagcaggcgtgatgaccaacaaagatgaagttccctatctacggaaaggcatgactgggaggcccacaaggactctcattgagttcttacttcgtttcagtcaagacaatgcttagttcagatactcaaaaatgtcttcactctgtcttaaattggacagttgaacttaaaaggtttttgaataaatggatgaaaatcttttaacggagacaaaggatggtatttaaaaatgtagaacacaatgaaatttgtatgccttgatttttttttcatttcacacaaagatttataaaggtaaagttaatatcttacttgataaggatttttaagatactctataaatgattaaaatttttagaacttcctaatcacttttcagagtatatgtttttcattgagaagcaaaattgtaactcagatttgtgatgctaggaacatgagcaaactgaaaattactatgcacttgtcagaaacaataaatgcaacttgttgtgc

SEQ ID NO: 147875 - DNA, 887 bp, Homo sapiens
  Payload ID: 9254
  Gene Symbol: LAP3
  Gene Name: leucine aminopeptidase 3
  ENST ID: ENST00000509583
  CDS Start-End: 1-359
gagtagtcgtccgacgtctggccgtgagacgtttcgggagccggagtctctccaccgcagacatgacgaagggccttgttttaggaatctattccaaagaaaaagaagatgatgtgccacagttcacaagtgcaggagagaattttgataaattgttagctggaaagctgagagagactttgaacatatctggaccacctctgaaggcagggaagactcgaaccttttatggtctgcatcagcggggtgcaggcagattcaagacctggagctctcgtctgtggaggtggatccctgtggagacgctcaggctgctgcggagggagcggtgcttggtctctatgaatacgatgacctaaagcaaaaaaagaagatggctgtgtcggcaaagctctatggaagtggggatcaggaggcctggcagaaaggagtcctgtttgcttctgggcagaacttggcacgccaattgatggagacgccagccaatgagatgacgccaaccagatttgctgaaattattgagaagaatctcaaaagtgctagtagtaaaaccgaggtccatatcaggtaattcaggattgtgtcacagactcgagatgttacagccagaaggagcccttgagatcctaaaatccagctccctcactttttagaggaataacttgagaccagagatttgagatgacccacttgggtccacatggggagctggaatagagctgagtttgaggttctttctatctttccttgcctttgagagagagagtgccatgatatactatgtatgtgtatatttcataactgtgttattcagacacaattaacatgccatagaattcaccaatgcaaagtgtgcaattcagtgatttttttttttttttttttga

SEQ ID NO: 147876 - DNA, 626 bp, Homo sapiens
  Payload ID: 9254
  Gene Symbol: LAP3
  Gene Name: leucine aminopeptidase 3
  ENST ID: ENST00000513105
  CDS Start-End: 1-626
caaaaaaagaagatggctgtgtcggcaaagctctatggaagtggggatcaggaggcctggcagaaaggagtcctgtttgcttctgggcagaacttggcacgccaattgatggagacgccagccaatgagatgacgccaaccagatttgctgaaattattgagaagaatctcaaaagtgctagtagtaaaaccgaggtccatatcagacccaagtcttggattgaggaacaggcaatgggatcattcctcagtgtggccaaaggatctgacgagcccccagtcttcttggaaattcactacaaaggcagccccaatgcaaacgaaccacccctggtgtttgttgggaaaggaattacctttgacagtggtggtatctccatcaaggcttctgcaaatatggacctcatgagggctgacatgggaggagctgcaactatatgctcagccatcgtgtctgctgcaaagcttaatttgcccattaatattataggtgccatggatgtagctttgggatcaggtgccactggggtctttaccaattcatcctggctctggaacaaactcttcgaggccagcattgaaacaggggaccgtgtctggaggatgcctctcttcgaacattatac

SEQ ID NO: 147877 - DNA, 1876 bp, Homo sapiens
  Payload ID: 9254
  Gene Symbol: LAP3
  Gene Name: leucine aminopeptidase 3
  Uniprot ID: P28838
  ENST ID: ENST00000606142
  CDS Start-End: 65-1531
gcgagtagtcgtccgacgtctggccgtgagacgtttcgggagccggagtctctccaccgcagacatgacgaagggccttgttttaggaatctattccaaagaaaaagaagatgatgtgccacagttcacaagtgcaggagagaattttgataaattgttagctggaaagctgagagagactttgaacatatctggaccacctctgaaggcagggaagactcgaaccttttatggtctgcatcaggacttccccagcgtggtgctagttggcctcggcaaaaaggcagctggaatcgacgaacaggaaaactggcatgaaggcaaagaaaacatcagagctgctgttgcagcggggtgcaggcagattcaagacctggagctctcgtctgtggaggtggatccctgtggagacgctcaggctgctgcggagggagcggtgcttggtctctatgaatacgatgacctaaagcaaaaaaagaagatggctgtgtcggcaaagctctatggaagtggggatcaggaggcctggcagaaaggagtcctgtttgcttctgggcagaacttggcacgccaattgatggagacgccagccaatgagatgacgccaaccagatttgctgaaattattgagaagaatctcaaaagtgctagtagtaaaaccgaggtccatatcagacccaagtcttggattgaggaacaggcaatgggatcattcctcagtgtggccaaaggatctgacgagcccccagtcttcttggaaattcactacaaaggcagccccaatgcaaacgaaccacccctggtgtttgttgggaaaggaattacctttgacagtggtggtatctccatcaaggcttctgcaaatatggacctcatgagggctgacatgggaggagctgcaactatatgctcagccatcgtgtctgctgcaaagcttaatttgcccattaatattataggtctggcccctctttgtgaaaatatgcccagcggcaaggccaacaagccgggggatgttgttagagccaaaaacgggaagaccatccaggttgataacactgatgctgaggggaggctcatactggctgatgcgctctgttacgcacacacgtttaacccgaaggtcatcctcaatgccgccaccttaacaggtgccatggatgtagctttgggatcaggtgccactggggtctttaccaattcatcctggctctggaacaaactcttcgaggccagcattgaaacaggggaccgtgtctggaggatgcctctcttcgaacattatacaagacaggttgtagattgccagcttgctgatgttaacaacattggaaaatacagatctgcaggagcatgtacagctgcagcattcctgaaagaattcgtaactcatcctaagtgggcacatttagacatagcaggcgtgatgaccaacaaagatgaagttccctatctacggaaaggcatgactgggaggcccacaaggactctcattgagttcttacttcgtttcagtcaagacaatgcttagttcagatactcaaaaatgtcttcactctgtcttaaattggacagttgaacttaaaaggtttttgaataaatggatgaaaatcttttaacggagacaaaggatggtatttaaaaatgtagaacacaatgaaatttgtatgccttgatttttttttcatttcacacaaagatttataaaggtaaagttaatatcttacttgataaggatttttaagatactctataaatgattaaaatttttagaacttcctaatcacttttcagagtatatgtttttcattgagaagcaaaattgtaactcagatttgtgatgctaggaacatgagcaaactgaaaattactatgc

SEQ ID NO: 147878 - DNA, 2100 bp, Homo sapiens
  Payload ID: 9254
  Gene Symbol: LAP3
  Gene Name: leucine aminopeptidase 3
  Uniprot ID: P28838
  ENST ID: ENST00000618908
  CDS Start-End: 163-1722
ctgcccatccgtcccgccccctagacgcacgtccgctcgcccggcgcccgagccagtccgcgcgcacgccgtctgcgccccgaaagccccgccccaaggcgcgcccgcccaccgctctccacgtgctcgctggagggcggtgcgaggggccgagccgacaagatgttcttgctgcctcttccggctgcggggcgagtagtcgtccgacgtctggccgtgagacgtttcgggagccggagtctctccaccgcagacatgacgaagggccttgttttaggaatctattccaaagaaaaagaagatgatgtgccacagttcacaagtgcaggagagaattttgataaattgttagctggaaagctgagagagactttgaacatatctggaccacctctgaaggcagggaagactcgaaccttttatggtctgcatcaggacttccccagcgtggtgctagttggcctcggcaaaaaggcagctggaatcgacgaacaggaaaactggcatgaaggcaaagaaaacatcagagctgctgttgcagcggggtgcaggcagattcaagacctggagctctcgtctgtggaggtggatccctgtggagacgctcaggctgctgcggagggagcggtgcttggtctctatgaatacgatgacctaaagcaaaaaaagaagatggctgtgtcggcaaagctctatggaagtggggatcaggaggcctggcagaaaggagtcctgtttgcttctgggcagaacttggcacgccaattgatggagacgccagccaatgagatgacgccaaccagatttgctgaaattattgagaagaatctcaaaagtgctagtagtaaaaccgaggtccatatcagacccaagtcttggattgaggaacaggcaatgggatcattcctcagtgtggccaaaggatctgacgagcccccagtcttcttggaaattcactacaaaggcagccccaatgcaaacgaaccacccctggtgtttgttgggaaaggaattacctttgacagtggtggtatctccatcaaggcttctgcaaatatggacctcatgagggctgacatgggaggagctgcaactatatgctcagccatcgtgtctgctgcaaagcttaatttgcccattaatattataggtctggcccctctttgtgaaaatatgcccagcggcaaggccaacaagccgggggatgttgttagagccaaaaacgggaagaccatccaggttgataacactgatgctgaggggaggctcatactggctgatgcgctctgttacgcacacacgtttaacccgaaggtcatcctcaatgccgccaccttaacaggtgccatggatgtagctttgggatcaggtgccactggggtctttaccaattcatcctggctctggaacaaactcttcgaggccagcattgaaacaggggaccgtgtctggaggatgcctctcttcgaacattatacaagacaggttgtagattgccagcttgctgatgttaacaacattggaaaatacagatctgcaggagcatgtacagctgcagcattcctgaaagaattcgtaactcatcctaagtgggcacatttagacatagcaggcgtgatgaccaacaaagatgaagttccctatctacggaaaggcatgactgggaggcccacaaggactctcattgagttcttacttcgtttcagtcaagacaatgcttagttcagatactcaaaaatgtcttcactctgtcttaaattggacagttgaacttaaaaggtttttgaataaatggatgaaaatcttttaacggagacaaaggatggtatttaaaaatgtagaacacaatgaaatttgtatgccttgatttttttttcatttcacacaaagatttataaaggtaaagttaatatcttacttgataaggatttttaagatactctataaatgattaaaatttttagaacttcctaatcacttttcagagtatatgtttttcattgagaagcaaaattgtaactcagatttgtgatgctaggaacatgagcaaactgaaaattactatgcacttgtcagaaacaataaatgcaacttgttgtg

SEQ ID NO: 147879 - DNA, 1529 bp, Homo sapiens
  Payload ID: 9255
  Gene Symbol: LCMT1
  Gene Name: leucine carboxyl methyltransferase 1
  ENST ID: ENST00000380962
  CDS Start-End: 154-459
gcgtgggcggcgtcactgagccgcgccagctgagccaggtagggccctaccctcttctgttgctttctccctgtggctcgcgccgtcccccgccgcccgtcgaccccgcttccatgtccctggcggacacagctcccaggaacctccacgcccatggccactaggcagagggaatcctctatcacctcctgctgttccacctcgagctgcgacgcagacgacgagggcgtgcgcggcacctgcgaagatgcttccctgtgcaagagaactgccatcagcagcgcccgacagcactctcctcctcactgcccaacactgggtggcaaatcttttcatcttggccactctgataggctggacagtgaggtccttcttcctagggcgcatggaaacctgttgcagtcacctgggtttgcggagtgggaggaggtttgcagtaagcattggctactggcatgacccttacatacagcactttgtgagactgtctaaagagaggaaagcccctgaaatcaacagaggatattttgctcgagtccatggtgtcagtcagcttataaaggcatttctacggaagacagaatgtcattgtcaaattgtcaaccttggggcaggcatggataccaccttctggagattaaaggatgaagatcttctcccaagtaaatattttgaggttgactttccaatgattgtcacgagaaagctgcacagtatcaaatgcaagcctcccctatccagccccattctagaactgcattcagaggacacacttcagatggatggacacatactggattcaaagagatatgccgttattggagcagatctccgagacctgtctgaactggaagagaagctaaagaaatgtaacatgaatacacaattgccaacactcctgatagctgaatgtgtgctggtttacatgactccagagcagtccgcaaacctcctgaagtgggcagccaacagttttgagagagccatgttcataaactacgaacaggtgaacatgggtgatcggtttgggcagatcatgattgaaaacctgcggagacgccagtgtgacctggcgggagtggagacctgcaagtcattagagtcacagaaagaacggctcctgtcgaatgggtgggaaacagcatcggccgtcgacatgatggagttgtacaacaggttacctcgagctgaagtgagcaggatagaatcacttgaattcctggatgaaatggagctgctggagcagctcatgcggcattactgcctttgctgggcaaccaaaggaggaaatgagcttgggctgaaggagataacttattaatctgtcgaaggcttatgccgagccagaagccgaagccacttgccctcctggaggagacctgcaagctccctgagcggtgggcgggcctcgtccgcaggtctcatcccacactcttgagaagccttggtcactacagtggtcgcacatgttcctcttcctgttcctgttgacatgtcgttgtttaaataaatctcacttgccaccagtc

SEQ ID NO: 147880 - DNA, 989 bp, Homo sapiens
  Payload ID: 9255
  Gene Symbol: LCMT1
  Gene Name: leucine carboxyl methyltransferase 1
  Uniprot ID: Q9UIC8
  ENST ID: ENST00000380966
  CDS Start-End: 150-989
gggcggcgtcactgagccgcgccagctgagccaggtagggccctaccctcttctgttgctttctccctgtggctcgcgccgtcccccgccgcccgtcgaccccgcttccatgtccctggcggacacagctcccaggaacctccacgcccatggccactaggcagagggaatcctctatcacctcctgctgttccacctcgagctgcgacgcagacgacgagggcgtgcgcggcacctgcgaagatgcttccctgtgcaagaggtttgcagtaagcattggctactggcatgacccttacatacagcactttgtgagactgtctaaagagaggaaagcccctgaaatcaacagaggatattttgctcgagtccatggtgtcagtcagcttataaaggcatttctacggaagacagaatgtcattgtcaaattgtcaaccttggggcaggcatggataccaccttctggagattaaaggatgaagatcttctcccaagtaaatattttgaggttgactttccaatgattgtcacgagaaagctgcacagtatcaaattgccaacactcctgatagctgaatgtgtgctggtttacatgactccagagcagtccgcaaacctcctgaagtgggcagccaacagttttgagagagccatgttcataaactacgaacaggtgaacatgggtgatcggtttgggcagatcatgattgaaaacctgcggagacgccagtgtgacctggcgggagtggagacctgcaagtcattagagtcacagaaagaacggctcctgtcgaatgggtgggaaacagcatcggccgtcgacatgatggagttgtacaacaggttacctcgagctgaagtgagcaggatagaatcacttgaattcctggatgaaatggagctgctggagcagctcatgcggcattactgcctttgctgggcaaccaaaggaggaaatgagcttgggctgaaggagataacttattaa

SEQ ID NO: 147881 - DNA, 1368 bp, Homo sapiens
  Payload ID: 9255
  Gene Symbol: LCMT1
  Gene Name: leucine carboxyl methyltransferase 1
  Uniprot ID: Q9UIC8
  ENST ID: ENST00000399069
  CDS Start-End: 156-1160
cggcgtgggcggcgtcactgagccgcgccagctgagccaggtagggccctaccctcttctgttgctttctccctgtggctcgcgccgtcccccgccgcccgtcgaccccgcttccatgtccctggcggacacagctcccaggaacctccacgcccatggccactaggcagagggaatcctctatcacctcctgctgttccacctcgagctgcgacgcagacgacgagggcgtgcgcggcacctgcgaagatgcttccctgtgcaagaggtttgcagtaagcattggctactggcatgacccttacatacagcactttgtgagactgtctaaagagaggaaagcccctgaaatcaacagaggatattttgctcgagtccatggtgtcagtcagcttataaaggcatttctacggaagacagaatgtcattgtcaaattgtcaaccttggggcaggcatggataccaccttctggagattaaaggatgaagatcttctcccaagtaaatattttgaggttgactttccaatgattgtcacgagaaagctgcacagtatcaaatgcaagcctcccctatccagccccattctagaactgcattcagaggacacacttcagatggatggacacatactggattcaaagagatatgccgttattggagcagatctccgagacctgtctgaactggaagagaagctaaagaaatgtaacatgaatacacaattgccaacactcctgatagctgaatgtgtgctggtttacatgactccagagcagtccgcaaacctcctgaagtgggcagccaacagttttgagagagccatgttcataaactacgaacaggtgaacatgggtgatcggtttgggcagatcatgattgaaaacctgcggagacgccagtgtgacctggcgggagtggagacctgcaagtcattagagtcacagaaagaacggctcctgtcgaatgggtgggaaacagcatcggccgtcgacatgatggagttgtacaacaggttacctcgagctgaagtgagcaggatagaatcacttgaattcctggatgaaatggagctgctggagcagctcatgcggcattactgcctttgctgggcaaccaaaggaggaaatgagcttgggctgaaggagataacttattaatctgtcgaaggcttatgccgagccagaagccgaagccacttgccctcctggaggagacctgcaagctccctgagcggtgggcgggcctcgtccgcaggtctcatcccacactcttgagaagccttggtcactacagtggtcgcacatgttcctcttcctgttcctgttgacatgtcgttgtttaaataaatctcacttgccaccagtc

SEQ ID NO: 147882 - DNA, 1168 bp, Homo sapiens
  Payload ID: 9255
  Gene Symbol: LCMT1
  Gene Name: leucine carboxyl methyltransferase 1
  ENST ID: ENST00000564011
  CDS Start-End: 150-485
gggcggcgtcactgagccgcgccagctgagccaggtagggccctaccctcttctgttgctttctccctgtggctcgcgccgtcccccgccgcccgtcgaccccgcttccatgtccctggcggacacagctcccaggaacctccacgcccatggccactaggcagagggaatcctctatcacctcctgctgttccacctcgagctgcgacgcagacgacgagggcgtgcgcggcacctgcgaagatgcttccctgtgcaagaggtttgcagtaagcattggctactggcatgacccttacatacagcactttgtgagactgtctaaagagaggaaagcccctgaaatcaacagaggcaagatattttgctcgagtccatggtgtcagtcagcttataaaggcatttctacggaagacagaatgtcattgtcaaattgtcaaccttggggcaggcatggataccaccttctggagattaaaggatgaagatcttctcccaagtaaatattttgaggttgactttccaatgattgtcacgagaaagctgcacagtatcaaattgccaacactcctgatagctgaatgtgtgctggtttacatgactccagagcagtccgcaaacctcctgaagtgggcagccaacagttttgagagagccatgttcataaactacgaacaggtgaacatgggtgatcggtttgggcagatcatgattgaaaacctgcggagacgccagtgtgacctggcgggagtggagacctgcaagtcattagagtcacagaaagaacggctcctgtcgaatgggtgggaaacagcatcggccgtcgacatgatggagttgtacaacaggttacctcgagctgaagtgagcaggatagaatcacttgaattcctggatgaaatggagctgctggagcagctcatgcggcattactgcctttgctgggcaaccaaaggaggaaatgagcttgggctgaaggagataacttattaatctgtcgaaggcttatgccgagccagaagccgaagccacttgccctcctggaggagacctgcaagctccctgagcggtgggcgggcctcgtccgcaggtctcatcccacactcttgagaagccttggtcactacagtggtcgcacatgttcctcttcctgttcctgttgacatgt

SEQ ID NO: 147883 - DNA, 555 bp, Homo sapiens
  Payload ID: 9255
  Gene Symbol: LCMT1
  Gene Name: leucine carboxyl methyltransferase 1
  ENST ID: ENST00000572761
  CDS Start-End: 1-280
attgccaacactcctgatagctgaatgtgtgctggtttacatgactccagagcagtccgcaaacctcctgaagtgggcagccaacagttttgagagagccatgttcataaactacgaacaggtgaacatgggtgatcggtttgggcagatcatgattgaaaacctgcggagacgccagtgtgacctggcgggagtggagacctgcaagtcattagagtcacaggtcagagagcagggactgggatatccatttggacccttagtcaaccaagatatataaaggtctttctttgcagatgtgatcatggagaagccctgttcagtgcctgtcagcagcacaggctgctgagcctccatgtgggccgctagttcatgatgctgggaagaccaagtcctgcttcaccatcacatttcctacaccctattattttgactttgtattacgcaaattttcaaacaaacataaaggtagagggaatggtgaaataaacacacacgtctcatcacctaacttcagtatttcttatattatcagtgttatttcctatattcccc

SEQ ID NO: 147884 - DNA, 612 bp, Homo sapiens
  Payload ID: 9255
  Gene Symbol: LCMT1
  Gene Name: leucine carboxyl methyltransferase 1
  ENST ID: ENST00000570981
  CDS Start-End: 1-360
tcgagctgcgacgcagacgacgagggcgtgcgcggcacctgcgaagatgcttccctgtgcaagaggtttgcagtaagcattggctactggcatgacccttacatacagcactttgtgagactgtctaaagagaggaaagcccctgaaatcaacagaggatattttgctcgagtccatggtgtcagtcagcttataaaggcatttctacggaagacagaatgtcattgtcaaattgtcaaccttggggcaggcatggataccaccttctggagattaaaggatgaagatcttctcccaagtaaatattttgaggttgactttccaatgattgtcacgagaaagctgcacagtatcaagtaagtgtggcatggccagaagaacaaaagccagcgagaattcagatccagctctcaagagatggcagatctgaatgccagagacttcactttagggtgttgccttccgttcactgccccccaccaactttttttttgccctggcactcattccagcatgttctacagtctgcaaaatgcaatatacatttccttattacagatcacaggctctatggctccccatgtaattacaattaacacgaggccaaccaaa

SEQ ID NO: 147885 - DNA, 640 bp, Homo sapiens
  Payload ID: 9255
  Gene Symbol: LCMT1
  Gene Name: leucine carboxyl methyltransferase 1
  ENST ID: ENST00000576625
  CDS Start-End: 1-475
agatcttctcccaagtaaatattttgaggttgactttccaatgattgtcacgagaaagctgcacagtatcaaatgcaagcctcccctatccagccccattctagaactgcattcagaggacacacttcagatggatggacacatactggattcaaagagatatgccgttattggagcagatctccgagacctgtctgaactggaagagaagctaaagaaatgtaacatgaatacacaattgccaacactcctgatagctgaatgtgtgctggtttacatgactccagagcagtccgcaaacctcctgaagtgggcagccaacagttttgagagagccatgttcataaactacgaacaggtgaacatgggtgatcggtttgggcagatcatgattgaaaacctgcggagacgccagtgtgacctggcgggagtggagacctgcaagtcattagagtcacaggatagaatcacttgaattcctggatgaaatggagctgctggagcagctcatgcggcattactgcctttgctgggcaaccaaaggaggaaatgagcttgggctgaaggagataacttattaatctgtcgaaggcttatgccgagccagaagccgaagccacttgccctcctggaggagacc

SEQ ID NO: 147886 - DNA, 449 bp, Homo sapiens
  Payload ID: 9255
  Gene Symbol: LCMT1
  Gene Name: leucine carboxyl methyltransferase 1
  ENST ID: ENST00000575396
  CDS Start-End: 1-416
agagagccatgttcataaactacgaacaggtgaacatgggtgatcggtttgggcagatcatgattgaaaacctgcggagacgccagtgtgacctggcgggagtggagacctgcaagtcattagagtcacagaaagaacggctcctgtcgaatgggtgggaaacagcatcggccgtcgacatgatggagttgtacaacaggttacctcgagctgaagtgagcagggctgaaggagataacttattaatctgtcgaaggcttatgccgagccagaagccgaagccacttgccctcctggaggagacctgcaagctccctgagcggtgggcgggcctcgtccgcaggtctcatcccacactcttgagaagccttggtcactacagtggtcgcacatgttcctcttcctgttcctgttgacatgtcgttgtttaaataaatctcacttgccac

SEQ ID NO: 147887 - DNA, 6957 bp, Homo sapiens
  Payload ID: 9256
  Gene Symbol: LCMT2
  Gene Name: leucine carboxyl methyltransferase 2
  Uniprot ID: O60294
  ENST ID: ENST00000305641
  CDS Start-End: 117-2177
gggaagtccaggagcatgggtggtttttttccccctaccgaggtccgtgaggtgtgtgctaaccaaggggcggctcacaaccgtgacagactgccattcctgagtctcttctggccatgggcccccggagccgtgagcgtcgggcaggcgcggtacagaacaccaacgacagcagcgccctcagcaagcgttccctggccgcgcgcgggtacgtgcaggacccctttgccgcgttgctggttccgggcgcggcgcgccgcgcaccgctcattcaccgaggctactacgtccgcgcacgcgccgtgaggcactgcgtgcgcgcttttttggagcagattggcgcgccccaggccgcgcttcgcgcgcagatcttgtctctcggcgctggcttcgactcgctctattttcgcttaaaaaccgcgggccgcctggcccgggctgcagtctgggaggtggattttccggacgtggcgcggcgcaaagcagaaaggattggagagacgccagagctgtgcgcgttaaccgggcctttcgagaggggggagcccgcgtccgcgctgtgctttgagagcgcagactactgcatcctgggtctggacttgcggcagctccagcgagtggaggaggccctgggcgccgcggggctcgacgcagcctcacccactctgctcctggccgaggcggtgctgacctacctcgagccggagagtgccgcggccctcatcgcctgggcagcccagcgttttcctaatgcccttttcgtggtctatgagcagatgaggcctcaagacgcctttggccagttcatgctgcaacattttcggcagctaaactcccccctgcatggcctggagcgttttcctgacgtggaggcgcagcggcgccgcttccttcaagctggctggaccgcctgcggtgccgtggacatgaatgaattctatcactgctttcttcccgcagaagaacgccggcgggtggaaaatattgaaccctttgacgaatttgaggagtggcatctgaagtgcgcccattatttcattctggcagcttctaggggagacaccctctcccacaccctagtgtttccatcctcagaggcatttcctcgcgtaaatcctgcttcgccttcaggggtattccctgccagcgtagtcagtagcgagggccaggtcccaaacctgaagagatatggccacgcctctgtcttcttgagcccagacgttattctcagtgcaggaggatttggagagcaggaggggcggcactgccgagtgagccagtttcacttgctctcaagagattgtgactctgaatggaaaggcagccaaataggcagttgtgggactggagttcagtgggatggacgcctttatcacaccatgacaagactctcagagagtcgggttctggttctgggagggagactgtccccagtaagtccagccttgggggttctccagcttcatttttttaagagtgaggataataacactgaggacctgaaagtgacaataacaaaggctggccgaaaggatgattccactttgtgttgttggcggcattcaacaacagaagtgtcctgtcagaatcaggaatatttgtttgtgtatgggggtcgaagcgtggtggaacctgtactaagtgactggcatttcctccatgtagggacaatggcttgggtcaggatcccagtggagggagaagtacctgaagcccggcattctcacagtgcctgcacttggcaagggggagcccttattgctggaggtctcggggcttctgaggagccattgaactctgtgctctttctgagaccaatctcttgtggattcctctgggagtcagtagacatccagcctcccattaccccaaggtactcccacacagctcatgtgctcaatggaaagctgttactggttggagggatctggattcattcctcctcatttcctggagtgactgtgatcaatttgactacaggattgagctctgagtatcagattgacacaacatatgtgccatggccattaatgttacacaaccatactagtatccttcttcctgaagagcaacagctcctgctccttggaggtggtgggaactgcttttcctttggtacctacttcaacccccatacagtcacattagacctttcttccttaagtgctgggcagtaaggactggactaatattcaggacccactaaagtagacaataaagttttccacaaataggatgaccctctagctatagatactgccactcctcctttccccatcctttttttcccttagcactattcagtgcaaaaagtgaaaaaggttggtaaaataggtaaaatacctagaaacaatcactacagaaaacagctgaagacagtggccatgcagtccgagaggagtagtggtctgcctctaattttctaatctaagttcgtttattgagttacagtggtctttagtaaagtaaaacaatttcccaatcccaggccttgtgatttgagatggtaccttagaaaaagttacacgcagttccgtggttgaatatatttgagatggtaccttagaaaaagtttcacgcagatccttggttgaatatagttgagggagcgtagtattgacaattcttcatgtaggaaacctgaaatgaacacagtcacagtttgattaaaacattgtcctgtttgttgcaacagaaaactcggatagttttaacaacaggaaacacttgtaggacttcctttaccaacatactttttaaatgttttgctattggttccatatttatttagatttataagtgtcaataaagcaaacttttgatgcctcaattcattttgcacggggtataataatgttttgttccagatatactctccacctttcactgttctgtgctccaagaggctgacctttatgggctgcatcaaggagctctctttactttttggttgagttccaccagtcagaggcaccagaggggaatgggggcaaaaagaagagtgagagtgagttggtatttattcccaattcttcccctgttggtttgcaagttggcagtggcagcattcttctgtcaaaggctacagctcctgccgtgtaatcctttcctgaagacagagttctaattctgcatcatcccaggtttcagtaattgttcctttacttcaccttttcaggcctaggagttgtgatggctctttgctagacctgaactgtactgtccaatgtggtagctattgacaacatgtgactatttaaacgaattaataaattcagtggcttagtcacattgaccacattttaagtgcttaataactatgtgtggctttggctactgtattagacaatgtagatgtagaacatttcatcgttacagaaatttctactggacactgctgactggatatcttgacttggtttcccttaaccctactcagccccttatagttagcatcccattaaactcaattatcccttttaaatgggaatctgttgcctagtgagccatgtgagatcaatgaaatagctattcatccttaaaatttgagccttaatttgtcatctaaattatgcataccttgtgaaatatacacctcaaaaaatgtagtggctttggtggtaataagtgtattactttagtatttcttcttagtcctagaaaccttagtagttttcattctacaagtgcctaaatgattattatgaaccatcattgatgacaaattgcatcctttatttctattaattttgcatataaatggatgtgaaaggtgattaatataaaaaccaagtagcaaacacaaacctaagtgtatggagaggacagtcttggctctgttagatgaagcctccccgggggagaccagctgaatgagggttgtggtataggctgggcatggtggctcacgcctataattccagcactttgggaggccaagacagaaggatcacttaaagccaggagtttaagaccagcccaggcaacaaagtcagatccccatctctacaaaaaaataagtaggcacggtggtgtgtgcttgtagtcttggatactctggaggctgaggtgatagtgagctgtgattgtgccactgcactcctgcctggttgacagagtgagaccccgtctcttaaaaagaaaaaaaaaaaaggttgttgtccaacttcagctttcctgagactttgtaagagccatttctagggaaagcattggttatggctatgactgagtcctgggaaacagggcttattacagctgggaagacatctggcaaggcgatcagtgggccaggtagtagaaaactggcagggaatatgatcagcaggagaaaatggctgttctgtatttcctgtttctaagtttactacagcacaccccagctttcaggagcagataaaagcagaacactgtgatgaggccaggcgcagtggcacatgccttgatcccagcactttgggaggccaaggctggcagatcacttgaactcaggagttggagaccagcctggccaatatggtgaaactccgtctctacccaaaaaaaaaaaaaaaaaaaaaaaaaaaaaaaaattatccatctatctatatatacaaagattagccagggatggtggcgcatgcctgtagtcccagctactcaggtactgaggtgggaggattacttgagcctggcaggtcgagccaagatcatgcaactgctctccagcttgggtgacagagtgagaccctgtctctagtaataacaacactgtaatgaaatgagtgttctcagctatgtagtagagtgtaccagaattcaaacctagatctaactccaaagcccaggttacaccttccactatgatgctgcttacatcatgccatcagccattatttcattacttttggggggaaaagaagggaggagggaggtcatctagagaatgtggacgtgtgccagacctaaattaggagtgcaatagtgcctattctcttgagcactgtccattagggcgccttatgagtaacagggcttgttctcccgagagaaattacccacatttcctataagtgattaccagattaagcatgccctccacctctaactgagcatcatgctcagttaaggaattattcatctctcgagctctactcattagagcacttagaagtattgtcagcaatatttaccctgtgcctttggagcagcattcaatatagactagcgttgaaccacagtttcattaacagtaatctgcacagttggaggtgtgagccagattgagaaccaaagctggataataattcttgcttctccatttcacttttgaagtttttgttctaaaattctgatacggagctctggagtagttatgagagttaatgaacaggtctcttcctcttttagggattacttctagaccagataaactacttaaggaaggaaagtaatttcttattttgaatctccactctgggtcagggtttcaaaaatagtgtatcataatagtgaagatgaaaacaggttaagaacaactgttggaggatatgctcttcaaggccagtgctgttgcttctttttgtactttctgagttttaaaactgagtgcccgtttttcatctttctggagctttaagtcttcttaatgatctttgggagatggtatgtatccaatatgttccaggacccaggtgtttccttggtctttttcagtgatctcagaccttgaagtcctagcttattccatatgtattttgtgatcacaaacccaacctcaagcagcccatgcttaccctgggacttatcccacatgtcatctcctggaaaacagccctatatgactgccccaaatggaaccaaccgctttctccctgtgcaagagaagcctttgaagagaagctctttgaagagtttggtgaataaaagaactagttaataaggtgaggttttttgggtttgtttgtttgtttgtttgtttgtttgctttttgttttttgttttgagacggagtcttgctctgttgcccaggctagagtgcagtggctcgatctcggctcactgcaacctccacctcctgggttcaagtgattctcctgcctcggcttccggagtagctggaattacaggtgcgcaccaccatgcccggctaattttttttttatttatttttagtagagatggggtttcaccatgttggtcaggctggtatccaactcctgacctcaagtgatctgcccgcctcggcctcccaaagtgctgagattacaggcgtgagccaccatgcctggcctaggtgggtttttaaccatagggacagtccaataatgtctagtttgactttaagattaagccttttaacttcagtaatgaaggaaggggtgtaaaatagcattaagccggcaagttaggtcatgtaacttggctaatcacattagacttgatgtttaaagagagaaggagagtgtgtagagcaggaattatgaaatttataatcagctttagagtaggctgagatttccttggatgtcaataattatgagtaaacaagaattctgtcatcccacatgtaagtaagcagttacaagactgcttacttatctgtcttggacattgatagaaagcacatgattgggaaggggcagttccttgactgagggaaggaattgtgtctggttcacttttctatcaccaacatagtagatgctcaacaaatacttgttggatagaggtccactcttgtactcaaataaattatatttgaatattactatagttcttatgcacaaactgatgtcaataactcctgtaattgttgtgtatgtgtgtgtgtcagggggaggtaagcattaaaattttaaagaacccacagtttaagagtctttggaaatacattcaacttttctgacccaggtaaaggtggtagactttctggtgtcatttctatctttatggaataaacctgaaccttctccctga

SEQ ID NO: 147888 - DNA, 1545 bp, Homo sapiens
  Payload ID: 9256
  Gene Symbol: LCMT2
  Gene Name: leucine carboxyl methyltransferase 2
  ENST ID: ENST00000567039
  CDS Start-End: 94-213
tttttttccccctaccgaggtccgtgaggtgtgtgctaaccaaggggcggctcacaaccgtgacagactgccattcctgagtctcttctggccatgggcccccggagccgtgagcgtcgggcaggcgcggtacagaacaccaacgacagcagcgccctcagcaagcgttccctggccgcgcgcggaagaacgccggcgggtggaaaatattgaaccctttgacgaatttgaggagtggcatctgaagtgcgcccattatttcattctggcagcttctaggggagacaccctctcccacaccctagtgtttccatcctcagaggcatttcctcgcgtaaatcctgcttcgccttcaggggtattccctgccagcgtagtcagtagcgagggccaggtcccaaacctgaagagatatggccacgcctctgtcttcttgagcccagacgttattctcagtgcaggaggatttggagagcaggaggggcggcactgccgagtgagccagtttcacttgctctcaagagattgtgactctgaatggaaaggcagccaaataggcagttgtgggactggagttcagtgggatggacgcctttatcacaccatgacaagactctcagagagtcgggttctggttctgggagggagactgtccccagtaagtccagccttgggggttctccagcttcatttttttaagagtgaggataataacactgaggacctgaaagtgacaataacaaaggctggccgaaaggatgattccactttgtgttgttggcggcattcaacaacagaagtgtcctgtcagaatcaggaatatttgtttgtgtatgggggtcgaagcgtggtggaacctgtactaagtgactggcatttcctccatgtagggacaatggcttgggtcaggatcccagtggagggagaagtacctgaagcccggcattctcacagtgcctgcacttggcaagggggagcccttattgctggaggtctcggggcttctgaggagccattgaactctgtgctctttctgagaccaatctcttgtggattcctctgggagtcagtagacatccagcctcccattaccccaaggtactcccacacagctcatgtgctcaatggaaagctgttactggttggagggatctggattcattcctcctcatttcctggagtgactgtgatcaatttgactacaggattgagctctgagtatcagattgacacaacatatgtgccatggccattaatgttacacaaccatactagtatccttcttcctgaagagcaacagctcctgctccttggaggtggtgggaactgcttttcctttggtacctacttcaacccccatacagtcacattagacctttcttccttaagtgctgggcagtaaggactggactaatattcaggacccactaaagtagacaataaagttttccacaaataggatgaccctctagctatagatactgccactcctcctttccccatcctttttttcccttagcactattcagtgcaaaaagtgaaaaa

SEQ ID NO: 147889 - DNA, 1854 bp, Homo sapiens
  Payload ID: 9257
  Gene Symbol: LURAP1
  Gene Name: leucine rich adaptor protein 1
  Uniprot ID: Q96LR2
  ENST ID: ENST00000371980
  CDS Start-End: 94-813
ggttttgctccgctttagcagcggcgaagggaggacccccgggagccggtccccggcgtccggtcgcccagcccttttcaggcttgggcccgcatggaggggaccgtggagtcccagacgcctgacctgcgggatgtggagggtaaggtgggcaggaagacccctgaagggctgctccgcgggctgcgaggcgagtgtgagctgggaacctctggcgccctgctgctcccaggggcgtctagcaccggccacgacttgggggacaagatcatggcgctgaagatggagctggcttacctgcgagccatcgatgtgaagatcctgcagcagctggtgaccttgaatgagggcatcgaggcagtgcgctggctgttggaggagcgggggacgttgaccagtcattgcagcagcctcaccagcagtcaatatagcctgacaggcgggagcccaggccgctcaaggcgaggcagctgggacagcctgccagacaccagcaccaccgaccggctggacagtgtctctattggcagcttcctggacacagtggcccccagcgagctggatgaacagggcccacctggggctccacgttccgagatggactgggcaaaagttatagctggtggagagagggccaggactgaggtggatgtggcagccaccaggctagggagcttgagagctgtgtggaagcccccaggggagaggcttcaaggtggaccacctgagtcaccagaggatgagagtgccaagctgggcttcgaggcccactggttctgggagcagtgccaggatgatgtgaccttcttgtaacaactattccacccttttgtaatcctgtggctcttttatccattagatgtggtctcccccaaaattgattctccctcagtctgagactaggaagaggctgcactgaaatcagttaccatggaaacctggctcatcatttctctagtccctagggagtctctgcctttatccctcaattattgggtccctagagctagcttgctctttctttctttctttctttttttgagacagggtcttatgctgttacccaagatagagagcagtggcatgatcacagctcactgcagccttgacctcctgggctcaagcgatcctcctatttcagcctcccccatagttaggaccacaggcatgcaccaccatgcccagctaattgtttatttatttattttttttttgtagagatagggtttccctgtgttgcccaggctggtctcaaactcctgggctcaagggatcctcccgcctcagcctcccaaagtgctgggattatgcccagcccctagagatacttctatagagatattgactctaaaggattgacctatggcttttggtatttagtatctctcactactccccccagctaagtaaggatttaaggaatttaggactccctggagttaacagatgaagagatgggggcataattacttcacccaaagtctagaagccttggcctctctcttggccaagatggaggattgaggagggacatggaccttcaggactaaccctctatggattggccctcccagaagcgtttgggctggtagacccaccccttcctacctgctgagtgatgtcatttcctgccaggatgggtagccctttgtacgggtccttggatggtagtaggtcatataggggcatctgagcccctgctgctaagtgagatcacattatttatcgtccataccattacttcttgtgaacagtaacatgtcactcctcctggcaggaaagtttctcattgtcagatgtttgtgcttcttttcaggtcttactttttaaatagagtgttctcattttatccta

SEQ ID NO: 147890 - DNA, 1753 bp, Homo sapiens
  Payload ID: 9258
  Gene Symbol: LURAP1L
  Gene Name: leucine rich adaptor protein 1-like
  Uniprot ID: Q8IV03
  ENST ID: ENST00000319264
  CDS Start-End: 696-1382
atgacttggatcaaacagcctaaatgggaagaaggacatttttgctgcatcaaggaagccgttaaactcctgctaagctaactagctcttttttatgggtccatgcacacgaccgaactcctctttcactgaccagagattatttctgacaacccaggatatcccgaaagcttggaggcatatggctggaaaatgaaacgacccaggacatcgtttctggctgcatcattattttgtgtcgcgtagtaccagatgggcagtcagtgagcggcgcagggatgtgaacggacggttttataatgtgaaaattttcccttggtaaagctaaaacagatttaatttccctctcttttctttcactacttccccctctttattccccctctgtctgcaatatcagtgaactcaactttgcagtgaggtggccaaaaagagagagaatgaggagatcttgatcatcttagtgtcggaggagtcgcagcggactgggaactgcagctgcgaccccccgcgtcctgtgcggatttcagggctgataccgcataggcggttatggaaaggacggtacaccggagcggcggaggatagagaccctggcccccggagaggtctgctgatttcgcagcagccttcgaagccgtggctgcctttcatctgctgcgttttattactattatcgccgttccggaaaagtcatggaagacagcccgctgccagacctcagagacatcgagctgaagctggggcgcaaagtacccgagagtctagtgcgctctctccgtggggaggagccggttcccagggaaagggacagggacccctgcggggggagcggtggtggtggcggcggcggcggcggctgcagtagcagcagcagctactgcagcttccctccctccttgtcgtcctcctcttcgtcctccccaacctctggctccccacgaggtagccactctagcgccctggagaggctagaaaccaagcttcacctcctcaggcaagagatggttaacctcagagccacagacgtcaggctcatgcgccagttgcttgtaatcaatgagagcatcgagtccatcaagtggatgatcgaagaaaaagccaccattaccagcagaggcagcagcctcagtggcagcctgtgcagtttgttggagagtcagagcacctccttacgtggcagctacaacagcctacacgatggcagtgatgggctggatggcatttccgtgggaagttatctggacacgttggcggatgatgtcccaggccatcagaccccttcagacttggaccaattcagtgacagctccctcatagaggactcacaggcactacacaagcgtcctaaattggattctgaatactactgctttggctagtgacagttttttgcatgggactggtgtgcaatgaacttgtatttatccttcttctccgctgctatatttttggtgtgatttttattttaataagatgacctttttaaaagaagctgattttgaaactgcttaatggtattgctgttgctcctaatacttctcatctgagctgatttatttttctctgttacatctctattttttatttattacaatgattttctcccttcttttacagtagcacaaacaaagtagggggaaaagaataagcaataattatgtttttgcttttgttttcagagcaatgggtcagggattacaagaaaaactttgctaaattttacaataaaccaaagtctgataacagttaa

SEQ ID NO: 147891 - DNA, 910 bp, Homo sapiens
  Payload ID: 9259
  Gene Symbol: LRCOL1
  Gene Name: leucine rich colipase-like 1
  ENST ID: ENST00000622710
  CDS Start-End: 66-206
ttggcctgtctcacctctacacagaggggctgctggcgcctgacggaaaaaggtccacacacccgatggccggcccggggtggacgctgctgctactgctgctgctgctgctgctgctggggtccatggcagggtatgggccacagaagaagttgaacctgtcccataagaaacttctcaggaaacccaagtttgaaggatggtgacacaggggagccaaggagagggcaggcctttcctgagtgctgagtctgcaggccctgcccaggaacaggtgagcgagctggtgagtggtgtttcagggcatcggggagccatgcaggagacacgaggagtgccagagcaactgctgtaccatcaacagcctggccccacacacgctctgcacccctaagaccatcttcctgcagtgcctgccctggaggaagcccaatgggtacagatgctcgcacgactcagagtgccagagcagctgctgcgtccgcaacaacagcccgcaggagttgtgcacgccccaaagcgtcttcctgcagtgtgtgccctggcgcaagcccaacggcgacttctgcagcagccatcaggagtgtcacagccagtgctgcatccagctgagggagtacagccccttccgctgcattccccggaccgggatcctggcccagtgcctgcccctgtgatgtgagctcgaacctgggcgcgagggaccggcctgggccctgggatgttcacgcaggaccgcgttgcgcgggggctggttccagcggaagcttcccttacggtttgtgctgctgtttctggggctctgaaaatctgtgggaactgaaaggctgtgaccagcctggtggcgcgaagtgtctgtgagaacaaatcccaggcactggggtgtagcctgattgttaaacatcaataa

SEQ ID NO: 147892 - DNA, 778 bp, Homo sapiens
  Payload ID: 9259
  Gene Symbol: LRCOL1
  Gene Name: leucine rich colipase-like 1
  Uniprot ID: A6NCL2
  ENST ID: ENST00000376608
  CDS Start-End: 66-545
ttggcctgtctcacctctacacagaggggctgctggcgcctgacggaaaaaggtccacacacccgatggccggcccggggtggacgctgctgctactgctgctgctgctgctgctgctggggtccatggcagggtatgggccacagaagaagttgaacctgtcccataagggcatcggggagccatgcaggagacacgaggagtgccagagcaactgctgtaccatcaacagcctggccccacacacgctctgcacccctaagaccatcttcctgcagtgcctgccctggaggaagcccaatgggtacagatgctcgcacgactcagagtgccagagcagctgctgcgtccgcaacaacagcccgcaggagttgtgcacgccccaaagcgtcttcctgcagtgtgtgccctggcgcaagcccaacggcgacttctgcagcagccatcaggagtgtcacagccagtgctgcatccagctgagggagtacagccccttccgctgcattccccggaccgggatcctggcccagtgcctgcccctgtgatgtgagctcgaacctgggcgcgagggaccggcctgggccctgggatgttcacgcaggaccgcgttgcgcgggggctggttccagcggaagcttcccttacggtttgtgctgctgtttctggggctctgaaaatctgtgggaactgaaaggctgtgaccagcctggtggcgcgaagtgtctgtgagaacaaatcccaggcactggggtgtagcctgattgttaaacatcaataa

SEQ ID NO: 147893 - DNA, 921 bp, Homo sapiens
  Payload ID: 9259
  Gene Symbol: LRCOL1
  Gene Name: leucine rich colipase-like 1
  ENST ID: ENST00000545517
  CDS Start-End: 14-199
gtccacacacccgatggccggcccggggtggacgctgctgctactgctgctgctgctgctgctgctggggtccatggcagggtatgggccacagaagaagttgaacctgtcccataagccccgggcccccagcactgacctgccagaaccacggcagtctgggtttgttccagaaacttctcaggaaacccaagtttgaaggatggtgacacaggggagccaaggagagggcaggcctttcctgagtgctgagtctgcaggccctgcccaggaacaggtgagcgagctggtgagtggtgtttcagggcatcggggagccatgcaggagacacgaggagtgccagagcaactgctgtaccatcaacagcctggccccacacacgctctgcacccctaagaccatcttcctgcagtgcctgccctggaggaaggtgagcccaatgggtacagatgctcgcacgactcagagtgccagagcagctgctgcgtccgcaacaacagcccgcaggagttgtgcacgccccaaagcgtcttcctgcagtgtgtgccctggcgcaagcccaacggcgacttctgcagcagccatcaggagtgtcacagccagtgctgcatccagctgagggagtacagccccttccgctgcattccccggaccgggatcctggcccagtgcctgcccctggtaagtcccgggcgggggctcagcctccaggccctcccttggccgccacagggaagtcgcacagaaacacagcaactggaccgggaccgcggctgtgagaggtgggctctgagcacccaggcacccctgctgggagaggccggcgcttcaccgcccatctcataaggtgggggccgcagagaaggctcctgggctggcactgagcccaccaggccccgcagggcacgggtgcccggtca

SEQ ID NO: 147894 - DNA, 825 bp, Homo sapiens
  Payload ID: 9259
  Gene Symbol: LRCOL1
  Gene Name: leucine rich colipase-like 1
  ENST ID: ENST00000544018
  CDS Start-End: 89-508
gcgtctcgtctagaagctgcagcttggcctgtctcacctctacacagaggggctgctggcgcctgacggaaaaaggtccacacacccgatggccggcccggggtggacgctgctgctactgctgctgctgctgctgctgctggggtccatggcagggtatgggccacagaagaagttgaacctgtcccataagggcatcggggagccatgcaggagacacgaggagtgccagagcaactgctgtaccatcaacagcctggccccacacacgctctgcacccctaagaccatcttcctgcagtgcctgccctggaggaaggtgagcccaatgggtacagatgctcgcacgactcagagtgccagagcagctgctgcgtccgcaacaacagcccgcaggagttgtgcacgccccaaagcgtcttcctgcagtgtgtgccctggcgcaagcccaacggcgacttctgcagcagccatcaggagtgtcacagccagtgctgcatccagctgagggagtacagccccttccgctgcattccccggaccgggatcctggcccagtgcctgcccctgtgatgtgagctcgaacctgggcgcgagggaccggcctgggccctgggatgttcacgcaggaccgcgttgcgcgggggctggttccagcggaagcttcccttacggtttgtgctgctgtttctggggctctgaaaatctgtgggaactgaaaggctgtgaccagcctggtggcgcgaagtgtctgtgagaacaaatcccaggcactggggtgtagcctgattgttaaacatcaataaaggctcctggccgactgag

SEQ ID NO: 147895 - DNA, 4370 bp, Homo sapiens
  Payload ID: 9260
  Gene Symbol: LRRFIP1
  Gene Name: leucine rich repeat (in FLII) interacting protein 1
  Uniprot ID: Q32MZ4
  ENST ID: ENST00000244815
  CDS Start-End: 241-2595
ccgagcccgactcagcccgcggccacctgcgccccgcccctgtcggccgcgcccgagcccagcgccgcgagccgctccccggcgggctggctcctggccccggaagcgcgagcgttcacttagcggcgagtggctccgtctccgcggacagagcgcgcgccccctggcccggcccgcgaggggctcccggcgcggtccccgagcatttcccgccgggtggagcgggccgagcccggcaggatgaccagccccgcggccgctcaaagccgggagatcgactgtttgagcccggaagcgcagaagctggcggaagcccggctcgctgcaaaacgggcggcccgcgcggaggctcgcgagatccgcatgaaggagctggagcggcagcagaaggaggaagacagtgagcgctactctcgtagatccagaagaaacacatcggcttctgatgaagacgagcgcatgtcagtgggtagtcgtggaagcctgagggtagaagagagaccagaaaaagattttactgagaaggggtctcgtaacatgccgggcctgtctgcagccacgctggcctctctgggtgggacttcctctcggagaggcagcggagacacctccatctccatcgacaccgaggcatccatcagggaaatcaaggactctctagcagaagttgaagagaaatataagaaggctatggtttccaatgctcagctagacaatgaaaagacaaacttcatgtaccaggttgataccctaaaagatatgttgctggagcttgaagaacagctggctgaatctaggcggcagtacgaagagaaaaacaaagaatttgaaagggaaaaacacgcccacagtatactgcaatttcagtttgctgaagtcaaggaggccctgaagcaaagagaggaaatgctcgagaaacatggaataatcctaaattcagaaatagctaccaatggagagacttccgacaccctcaataatgttggataccaaggtcctaccaagatgacaaaagaagagttaaatgccctcaagtcgacaggggatgggaccctaggaagagccagtgaagtggaggtgaaaaatgaaatcgtggcgaatgtggggaaaagagaaatcttgcacaatactgagaaagaacaacacacagaggacacagtgaaggactgtgtggacatagaggtattccctgctggtgagaataccgaggaccagaaatcctctgaagacactgccccattcctaggaaccttagcaggtgctacctatgaggaacaggttcaaagccaaattcttgagagcagttctctccctgaaaacacagtacaggttgagtcaaatgaggtcatgggtgcaccagatgacaggaccagaactccccttgagccatccaactgttggagtgacttagatggtgggaaccacacagagaatgtgggagaggcagcagtgactcaggttgaagagcaggcaggcacagtggcctcgtgtcctttagggcatagtgatgacacagtttatcatgatgacaaatgtatggtagaggtcccccaagagttagagacaagcacagggcatagtttagagaaagaattcaccaaccaggaagcagctgagcccaaggaggttccagcgcacagtacagaagtaggtagggatcacaacgaagaagagggtgaagaaacaggattaagggacgagaaaccaatcaagacagaagttcctggttctccagcaggaactgagggcaactgtcaggaagcgacaggtccaagtacagtagacactcaaaatgaacccttagatatgaaagagcccgatgaagaaaagagtgaccaacagggagaggcattggactcatcgcagaagaagacaaagaacaagaaaaagaaaaacaagaagaaaaaatccccagtacccgtagaaacccttaaagatgttaaaaaagagttaacgtatcagaacacagatttaagtgaaattaaggaagaagagcaggtaaagtctactgacagaaagtcagcagtggaagcccaaaacgaggtgactgaaaatccaaaacagaaaattgcagcagaaagcagtgaaaatgttgattgtccggagaatcctaaaattaagttggatggaaaacttgaccaagaaggtgatgatgtacaaacagcagctgaggaggtactagctgatggagacacattagattttgaggatgacaccgttcaatcatcaggcccgagggctggtggtgaagaattagatgaaggtgttgcaaaagataatgctaaaatagatggtgccactcaaagcagtcctgcagaaccaaagagcgaagacgcagatcgctgcaccctgcccgaacatgaaagtccctcacaggacattagtgatgcctgtgaagcagaaagtacagagaggtgtgagatgtcagaacatccaagtcagaccgtcaggaaagctttagacagcaatagcctagagaacgatgacttgtcggcaccaggaagagagccagggcacttcaatccagaaagcagagaagataccagaggagggaatgagaagggcaaaagcaaagaagactgtaccatgtcctaagctgaggcaggcggcaggcgcggtgcacaggaagtctcagtgtgaaggggtcttttctctccactgccaatgtaagtagaatgttctaaattcatagagaggcactgtatgacaattaccaggtgctctactgctttaagttatagactgttacttgtagatttccatgtaatcattgaggttatcacccagattagaaagacatatttgttatcagtgtacgttctaattgagagcattccagtagtatcaaacaataatgtctactgtttatagtccacttaataaaaatagaggcatttactatttgccttaggctgataggaatgtgggttttcttgaccaaatatatcagcatctaattgaaatgaccaaatagcattcttagacttctgtattatgaatataattgatatttaaattaatgtcttgttcacatatgtgtactttcatatttgattttaaaatgtacattataacctgtatggtattttatttaaaggagataaacagccaaatagcaaataggtcactgaatgataagatttgcaccttagaacaataatcattttaaggataacaagtaaatgtctgaaagcatgaggggctttatttgcctttacctcatatgagtctttgatcttgaaccgatacttttggatctcattgttgatatacctgaatttactttgtaagagattttaacttcacttcatgctgatgatgtatcaaattcattttatagaaagatttaaagtttttttctggaagtgatatatgtcaaattacatttcctactgcagtatttgagcagggacagtcattttttaaatgtttttggccgggcgtggtggctcatgcctgtaatctcagtacattgggaggccaaggcaggtggatcacctgaggtcaagagttcgaggccagcctggccaacatggtgaaaccctgtctctactaaaaatacaaaaaattggccgggcgtgatggtgggcgcctgtaatcccagccactccagaggctgaggcaggagaatcgcttgaacctgcgaggcagagattgcagtgagccaagatcaagccattgtactccagcctggacaacaagagcgaaactctgtctaaaaaaaaaaaaaaaaacacacacacacacaacacaatgttttcacgcctgtaaacctagcacattgggaagccaaggtgggaggattgcttgaggccaggagttcaaggctgcagtgagctatgattgcacactgtactctagcctgggagacagagtgagacactgtctctaaaaaaaaaaaaaaaaaaaaaaaaagtttttgaaccttaaaatactttgtttgaatttctaatcatcattcaaaagagcagtaaaaaatggttacttgttcttgtacaagctactaattagactatagtaggatattttaaagagctgaatcacttttggtattttggtataaatattttcatttgttatgtcccagtatattcttactggaaaattcttgttttgatctgcctgaagaaaatatctgttttctatataaaaaaattttttaaaataattgtaaagttagatttaaaattgtaaaatataaaatcacaaaggaatgtaccttatgaatgttgttgacattttatgaaattatgtggattcatattactgttacaagatagaattgaatgcaaaaagaccaaaacctcaataaaatttgaggaaaacgtgttattatgtaattgaaataaaaacattttataattgtgcaa

SEQ ID NO: 147896 - DNA, 3709 bp, Homo sapiens
  Payload ID: 9260
  Gene Symbol: LRRFIP1
  Gene Name: leucine rich repeat (in FLII) interacting protein 1
  Uniprot ID: Q32MZ4
  ENST ID: ENST00000289175
  CDS Start-End: 312-2570
gcgtggggggcggggcgggccgtgggacgggcggaggcgcccgagtcccgcttccccggcgcccttccaccccgagcccgactcagcccgcggccacctgcgccccgcccctgtcggccgcgcccgagcccagcgccgcgagccgctccccggcgggctggctcctggccccggaagcgcgagcgttcacttagcggcgagtggctccgtctccgcggacagagcgcgcgccccctggcccggcccgcgaggggctcccggcgcggtccccgagcatttcccgccgggtggagcgggccgagcccggcaggatgaccagccccgcggccgctcaaagccgggagatcgactgtttgagcccggaagcgcagaagctggcggaagcccggctcgctgcaaaacgggcggcccgcgcggaggctcgcgagatccgcatgaaggagctggagcggcagcagaaggaggtagaagagagaccagaaaaagattttactgagaaggggtctcgtaacatgccgggcctgtctgcagccacgctggcctctctgggtgggacttcctctcggagaggcagcggagacacctccatctccatcgacaccgaggcatccatcagggaaatcaaggactctctagcagaagttgaagagaaatataagaaggctatggtttccaatgctcagctagacaatgaaaagacaaacttcatgtaccaggttgataccctaaaagatatgttgctggagcttgaagaacagctggctgaatctaggcggcagtacgaagagaaaaacaaagaatttgaaagggaaaaacacgcccacagtatactgcaatttcagtttgctgaagtcaaggaggccctgaagcaaagagaggaaatgctcgagaaacatggaataatcctaaattcagaaatagctaccaatggagagacttccgacaccctcaataatgttggataccaaggtcctaccaagatgacaaaagaagagttaaatgccctcaagtcgacaggggatgggaccctaggaagagccagtgaagtggaggtgaaaaatgaaatcgtggcgaatgtggggaaaagagaaatcttgcacaatactgagaaagaacaacacacagaggacacagtgaaggactgtgtggacatagaggtattccctgctggtgagaataccgaggaccagaaatcctctgaagacactgccccattcctaggaaccttagcaggtgctacctatgaggaacaggttcaaagccaaattcttgagagcagttctctccctgaaaacacagtacaggttgagtcaaatgaggtcatgggtgcaccagatgacaggaccagaactccccttgagccatccaactgttggagtgacttagatggtgggaaccacacagagaatgtgggagaggcagcagtgactcaggttgaagagcaggcaggcacagtggcctcgtgtcctttagggcatagtgatgacacagtttatcatgatgacaaatgtatggtagaggtcccccaagagttagagacaagcacagggcatagtttagagaaagaattcaccaaccaggaagcagctgagcccaaggaggttccagcgcacagtacagaagtaggtagggatcacaacgaagaagagggtgaagaaacaggattaagggacgagaaaccaatcaagacagaagttcctggttctccagcaggaactgagggcaactgtcaggaagcgacaggtccaagtacagtagacactcaaaatgaacccttagatatgaaagagcccgatgaagaaaagagtgaccaacagggagaggcattggactcatcgcagaagaagacaaagaacaagaaaaagaaaaacaagaagaaaaaatccccagtacccgtagaaacccttaaagatgttaaaaaagagttaacgtatcagaacacagatttaagtgaaattaaggaagaagagcaggtaaagtctactgacagaaagtcagcagtggaagcccaaaacgaggtgactgaaaatccaaaacagaaaattgcagcagaaagcagtgaaaatgttgattgtccggagaatcctaaaattaagttggatggaaaacttgaccaagaaggtgatgatgtacaaacagcagctgaggaggtactagctgatggagacacattagattttgaggatgacaccgttcaatcatcaggcccgagggctggtggtgaagaattagatgaaggtgttgcaaaagataatgctaaaatagatggtgccactcaaagcagtcctgcagaaccaaagagcgaagacgcagatcgctgcaccctgcccgaacatgaaagtccctcacaggacattagtgatgcctgtgaagcagaaagtacagagaggtgtgagatgtcagaacatccaagtcagaccgtcaggaaagctttagacagcaatagcctagagaacgatgacttgtcggcaccaggaagagagccagggcacttcaatccagaaagcagagaagataccagaggagggaatgagaagggcaaaagcaaagaagactgtaccatgtcctaagctgaggcaggcggcaggcgcggtgcacaggaagtctcagtgtgaaggggtcttttctctccactgccaatgtaagtagaatgttctaaattcatagagaggcactgtatgacaattaccaggtgctctactgctttaagttatagactgttacttgtagatttccatgtaatcattgaggttatcacccagattagaaagacatatttgttatcagtgtacgttctaattgagagcattccagtagtatcaaacaataatgtctactgtttatagtccacttaataaaaatagaggcatttactatttgccttaggctgataggaatgtgggttttcttgaccaaatatatcagcatctaattgaaatgaccaaatagcattcttagacttctgtattatgaatataattgatatttaaattaatgtcttgttcacatatgtgtactttcatatttgattttaaaatgtacattataacctgtatggtattttatttaaaggagataaacagccaaatagcaaataggtcactgaatgataagatttgcaccttagaacaataatcattttaaggataacaagtaaatgtctgaaagcatgaggggctttatttgcctttacctcatatgagtctttgatcttgaaccgatacttttggatctcattgttgatatacctgaatttactttgtaagagattttaacttcacttcatgctgatgatgtatcaaattcattttatagaaagatttaaagtttttttctggaagtgatatatgtcaaattacatttcctactgcagtatttgagcagggacagtcattttttaaatgtttttggccgggcgtggtggctcatgcctgtaatctcagtacattgggaggccaaggcaggtggatcacctgaggtcaagagttcgaggccagcctggccaacatggtgaaaccctgtctctactaaaaatacaaaaaattggccgggcgtgatggtgggcgcctgtaatcccagccactccagaggctgaggcaggagaatcgcttgaacctgcgaggcagagattgcagtgagccaagatcaagccattgtactccagcctggacaacaagagcgaaactctgtctaaaaaaaaaaaaaaaaa

SEQ ID NO: 147897 - DNA, 2775 bp, Homo sapiens
  Payload ID: 9260
  Gene Symbol: LRRFIP1
  Gene Name: leucine rich repeat (in FLII) interacting protein 1
  Uniprot ID: Q32MZ4
  ENST ID: ENST00000308482
  CDS Start-End: 70-1992
ggggccgggccggggcggcgcgagcggctggagcaacgggccccgcggcagctgcgggcgacgcggtcgatggacatgggcacccagggatcggggcgcaagcggctccccaaccgggagcggctcacggcggaggacgacgcgctcaaccagatcgcgcgggaggcggaagcccggctcgctgcaaaacgggcggcccgcgcggaggctcgcgagatccgcatgaaggagctggagcggcagcagaaggagatctatcaggtccaaaagaaatattatgggctggatacaaaatggggtgacatcgagcagtggatggaagacagtgagcgctactctcgtagatccagaagaaacacatcggcttctgatgaagacgagcgcatgtcagtgggtagtcgtggaagcctgaggtcgcagcctgacttggagtatgggggtccttacgcctggacaaatggttatgatggagaattgtatggatcacagtccctgaatagaagatctggcaggccctcctgtctgtacagcgctgcccggccttcggggagttaccgggcgtctgtgttggatgaaggcagcttcggtgggacccgacggggcagcacctccggctcccgtgctccctcggagtacagcggccacctcaactccagctcccgcgcctcctccagggccagctcggcccgggccagccctgtggtagaagagagaccagaaaaagattttactgagaaggggtctcgtaacatgccgggcctgtctgcagccacgctggcctctctgggtgggacttcctctcggagaggcagcggagacacctccatctccatcgacaccgaggcatccatcagggaaatcaaggaactcaatgagttaaaggaccagattcaggatgtagaaggcaaatacatgcagggattgaaagagatgaaggactctctagcagaagttgaagagaaatataagaaggctatggtttccaatgctcagctagacaatgaaaagacaaacttcatgtaccaggttgataccctaaaagatatgttgctggagcttgaagaacagctggctgaatctaggcggcagtacgaagagaaaaacaaagaatttgaaagggaaaaacacgcccacagtatactgcaatttcagtttgctgaagtcaaggaggccctgaagcaaagagaggaaatgctcgaggaaatccgacagctacagcagaaacaggcgagttctatcagggagatttctgatcttcaggaaacaatagagtggaaagacaaaaagataggggcattagagaggcagaaagagttctttgattccgtaaggagtgaacgggatgatcttagagaagaagtagtcatgctgaaagaggaattaaagaaacatggaataatcctaaattcagaaatagctaccaatggagagacttccgacaccctcaataatgttggataccaaggtcctaccaagatgacaaaagaagagttaaatgccctcaagtcgacaggggatgggaccctagatattaggttgaaaaagctggttgatgaacgggaatgcttattggaacagattaagaaactcaaagggcagctggaggagagacagaagattggcaaactagacaatcttcgatctgaagatgatgtcttggaaaacgggacagacatgcatgtaatggacctacaaagggatgccaacagacagatcagcgacctcaaatttaaacttgcaaaatctgagcaagagataactgcattagaacaaaatgtaataaggttagagagtcaagtatcacgttacaaatcagcggctgaaaatgcagaaaaaatagaagatgaacttaaggcagaaaaacggaaactccaaagagagctccgctctgcattggataaaacagaagagctcgaggtgagcaacggccacttagtgaagcgtctggaaaaaatgaaagcaaatcggagtgcactcttgtcccagcagtaaattccagctctgatcaggcaactggttggtgactggagagcattgtttcataggcttttctctgtcctatctgggagcgctgcttcttcccctgccttccgagagacgaagaccgtggcgagcttggcgcttaggggctcccgtgccatggctcaccccagggagccccagcagccaccaggtgcctctgtctgcagacccctggcccgggctggcgccgacgctcagaacctgcaggtacttcataagcacacaggggcctcgagggagctctgtgtctgaccgcacagcagcctctgaatgccgctggaagtgatgatcaaagtaaagattcagttgggacttgagttttttttttttttcatgtgtcttgctgaagattaaggggaaatgttacagtgttgggacttcctttcatggcagaatctacaatttgagcgacttcagtagtatctcttagtctacgcttttcatacacaaaacactgtggaaccacaagccattaccaagcaaaactctttcactggaaacaagggggcagtctagaagtaaaagtgaccttaagaagactctttacaggcaacaaatgaagcttttctaagggatttttgcatcagttcagtcataagaatacttttttccagggtaattaggcaatagcttcactgaaaatgacagcttttcattgcattatttaatccttatatttggaattgaagtcgttaacttcttttaaagaatgtactattagaaaaattaaaaatgaaatgttgagagacttca

SEQ ID NO: 147898 - DNA, 3365 bp, Homo sapiens
  Payload ID: 9260
  Gene Symbol: LRRFIP1
  Gene Name: leucine rich repeat (in FLII) interacting protein 1
  Uniprot ID: Q32MZ4
  ENST ID: ENST00000392000
  CDS Start-End: 118-2544
cggcgagtggctccgtctccgcggacagagcgcgcgccccctggcccggcccgcgaggggctcccggcgcggtccccgagcatttcccgccgggtggagcgggccgagcccggcaggatgaccagccccgcggccgctcaaagccgggagatcgactgtttgagcccggaagcgcagaagctggcggaagcccggctcgctgcaaaacgggcggcccgcgcggaggctcgcgagatccgcatgaaggagctggagcggcagcagaaggaggaagacagtgagcgctactctcgtagatccagaagaaacacatcggcttctgatgaagacgagcgcatgtcagtgggtagtcgtggaagcctgagggtagaagagagaccagaaaaagattttactgagaaggggtctcgtaacatgccgggcctgtctgcagccacgctggcctctctgggtgggacttcctctcggagaggcagcggagacacctccatctccatcgacaccgaggcatccatcagggaaatcaaggaactcaatgagttaaaggaccagattcaggatgtagaaggcaaatacatgcagggattgaaagagatgaaggactctctagcagaagttgaagagaaatataagaaggctatggtttccaatgctcagctagacaatgaaaagacaaacttcatgtaccaggttgataccctaaaagatatgttgctggagcttgaagaacagctggctgaatctaggcggcagtacgaagagaaaaacaaagaatttgaaagggaaaaacacgcccacagtatactgcaatttcagtttgctgaagtcaaggaggccctgaagcaaagagaggaaatgctcgagaaacatggaataatcctaaattcagaaatagctaccaatggagagacttccgacaccctcaataatgttggataccaaggtcctaccaagatgacaaaagaagagttaaatgccctcaagtcgacaggggatgggaccctaggaagagccagtgaagtggaggtgaaaaatgaaatcgtggcgaatgtggggaaaagagaaatcttgcacaatactgagaaagaacaacacacagaggacacagtgaaggactgtgtggacatagaggtattccctgctggtgagaataccgaggaccagaaatcctctgaagacactgccccattcctaggaaccttagcaggtgctacctatgaggaacaggttcaaagccaaattcttgagagcagttctctccctgaaaacacagtacaggttgagtcaaatgaggtcatgggtgcaccagatgacaggaccagaactccccttgagccatccaactgttggagtgacttagatggtgggaaccacacagagaatgtgggagaggcagcagtgactcaggttgaagagcaggcaggcacagtggcctcgtgtcctttagggcatagtgatgacacagtttatcatgatgacaaatgtatggtagaggtcccccaagagttagagacaagcacagggcatagtttagagaaagaattcaccaaccaggaagcagctgagcccaaggaggttccagcgcacagtacagaagtaggtagggatcacaacgaagaagagggtgaagaaacaggattaagggacgagaaaccaatcaagacagaagttcctggttctccagcaggaactgagggcaactgtcaggaagcgacaggtccaagtacagtagacactcaaaatgaacccttagatatgaaagagcccgatgaagaaaagagtgaccaacagggagaggcattggactcatcgcagaagaagacaaagaacaagaaaaagaaaaacaagaagaaaaaatccccagtacccgtagaaacccttaaagatgttaaaaaagagttaacgtatcagaacacagatttaagtgaaattaaggaagaagagcaggtaaagtctactgacagaaagtcagcagtggaagcccaaaacgaggtgactgaaaatccaaaacagaaaattgcagcagaaagcagtgaaaatgttgattgtccggagaatcctaaaattaagttggatggaaaacttgaccaagaaggtgatgatgtacaaacagcagctgaggaggtactagctgatggagacacattagattttgaggatgacaccgttcaatcatcaggcccgagggctggtggtgaagaattagatgaaggtgttgcaaaagataatgctaaaatagatggtgccactcaaagcagtcctgcagaaccaaagagcgaagacgcagatcgctgcaccctgcccgaacatgaaagtccctcacaggacattagtgatgcctgtgaagcagaaagtacagagaggtgtgagatgtcagaacatccaagtcagaccgtcaggaaagctttagacagcaatagcctagagaacgatgacttgtcggcaccaggaagagagccagggcacttcaatccagaaagcagagaagataccagaggagggaatgagaagggcaaaagcaaagaagactgtaccatgtcctaagctgaggcaggcggcaggcgcggtgcacaggaagtctcagtgtgaaggggtcttttctctccactgccaatgtaagtagaatgttctaaattcatagagaggcactgtatgacaattaccaggtgctctactgctttaagttatagactgttacttgtagatttccatgtaatcattgaggttatcacccagattagaaagacatatttgttatcagtgtacgttctaattgagagcattccagtagtatcaaacaataatgtctactgtttatagtccacttaataaaaatagaggcatttactatttgccttaggctgataggaatgtgggttttcttgaccaaatatatcagcatctaattgaaatgaccaaatagcattcttagacttctgtattatgaatataattgatatttaaattaatgtcttgttcacatatgtgtactttcatatttgattttaaaatgtacattataacctgtatggtattttatttaaaggagataaacagccaaatagcaaataggtcactgaatgataagatttgcaccttagaacaataatcattttaaggataacaagtaaatgtctgaaagcatgaggggctttatttgcctttacctcatatgagtctttgatcttgaaccgatacttttggatctcattgttgatatacctgaatttactttgtaagagattttaacttcacttcatgctgatgatgtatcaaattcattttatagaaagatttaaagtttttttctggaagtgatatatgtcaaattacatttcctactgcagtatttgagcagggacagt

SEQ ID NO: 147899 - DNA, 570 bp, Homo sapiens
  Payload ID: 9260
  Gene Symbol: LRRFIP1
  Gene Name: leucine rich repeat (in FLII) interacting protein 1
  ENST ID: ENST00000420665
  CDS Start-End: 124-570
acttagcggcgagtggctccgtctccgcggacagagcgcgcgccccctggcccggcccgcgaggggctcccggcgcggtccccgagcatttcccgccgggtggagcgggccgagcccggcaggatgaccagccccgcggccgctcaaagccgggagatcgactgtttgagcccggaagcgcagaagctggcggaagcccggctcgctgcaaaacgggcggcccgcgcggaggctcgcgagatccgcatgaaggagctggagcggcagcagaaggaggaagacagtgagcgctactctcgtagatccagaagaaacacatcggcttctgatgaagacgagcgcatgtcagtgggtagtcgtggaagcctgaggacaaatggttatgatggagaattgtatggatcacagtccctgaatagaagatctggcagggtagaagagagaccagaaaaagattttactgagaaggggtctcgtaacatgccgggcctgtctgcagccacgctggcctctctgggtgggacttcctctcggagaggcagcggagacacctccatctccatcgacacc

SEQ ID NO: 147900 - DNA, 3208 bp, Homo sapiens
  Payload ID: 9261
  Gene Symbol: LRRFIP2
  Gene Name: leucine rich repeat (in FLII) interacting protein 2
  Uniprot ID: Q9Y608
  ENST ID: ENST00000336686
  CDS Start-End: 82-2247
tggaaaggagagctaccatcactaagggctgaaaacacagttaaatcactttcaaagttaaaagactattaagaacacaagatggggactcctgcttctggaaggaaaagaacacctgtgaaagaccgattttctgcagaagatgaagctttgagtaacattgccagagaggcagaggcaaggctggcagcaaaacgggctgcccgggcagaagcaagagatatacgcatgagagaactggaacgacaacaaaaagagtactctcttcattcctttgatcggaagtggggacagattcagaagtggctggaagattcggaaagggccaggtattcccaccggtccagtcaccatcgtccttatctgggagttgaggatgcattgtccattcgaagtgttggcagtcacaggtatgatatgttcaaggatagatcatcaagactttcatcattaaatcattcttacagtcactctcatggaatgaagaagaggtcttctgattctcataaagacctactgagtggcctctactttgaccagagaaactatagcagtcttagacatagcaaacccacctctgcctactacactcggcagtcttcttccctgtacagtgaccctctggcaacatataagagtgacagggcctctcctactgcaaattctggtctgctgagaagtgccagtctggcatcattgtacaatggtggattatataacccttatggtcctcgaactccatctgaatgcagttattattcatcaagaataagttcagcccgaagcagtccagggtttaccaacgatgacactgcaagcattgtgtcttctgatcgtgccagtcgtggacgaagggagagtgtggtatctgccgctgattatttcagtcgctccaatcgtaggggaagtgttgtctctgaggtggatgatatcagtatcccagatttgtccagcttggatgaaaaatctgacaaacagtatgctgaaaattatacaagaccttcatctcgaaattctgcctcagcaacaacccctctaagtggaaactcatccagacgaggaagtggggacaccagcagcttaatagatccagacacttcattaagtgaattgcgggatatctatgaccttaaggaccagatacaggatgtagaagggagatacatgcaggggcttaaagaactaaaggaatctttgtctgaagtggaagaaaaatacaagaaagccatggtttccaatgcacagttagacaatgagaagaacaatttgatctaccaagtagacacactcaaggatgttattgaagagcaggaggaacagatggcagaattttatagagaaaatgaagaaaaatcaaaggagttagaaaggcagaaacatatgtgtagtgtgctgcagcataagatggaagaacttaaagaaggcctgcggcaaagagatgagcttattgaggagaagcagcgcatgcagcagaaaatagacaccatgacaaaagaggtgtttgacctccaggagacacttctttggaaagataaaaaaattggggccctagagaaacagaaagaatacattgcctgccttaggaatgagcgagatatgctcagagaggagctggctgacctgcaggagacagtgaagacgggagagaaacatggcttagttataatccccgatggcactcccaatggtgatgtcagtcatgaaccagtggctggagccatcactgttgtgtctcaggaagctgctcaggtcttggagtcagcaggagaagggccattagatgtaaggctacgaaaacttgctggagagaaggaagaactactgtcacagattagaaaactgaagcttcagttagaggaggaacgacagaaatgctccaggaatgatggcacagtgggtgacctggcaggactgcagaatggctcagacttgcagttcatcgaaatgcagagagatgccaatagacaaattagcgaatacaaatttaagctttcaaaagcagaacaggatataactaccttggagcaaagtattagccggcttgagggacaggttctgagatataaaactgctgctgagaatgctgagaaagttgaagatgaattgaaagcagaaaaacggaagctacaacgagagttacgaacagcactggacaagattgaggagatggagatgaccaacagccacctggccaagcggctggagaagatgaaggccaataggacagcacttctggcccagcagtaggaaaaccacccttcaacctgggtgatgctccttggggccctacctagagggactgacttttgtccattgacacaaaccccttttagtactgttttgagttttgtcattaaaacagccacctttgtattttataatttatgacagaatgaagtcattttgaatctacatgaatgaacactttggattttgttgtagtttgattctagggtagaaccagtccatgctgtttttattttttatctccgtaattgtagaatcatgtttactcaacgtttttccccagctgcctcagtaactgggcactcggaggccttggcacgggttctggaggacagacagcaattctatgagtgctcactgagatacttgctggagacctcagaaaacacaagtgccttctccacggtgcaattcagacttcagtgatctccagtggtcaaaagacatttacccttaatatcagacaacatttatattttagtgaagaaacaagttctcgggtggggaatctatgtttcactcagatttatatgtttggaggaaaaaagcctttttttgtaaaatatttaaatttatataagaaaatgttagaaaaaaatatggggagtgtatataaaacttgctttattgcatggggcaggggaagtccaggcctaatactcctaaagtaagagttgggtcctttttttcttcaatacaactgtgctgtaccttgtaaagtattttatctgctgcttatttgtggaatgaaacctcaaacaaacccaaagggggagggtagggcagggcaggcagattggaaatctgcctgcagattctattaaatacacccttttgccaaccacaattggctactgacatgttcattttgttataggagactttaaaacaaatcatggcaaccacatccctcttcttttgtctccttctcaaggaaaaacaatctggaatgtagaacttt

SEQ ID NO: 147901 - DNA, 2821 bp, Homo sapiens
  Payload ID: 9261
  Gene Symbol: LRRFIP2
  Gene Name: leucine rich repeat (in FLII) interacting protein 2
  Uniprot ID: Q9Y608
  ENST ID: ENST00000354379
  CDS Start-End: 424-1626
gtcgtcgaccctgtggccccgcccatccttcgcctcctcagtcggccgctcaggctgcggctcctcccggggccggttcccgctgtctcagccgcggcgcagagggcacatcggcctgaccgactagccggctgccagtgccgggagccgccgcgtccatccccgcccgcctggccggggacccaggactgagtcgtccagctgcgcccctcgcccatagccccagcgggcgccgggcgggcgagcagctcttcggcccttcccggacagcgacgcagtcgcagcgcgcgccctaacacagatgtgggaagataaatgaaggggtctagatgtaaatgtcagtggaaaggagagctaccatcactaagggctgaaaacacagttaaatcactttcaaagttaaaagactattaagaacacaagatggggactcctgcttctggaaggaaaagaacacctgtgaaagaccgattttctgcagaagatgaagctttgagtaacattgccagagaggcagaggcaaggctggcagcaaaacgggctgcccgggcagaagcaagagatatacgcatgagagaactggaacgacaacaaaaagagttggatgaaaaatctgacaaacagtatgctgaaaattatacaagaccttcatctcgaaattctgcctcagcaacaacccctctaagtggaaactcatccagacgaggaagtggggacaccagcagcttaatagatccagacacttcattaagtgaattgcgggaatctttgtctgaagtggaagaaaaatacaagaaagccatggtttccaatgcacagttagacaatgagaagaacaatttgatctaccaagtagacacactcaaggatgttattgaagagcaggaggaacagatggcagaattttatagagaaaatgaagaaaaatcaaaggagttagaaaggcagaaacatatgtgtagtgtgctgcagcataagatggaagaacttaaagaaggcctgcggcaaagagatgagcttattgagaaacatggcttagttataatccccgatggcactcccaatggtgatgtcagtcatgaaccagtggctggagccatcactgttgtgtctcaggaagctgctcaggtcttggagtcagcaggagaagggccattagatgtaaggctacgaaaacttgctggagagaaggaagaactactgtcacagattagaaaactgaagcttcagttagaggaggaacgacagaaatgctccaggaatgatggcacagtgggtgacctggcaggactgcagaatggctcagacttgcagttcatcgaaatgcagagagatgccaatagacaaattagcgaatacaaatttaagctttcaaaagcagaacaggatataactaccttggagcaaagtattagccggcttgagggacaggttctgagatataaaactgctgctgagaatgctgagaaagttgaagatgaattgaaagcagaaaaacggaagctacaacgagagttacgaacagcactggacaagattgaggagatggagatgaccaacagccacctggccaagcggctggagaagatgaaggccaataggacagcacttctggcccagcagtaggaaaaccacccttcaacctgggtgatgctccttggggccctacctagagggactgacttttgtccattgacacaaaccccttttagtactgttttgagttttgtcattaaaacagccacctttgtattttataatttatgacagaatgaagtcattttgaatctacatgaatgaacactttggattttgttgtagtttgattctagggtagaaccagtccatgctgtttttattttttatctccgtaattgtagaatcatgtttactcaacgtttttccccagctgcctcagtaactgggcactcggaggccttggcacgggttctggaggacagacagcaattctatgagtgctcactgagatacttgctggagacctcagaaaacacaagtgccttctccacggtgcaattcagacttcagtgatctccagtggtcaaaagacatttacccttaatatcagacaacatttatattttagtgaagaaacaagttctcgggtggggaatctatgtttcactcagatttatatgtttggaggaaaaaagcctttttttgtaaaatatttaaatttatataagaaaatgttagaaaaaaatatggggagtgtatataaaacttgctttattgcatggggcaggggaagtccaggcctaatactcctaaagtaagagttgggtcctttttttcttcaatacaactgtgctgtaccttgtaaagtattttatctgctgcttatttgtggaatgaaacctcaaacaaacccaaagggggagggtagggcagggcaggcagattggaaatctgcctgcagattctattaaatacacccttttgccaaccacaattggctactgacatgttcattttgttataggagactttaaaacaaatcatggcaaccacatccctcttcttttgtctccttctcaaggaaaaacaatctggaatgtagaacttttaaagacttgagtttcacctttagaggtaccctgtccaagaggtttttttaaaatcatggagtgcaactactttgcagaatttatgattctcttttgctcttagtacccaggtggttttatagaaatgattattgtatctttaaagtgcttacacagaaaatatattgggggaaaatctagtgactaaaggcacataagataataaaactagactttaaaaaggtaactcaaaa

SEQ ID NO: 147902 - DNA, 1791 bp, Homo sapiens
  Payload ID: 9261
  Gene Symbol: LRRFIP2
  Gene Name: leucine rich repeat (in FLII) interacting protein 2
  Uniprot ID: Q9Y608
  ENST ID: ENST00000396428
  CDS Start-End: 150-1661
aatgaaacaagagagaaggagagcgggatgtgggaagataaatgaaggggtctagatgtaaatgtcagtggaaaggagagctaccatcactaagggctgaaaacacagttaaatcactttcaaagttaaaagactattaagaacacaagatggggactcctgcttctggaaggaaaagaacacctgtgaaagaccgattttctgcagaagatgaagctttgagtaacattgccagagaggcagaggcaaggctggcagcaaaacgggctgcccgggcagaagcaagagatatacgcatgagagaactggaacgacaacaaaaagaggaagattcggaaagggccaggtattcccaccggtccagtcaccatcgtccttatctgggagttgaggatgcattgtccattcgaagtgttggcagtcacaggaatcattcttacagtcactctcatggaatgaagaagaggtcttctgattctcataaagacctactggcatcattgtacaatggtggattatataacccttatggtcctcgaactttggatgaaaaatctgacaaacagtatgctgaaaattatacaagaccttcatctcgaaattctgcctcagcaacaacccctctaagtggaaactcatccagacgaggaagtggggacaccagcagcttaatagatccagacacttcattaagtgaattgcgggaatctttgtctgaagtggaagaaaaatacaagaaagccatggtttccaatgcacagttagacaatgagaagaacaatttgatctaccaagtagacacactcaaggatgttattgaagagcaggaggaacagatggcagaattttatagagaaaatgaagaaaaatcaaaggagttagaaaggcagaaacatatgtgtagtgtgctgcagcataagatggaagaacttaaagaaggcctgcggcaaagagatgagcttattgaggagaagcagcgcatgcagcagaaaatagacaccatgacaaaagaggtgtttgacctccaggagacacttctttggaaagataaaaaaattgggaaacatggcttagttataatccccgatggcactcccaatggtgatgtcagtcatgaaccagtggctggagccatcactgttgtgtctcaggaagctgctcaggtcttggagtcagcaggagaagggccattagatgtaaggctacgaaaacttgctggagagaaggaagaactactgtcacagattagaaaactgaagcttcagttagaggaggaacgacagaaatgctccaggaatgatggcacagtgggtgacctggcaggactgcagaatggctcagacttgcagttcatcgaaatgcagagagatgccaatagacaaattagcgaatacaaatttaagctttcaaaagcagaacaggatataactaccttggagcaaagtattagccggcttgagggacaggttctgagatataaaactgctgctgagaatgctgagaaagttgaagatgaattgaaagcagaaaaacggaagctacaacgagagttacgaacagcactggacaagattgaggagatggagatgaccaacagccacctggccaagcggctggagaagatgaaggccaataggacagcacttctggcccagcagtaggaaaaccacccttcaacctgggtgatgctccttggggccctacctagagggactgacttttgtccattgacacaaaccccttttagtactgttttgagttttgtcattaaaacagccacctttgtatttt

SEQ ID NO: 147903 - DNA, 352 bp, Homo sapiens
  Payload ID: 9261
  Gene Symbol: LRRFIP2
  Gene Name: leucine rich repeat (in FLII) interacting protein 2
  ENST ID: ENST00000452742
  CDS Start-End: 176-352
taatgggaagagaatgtggatgtagtaatgaaacaagagagaaggagagcgggatgtgggaagataaatgaaggggtctagatgtaaatgtcagtggaaaggagagctaccatcactaagggctgaaaacacagttaaatcactttcaaagttaaaagactattaagaacacaagatggggactcctgcttctggaaggaaaagaacacctgtgaaagaccgattttctgcagaagatgaagctttgagtaacattgccagagaggcagaggcaaggctggcagcaaaacgggctgcccgggcagaagcaagagatatacgcatgagagaactggaacgacaacaaaaagag

SEQ ID NO: 147904 - DNA, 1989 bp, Homo sapiens
  Payload ID: 9261
  Gene Symbol: LRRFIP2
  Gene Name: leucine rich repeat (in FLII) interacting protein 2
  Uniprot ID: Q9Y608
  ENST ID: ENST00000440230
  CDS Start-End: 614-1888
ggctgcggctcctcccggggccggttcccgctgtctcagccgcggcgcagagggcacatcggcctgaccgactagccggctgccagtgccgggagccgccgcgtccatccccgcccgcctggccggggacccaggactgagtcgtccagctgcgcccctcgcccatagccccagcgggcgccgggcgggcgagcagctcttcggcccttcccggacagcgacgcagtcgcagcgcgcgccctaacacaggtaagggccgctcctcccgccagcccggtgggagcagggagcggggagttgggaacctttttcccggcctccgcagtcccgtgggatccgcgccgcctccgacctcggctagggggccgggcttccctggggactggccggcccgcggcgggctcccgggctggggtcgccccctgcctgcggcgttctcagacatcccgtctgatttctaacgctcacccttccaccgcgctggggaaaagatgtgggaagataaatgaaggggtctagatgtaaatgtcagtggaaaggagagctaccatcactaagggctgaaaacacagttaaatcactttcaaagttaaaagactattaagaacacaagatggggactcctgcttctggaaggaaaagaacacctgtgaaagaccgattttctgcagaagatgaagctttgagtaacattgccagagaggcagaggcaaggctggcagcaaaacgggctgcccgggcagaagcaagagatatacgcatgagagaactggaacgacaacaaaaagagttggatgaaaaatctgacaaacagtatgctgaaaattatacaagaccttcatctcgaaattctgcctcagcaacaacccctctaagtggaaactcatccagacgaggaagtggggacaccagcagcttaatagatccagacacttcattaagtgaattgcgggatatctatgaccttaaggaccagatacaggatgtagaagggagatacatgcaggggcttaaagaactaaaggaatctttgtctgaagtggaagaaaaatacaagaaagccatggtttccaatgcacagttagacaatgagaagaacaatttgatctaccaagtagacacactcaaggatgttattgaagagcaggaggaacagatggcagaattttatagagaaaatgaagaaaaatcaaaggagttagaaaggcagaaacatatgtgtagtgtgctgcagcataagatggaagaacttaaagaaggcctgcggcaaagagatgagcttattgagaaacatggcttagttataatccccgatggcactcccaatggtgatgtcagtcatgaaccagtggctggagccatcactgttgtgtctcaggaagctgctcaggtcttggagtcagcaggagaagggccattagatgtaaggctacgaaaacttgctggagagaaggaagaactactgtcacagattagaaaactgaagcttcagttagaggaggaacgacagaaatgctccaggaatgatggcacagtgggtgacctggcaggactgcagaatggctcagacttgcagttcatcgaaatgcagagagatgccaatagacaaattagcgaatacaaatttaagctttcaaaagcagaacaggatataactaccttggagcaaagtattagccggcttgagggacaggttctgagatataaaactgctgctgagaatgctgagaaagttgaagatgaattgaaagcagaaaaacggaagctacaacgagagttacgaacagcactggacaagattgaggagatggagatgaccaacagccacctggccaagcggctggagaagatgaaggccaataggacagcacttctggcccagcagtaggaaaaccacccttcaacctgggtgatgctccttggggccctacctagagggactgacttttgtccattgacacaaaccccttttagtactgttttgagttt

SEQ ID NO: 147905 - DNA, 961 bp, Homo sapiens
  Payload ID: 9261
  Gene Symbol: LRRFIP2
  Gene Name: leucine rich repeat (in FLII) interacting protein 2
  ENST ID: ENST00000416425
  CDS Start-End: 287-961
atggcggaacagggagccaggggcatcgccgcttggggaacctcacccgccggcccagggctcagctcgccgtgtgacagccccgggtactttgcccagcggggtgcaagcccggaccgcggcaagcgccactcccgggcagtcgcggccacaactgcttccggatgtgggaagataaatgaaggggtctagatgtaaatgtcagtggaaaggagagctaccatcactaagggctgaaaacacagttaaatcactttcaaagttaaaagactattaagaacacaagatggggactcctgcttctggaaggaaaagaacacctgtgaaagaccgattttctgcagaagatgaagctttgagtaacattgccagagaggcagaggcaaggctggcagcaaaacgggctgcccgggcagaagcaagagatatacgcatgagagaactggaacgacaacaaaaagagttggatgaaaaatctgacaaacagtatgctgaaaattatacaagaccttcatctcgaaattctgcctcagcaacaacccctctaagtggaaactcatccagacgaggaagtggggacaccagcagcttaatagatccagacacttcattaagtgaattgcgggatatctatgaccttaaggaccagatacaggatgtagaagggagatacatgcaggggcttaaagaactaaaggaatctttgtctgaagtggaagaaaaatacaagaaagccatggtttccaatgcacagttagacaatgagaagaacaatttgatctaccaagtagacacactcaaggatgttattgaagagcaggaggaacagatggcagaattttatagagaaaatgaagaaaaatcaaaggagttagaaaggcagaaacatatgtgtagtgtgctgcagcataagatggaagaacttaaagaaggcctgcggcaaagagatgagcttattgag

SEQ ID NO: 147906 - DNA, 560 bp, Homo sapiens
  Payload ID: 9261
  Gene Symbol: LRRFIP2
  Gene Name: leucine rich repeat (in FLII) interacting protein 2
  ENST ID: ENST00000438374
  CDS Start-End: 358-560
atcggcctgaccgactagccggctgccagtgccgggagccgccgcgtccatccccgcccgcctggccggggacccaggactgagtcgtccagctgcgcccctcgcccatagccccagcgggcgccgggcgggcgagcagctcttcggcccttcccggacagcgacgcagtcgcagcgcgcgccctaacacagatgtgggaagataaatgaaggggtctagatgtaaatgtcagtggaaaggagagctaccatcactaaggtttatattctgcaagatcctgaagatactttccttcttttctggctgaaaacacagttaaatcactttcaaagttaaaagactattaagaacacaagatggggactcctgcttctggaaggaaaagaacacctgtgaaagaccgattttctgcagaagatgaagctttgagtaacattgccagagaggcagaggcaaggctggcagcaaaacgggctgcccgggcagaagcaagagatatacgcatgagagaactggaacgacaacaaaaagaggaagattcggaaagggccaggtattc

SEQ ID NO: 147907 - DNA, 545 bp, Homo sapiens
  Payload ID: 9261
  Gene Symbol: LRRFIP2
  Gene Name: leucine rich repeat (in FLII) interacting protein 2
  ENST ID: ENST00000440742
  CDS Start-End: 1-545
gttagacaatgagaagaacaatttgatctaccaagtagacacactcaaggatgttattgaagagcaggaggaacagatggcagaattttatagagaaaatgaagaaaaatcaaaggagttagaaaggcagaaacatatgtgtagtgtgctgcagcataagatggaagaacttaaagaaggcctgcggcaaagagatgagcttattgaggccctagagaaacagaaagaatacattgcctgccttaggaatgagcgagatatgctcagagaggagctggctgacctgcaggagacagtgaagacgggagagaaacatggcttagttataatccccgatggcactcccaatggtgatgtcagtcatgaaccagtggctggagccatcactgttgtgtctcaggaagctgctcaggtcttggagtcagcaggagaagggccattagatgtaaggctacgaaaacttgctggagagaaggaagaactactgtcacagattagaaaactgaagcttcagttagaggaggaacgacagaaatgctccagga

SEQ ID NO: 147908 - DNA, 389 bp, Homo sapiens
  Payload ID: 9261
  Gene Symbol: LRRFIP2
  Gene Name: leucine rich repeat (in FLII) interacting protein 2
  ENST ID: ENST00000436858
  CDS Start-End: 213-389
gaagagaatgtggatgtagtaatgaaacaagagagaaggagagcgggatgtgggaagataaatgaaggggtctagatgtaaatgtcagtggaaaggagagctaccatcactaaggtttatattctgcaagatcctgaagatactttccttcttttctggctgaaaacacagttaaatcactttcaaagttaaaagactattaagaacacaagatggggactcctgcttctggaaggaaaagaacacctgtgaaagaccgattttctgcagaagatgaagctttgagtaacattgccagagaggcagaggcaaggctggcagcaaaacgggctgcccgggcagaagcaagagatatacgcatgagagaactggaacgacaacaaaaagag

SEQ ID NO: 147909 - DNA, 2522 bp, Homo sapiens
  Payload ID: 9261
  Gene Symbol: LRRFIP2
  Gene Name: leucine rich repeat (in FLII) interacting protein 2
  Uniprot ID: Q9Y608
  ENST ID: ENST00000421276
  CDS Start-End: 401-1675
catccttcgcctcctcagtcggccgctcaggctgcggctcctcccggggccggttcccgctgtctcagccgcggcgcagagggcacatcggcctgaccgactagccggctgccagtgccgggagccgccgcgtccatccccgcccgcctggccggggacccaggactgagtcgtccagctgcgcccctcgcccatagccccagcgggcgccgggcgggcgagcagctcttcggcccttcccggacagcgacgcagtcgcagcgcgcgccctaacacagatgtgggaagataaatgaaggggtctagatgtaaatgtcagtggaaaggagagctaccatcactaagggctgaaaacacagttaaatcactttcaaagttaaaagactattaagaacacaagatggggactcctgcttctggaaggaaaagaacacctgtgaaagaccgattttctgcagaagatgaagctttgagtaacattgccagagaggcagaggcaaggctggcagcaaaacgggctgcccgggcagaagcaagagatatacgcatgagagaactggaacgacaacaaaaagagttggatgaaaaatctgacaaacagtatgctgaaaattatacaagaccttcatctcgaaattctgcctcagcaacaacccctctaagtggaaactcatccagacgaggaagtggggacaccagcagcttaatagatccagacacttcattaagtgaattgcgggatatctatgaccttaaggaccagatacaggatgtagaagggagatacatgcaggggcttaaagaactaaaggaatctttgtctgaagtggaagaaaaatacaagaaagccatggtttccaatgcacagttagacaatgagaagaacaatttgatctaccaagtagacacactcaaggatgttattgaagagcaggaggaacagatggcagaattttatagagaaaatgaagaaaaatcaaaggagttagaaaggcagaaacatatgtgtagtgtgctgcagcataagatggaagaacttaaagaaggcctgcggcaaagagatgagcttattgagaaacatggcttagttataatccccgatggcactcccaatggtgatgtcagtcatgaaccagtggctggagccatcactgttgtgtctcaggaagctgctcaggtcttggagtcagcaggagaagggccattagatgtaaggctacgaaaacttgctggagagaaggaagaactactgtcacagattagaaaactgaagcttcagttagaggaggaacgacagaaatgctccaggaatgatggcacagtgggtgacctggcaggactgcagaatggctcagacttgcagttcatcgaaatgcagagagatgccaatagacaaattagcgaatacaaatttaagctttcaaaagcagaacaggatataactaccttggagcaaagtattagccggcttgagggacaggttctgagatataaaactgctgctgagaatgctgagaaagttgaagatgaattgaaagcagaaaaacggaagctacaacgagagttacgaacagcactggacaagattgaggagatggagatgaccaacagccacctggccaagcggctggagaagatgaaggccaataggacagcacttctggcccagcagtaggaaaaccacccttcaacctgggtgatgctccttggggccctacctagagggactgacttttgtccattgacacaaaccccttttagtactgttttgagttttgtcattaaaacagccacctttgtattttataatttatgacagaatgaagtcattttgaatctacatgaatgaacactttggattttgttgtagtttgattctagggtagaaccagtccatgctgtttttattttttatctccgtaattgtagaatcatgtttactcaacgtttttccccagctgcctcagtaactgggcactcggaggccttggcacgggttctggaggacagacagcaattctatgagtgctcactgagatacttgctggagacctcagaaaacacaagtgccttctccacggtgcaattcagacttcagtgatctccagtggtcaaaagacatttacccttaatatcagacaacatttatattttagtgaagaaacaagttctcgggtggggaatctatgtttcactcagatttatatgtttggaggaaaaaagcctttttttgtaaaatatttaaatttatataagaaaatgttagaaaaaaatatggggagtgtatataaaacttgctttattgcatggggcaggggaagtccaggcctaatactcctaaagtaagagttgggtcctttttttcttcaatacaactgtgctgtaccttgtaaagtattttatctgctgcttatttgtggaatgaaacctcaaacaaacccaaagggggagggtagggcagggcaggcagattggaaatctgcctgcagattctattaaatacacccttttgccaaccacaa

SEQ ID NO: 147910 - DNA, 718 bp, Homo sapiens
  Payload ID: 9261
  Gene Symbol: LRRFIP2
  Gene Name: leucine rich repeat (in FLII) interacting protein 2
  ENST ID: ENST00000434749
  CDS Start-End: 542-718
gtttaaaataatattttttcaagataacattttattttgaggataaatctatatgaaaaagtgcagttattggagaatgcagtgttgcaaatagaattagttggcagggactccacggttgttgtggtttgaatatcttgcagcactaaccctgtttaaccaacgtcatgctctgtttaacagatgcagagataatgacctagtattataatatgtagaataagaatttcagaaagtgtgattcatttcgaaggtagatcactcactttgtgaatcattgctatgaatctgaaaattgaaatagaggaaacctaagttcgtatctgcctaatgagatggcattctttactcattttataggaagtgttgtattatgttttgttaggtctgttgctggatatttatcatcgtgaagaatgatgtgggaagataaatgaaggggtctagatgtaaatgtcagtggaaaggagagctaccatcactaagggctgaaaacacagttaaatcactttcaaagttaaaagactattaagaacacaagatggggactcctgcttctggaaggaaaagaacacctgtgaaagaccgattttctgcagaagatgaagctttgagtaacattgccagagaggcagaggcaaggctggcagcaaaacgggctgcccgggcagaagcaagagatatacgcatgagagaactggaacgacaacaaaaagag

SEQ ID NO: 147911 - DNA, 3813 bp, Homo sapiens
  Payload ID: 9262
  Gene Symbol: LRRCC1
  Gene Name: leucine rich repeat and coiled-coil centrosomal protein 1
  Uniprot ID: Q9C099
  ENST ID: ENST00000360375
  CDS Start-End: 150-3248
gggaaagttcccggctgtcggttggagggtgggtcctcgccccgccccgccccctcgggccgcccttccgcgcttccgggaggcttgtcccaagctcacggacccctcgctgggtgccggttaagaccccgctccccgtcgccagtgctatggaggcggcggcggcggtggtggcggcagaggcggaagtggaaaacgaagacggcgacagcagctgcggggatgtatgcttcatggacaaaggcttgcagagcatatcagaattatctttagattcaactcttcatgccgtcaatcttcattgcaataacatctccaagatcgaagccattgatcatatttggaatttacaacatctagatctgtcatctaatcaaataagtagaattgaaggactaaacacactgacaaaactgtgcacattaaatttgtcctgcaatttgattacaaaagtagaaggacttgaagaactaattaatctgactagactaaatgtatcttataaccacatagatgatcttagtggattgattccccttcatggaattaagcataaacttagatatattgatctacatagtaatcgtatagatagtatccatcacttacttcagtgtatggtaggattgcacttcctgaccaatcttattttggagaaagatggagacgataatcctgtctgtcgactgccagggtacagagcagttattctccagactttgccacagcttagaatcctagattgcaagaacatatttggtgaaccagtaaatttgacagaaataaattcatcacagctgcagtgcctagaaggtcttttggataatttagtttcttctgattctcccctaaatataagtgaagatgagatcattgatagaatgccagtgataacagcacctatcgatgagttagttcccttggaacagtttgcaagtacaccaagtgatgctgtgttgacgtcttttatgtctgtgtgtcaatcttctgagccagagaaaaataatcatgaaaacgatttgcagaatgagataaaacttcagaaattagatgaccaaattctacaacttctaaatgaaacttctaattcaatagataacgttcttgagaaagaccccagaccaaaaagagacacagatataacttctgaaagtgactatggaaacagaaaagaatgcaatagaaaagttcctcgaagatcaaaaatcccttatgatgccaaaaccattcaaactattaagcaccacaataaaaactacaactcttttgtaagttgtaatcgtaaaatgaaaccaccttaccttaaagaattatatgtaagctcatctttagcaaactgtcctatgttacaagaatcagaaaagccaaagactgaaataattaaagtagaccaaagtcactcagaagacaacacttaccagtcccttgttgaacagctagaccaagagagagagaagagatggagagctgagcaagccgaaaataaactcatggattatattgatgagctgcataaacatgcaaatgaaaaagaggatattcatagtctggctctacttaccacagataggctaaaggaaattatttttagagagagaaattccaaaggacaactcgaagttatggttcacaaacttcaaaatgaaattaaaaaactgactgttgaactaatgaaagcaaaagatcaacaagaggatcaccttaaacacttaagaaccctcgaaaaaacattagaaaaaatggagagacaaaaaaggcagcagcaggcagcacagataagactgatccaagaggtggaactcaaagcttcagctgccgatagagaaatatacttacttagaacttcccttcatcgagaaagagaacaagcgcaacaacttcatcaacttcttgcattgaaagaacaggaacacaggaaggaacttgaaacaagggagttttttactgatgctgacttccaggatgccttagctaaagaaatagccaaagaagagaaaaagcatgagcaaatgataaaagaataccaagagaaaattgacgtgttaagccagcagtatatggatttagaaaatgaattccgtattgctttaactgttgaagccagaagatttcaagatgttaaagatggttttgaaaatgttgcaactgagttagcaaagagcaaacatgctcttatttgggctcaacgaaaagaaaatgagtcttcctctttaattaaagatctgacctgtatggtaaaggaacaaaaaacaaaactggcagaagtttctaaattgaaacaagaaacagcagcaaatttacagaatcaaatcaacacccttgaaattttaattgaagatgacaagcagaagagtattcaaatagaacttctcaagcacgaaaaagtccagcttatttctgagctagcagccaaggaatcactaatatttggtttaaggacagaaagaaaagtatggggacatgagctggcacaacaaggatcttctctagcccaaaatcgtggaaaattggaggctcaaattgagagtttatctagagagaatgaatgtctgcgaaagacaaatgaaagtgatagtgatgcattaagaataaagtgcaaaatcatagacgaccaaactgaaactattagaaaattaaaagattgtttacaagaaaaagatgaacacatcaaaagattacaagaaaagatcacagaaatagaaaaatgcactcaagaacaacttgatgaaaaatcttcacaactggatgaggtacttgagaagttggaaaggcacaatgaaagaaaagaaaaactaaaacaacagttgaaaggaaaggaagtagaacttgaagaaatcagaaaagcttacagtacactgaatcggaagtggcatgataaaggagaacttctatgtcatcttgaaacacaagtaaaagaagtgaaagaaaaatttgaaaacaaggaaaagaaacttaaagcggaaagagacaaaagtattgaactacaaaagaatgcaatggaaaaacttcatagtatggatgatgcctttaaaagacaagttgatgcaattgttgaagctcatcaagctgaaatagcacagctggccaatgaaaagcagaagtgtattgattctgcaaatttaaaggtccatcaaattgaaaaagaaatgcgtgaacttttggaagaaacatgcaagaacaaaaaaacaatggaagcaaaaattaagcaacttgcttttgctttaaatgaaattcagcaagatatgtgatggttctgagaatgaatttaattgaaatagaccagcagacctattgtaaaaatgattaaatattgtaatagtagtaactgctatgactttgaaatgtctctttctatacatttcattatgaatatatttttaaagacttttgatcaagtatttattaattgtataggttttttataataaattgttgacaattttgtctattagaaaaaactatcataactagacttacaatatttttcttgtttctgtactatacattgtttggtaattacacatttgcctacaaatttgtgaatgaaaagattagtattttcaccatatgaggtaaaacattttaatcattgttatcttattgtgatgatgaagaactaattatatttgttatttaattgatgtagctcaattcttttaaagtacttatgtagccaaaaagcatttgaaatctgtatgataaaagatgtggcattcttaagaaagtatatgtagccatctccacatcactcattatgaccccttcttttataatgcttatatcttttcattaaagattacatttaaggtttta

SEQ ID NO: 147912 - DNA, 4493 bp, Homo sapiens
  Payload ID: 9262
  Gene Symbol: LRRCC1
  Gene Name: leucine rich repeat and coiled-coil centrosomal protein 1
  Uniprot ID: Q9C099
  ENST ID: ENST00000414626
  CDS Start-End: 890-3928
cccagatagtcacatttaaaggttgctagtttgaaatttgcaaatgcttccctgctgtcagagttaggtttcctacagctgtaagatagctgctactcaacctacagcagatgcccgtgacattgtgtgttcctgggtgtatctcccatctagcaactccaaactgtgtatgctgtagtttgtgttcctggaactactatcttcaggagaagcttcagttataaatagtaattggagtgaagagatgagttctgtttaggggagatccattaactttcaacaagggaggacagggactttttcaataggaattgcaataacatggtttgtttttgaaaatgcaatagactgtggattaaatagctattgcacacaaagaagaaaataaagttataatctccagcatgagatctggatttacatatgctctgttagctgcaagaatttgggcaagctatttaatttccataaatttaggtatccttaagatacccactgcttagagttattgtgagaattaattgaggtaagaaaactgaggctcaggttgtcatttgctcaaatcacacagcaaaaccgtgatagaatgcagattcaaactgggatattaacattccaaagcctttacagttattgactactattcagcactgccttcaatatatgctgatgactgcacacaggagttagaaatgcccactgtcacttgcctgccttgagcggtttcttgtttgtataaataatccaaaatacttggttgtgttgtaagaagcaccgtgttttgtgagacatttcaaaggtaccacaaataggaaagatttcattctagaatgaatagagcacatatttagtatctacgtgctgtttggttaattttagttatttggtcatgcttttaaaatctatttttatagtatatattttcttttatagcatatcagaattatctttagattcaactcttcatgccgtcaatcttcattgcaataacatctccaagatcgaagccattgatcatatttggaatttacaacatctagatctgtcatctaatcaaataagtagaattgaaggactaaacacactgacaaaactgtgcacattaaatttgtcctgcaatttgattacaaaagtagaaggacttgaagaactaattaatctgactagactaaatgtatcttataaccacatagatgatcttagtggattgattccccttcatggaattaagcataaacttagatatattgatctacatagtaatcgtatagatagtatccatcacttacttcagtgtatggtaggattgcacttcctgaccaatcttattttggagaaagatggagacgataatcctgtctgtcgactgccagggtacagagcagttattctccagactttgccacagcttagaatcctagattgcaagaacatatttggtgaaccagtaaatttgacagaaataaattcatcacagctgcagtgcctagaaggtcttttggataatttagtttcttctgattctcccctaaatataagtgaagatgagatcattgatagaatgccagtgataacagcacctatcgatgagttagttcccttggaacagtttgcaagtacaccaagtgatgctgtgttgacgtcttttatgtctgtgtgtcaatcttctgagccagagaaaaataatcatgaaaacgatttgcagaatgagataaaacttcagaaattagatgaccaaattctacaacttctaaatgaaacttctaattcaatagataacgttcttgagaaagaccccagaccaaaaagagacacagatataacttctgaaagtgactatggaaacagaaaagaatgcaatagaaaagttcctcgaagatcaaaaatcccttatgatgccaaaaccattcaaactattaagcaccacaataaaaactacaactcttttgtaagttgtaatcgtaaaatgaaaccaccttaccttaaagaattatatgtaagctcatctttagcaaactgtcctatgttacaagaatcagaaaagccaaagactgaaataattaaagtagaccaaagtcactcagaagacaacacttaccagtcccttgttgaacagctagaccaagagagagagaagagatggagagctgagcaagccgaaaataaactcatggattatattgatgagctgcataaacatgcaaatgaaaaagaggatattcatagtctggctctacttaccacagataggctaaaggaaattatttttagagagagaaattccaaaggacaactcgaagttatggttcacaaacttcaaaatgaaattaaaaaactgactgttgaactaatgaaagcaaaagatcaacaagaggatcaccttaaacacttaagaaccctcgaaaaaacattagaaaaaatggagagacaaaaaaggcagcagcaggcagcacagataagactgatccaagaggtggaactcaaagcttcagctgccgatagagaaatatacttacttagaacttcccttcatcgagaaagagaacaagcgcaacaacttcatcaacttcttgcattgaaagaacaggaacacaggaaggaacttgaaacaagggagttttttactgatgctgacttccaggatgccttagctaaagaaatagccaaagaagagaaaaagcatgagcaaatgataaaagaataccaagagaaaattgacgtgttaagccagcagtatatggatttagaaaatgaattccgtattgctttaactgttgaagccagaagatttcaagatgttaaagatggttttgaaaatgttgcaactgagttagcaaagagcaaacatgctcttatttgggctcaacgaaaagaaaatgagtcttcctctttaattaaagatctgacctgtatggtaaaggaacaaaaaacaaaactggcagaagtttctaaattgaaacaagaaacagcagcaaatttacagaatcaaatcaacacccttgaaattttaattgaagatgacaagcagaagagtattcaaatagaacttctcaagcacgaaaaagtccagcttatttctgagctagcagccaaggaatcactaatatttggtttaaggacagaaagaaaagtatggggacatgagctggcacaacaaggatcttctctagcccaaaatcgtggaaaattggaggctcaaattgagagtttatctagagagaatgaatgtctgcgaaagacaaatgaaagtgatagtgatgcattaagaataaagtgcaaaatcatagacgaccaaactgaaactattagaaaattaaaagattgtttacaagaaaaagatgaacacatcaaaagattacaagaaaagatcacagaaatagaaaaatgcactcaagaacaacttgatgaaaaatcttcacaactggatgaggtacttgagaagttggaaaggcacaatgaaagaaaagaaaaactaaaacaacagttgaaaggaaaggaagtagaacttgaagaaatcagaaaagcttacagtacactgaatcggaagtggcatgataaaggagaacttctatgtcatcttgaaacacaagtaaaagaagtgaaagaaaaatttgaaaacaaggaaaagaaacttaaagcggaaagagacaaaagtattgaactacaaaagaatgcaatggaaaaacttcatagtatggatgatgcctttaaaagacaagttgatgcaattgttgaagctcatcaagctgaaatagcacagctggccaatgaaaagcagaagtgtattgattctgcaaatttaaaggtccatcaaattgaaaaagaaatgcgtgaacttttggaagaaacatgcaagaacaaaaaaacaatggaagcaaaaattaagcaacttgcttttgctttaaatgaaattcagcaagatatgtgatggttctgagaatgaatttaattgaaatagaccagcagacctattgtaaaaatgattaaatattgtaatagtagtaactgctatgactttgaaatgtctctttctatacatttcattatgaatatatttttaaagacttttgatcaagtatttattaattgtataggttttttataataaattgttgacaattttgtctattagaaaaaactatcataactagacttacaatatttttcttgtttctgtactatacattgtttggtaattacacatttgcctacaaatttgtgaatgaaaagattagtattttcaccatatgaggtaaaacattttaatcattgttatcttattgtgatgatgaagaactaattatatttgttatttaattgatgtagctcaattcttttaaagtacttatgtagccaaaaagcatttgaaatctgtatgataaaagatgtggcattcttaagaaagtatatgtagccatctccacatcactcattatgaccccttcttttataatgcttatatcttttcattaaagattacatttaaggtttta

SEQ ID NO: 147913 - DNA, 2800 bp, Homo sapiens
  Payload ID: 9262
  Gene Symbol: LRRCC1
  Gene Name: leucine rich repeat and coiled-coil centrosomal protein 1
  ENST ID: ENST00000522770
  CDS Start-End: 59-166
aagctcacggacccctcgctgggtgccggttaagaccccgctccccgtcgccagtgctatggaggcggcggcggcggtggtggcggcagaggcggaagtggaaaacgaagacggcgacagcagctgcggggatgtatgcttcatggacaaaggcttgcagaggtaaagggcgctccgcagccaggagcgacccgcgcactccccagagccggggccacgagtggctggcggcgacaccagagtggaggcgcggcactgctttaccaagaccataagtgaacgcagtctggctttcggcctccccgctcctccaaaacttacctgccgaagtgccaggttgaatgagccgtggatgccttcccgcccgtgtctcctgcccagcgtttcacacgactctgcttagcctagaaactgccccaggaccttgtcctccaccagcttctgaccactctttccttctgctggttttccttacttactggacttgaagaactaattaatctgactagactaaatgtatcttataaccacatagatgatcttagtggattgattccccttcatggaattaagcataaacttagatatattgatctacatagtaatcgtatagatagtatccatcacttacttcagtgtatggtaggattgcacttcctgaccaatcttattttggagaaagatggagacgataatcctgtctgtcgactgccagggtacagagcagttattctccagactttgccacagcttagaatcctagattgcaagaacatatttggtgaaccagtaaatttgacagaaataaattcatcacagctgcagtgcctagaaggtcttttggataatttagtttcttctgattctcccctaaatataagtgaagatgagatcattgatagaatgccagtgataacagcacctatcgatgagttagttcccttggaacagtttgcaagtacaccaagtgatgctgtgttgacgtcttttatgtctgtgtgtcaatcttctgagccagagaaaaataatcatgaaaacgatttgcagaatgagataaaacttcagaaattagatgaccaaattctacaacttctaaatgaaacttctaattcaatagataacgttcttgagaaagaccccagaccaaaaagagacacagatataacttctgaaagtgactatggaaacagaaaagaatgcaatagaaaagttcctcgaagatcaaaaatcccttatgatgccaaaaccattcaaactattaagcaccacaataaaaactacaactcttttgtaagttgtaatcgtaaaatgaaaccaccttaccttaaagaattatatgtaagctcatctttagcaaactgtcctatgttacaagaatcagaaaagccaaagactgaaataattaaagtagaccaaagtcactcagaagacaacacttaccagtcccttgttgaacagctagaccaagagagagagaagagatggagagctgagcaagccgaaaataaactcatggattatattgatgagctgcataaacatgcaaatgaaaaagaggatattcatagtctggctctacttaccacagataggctaaaggaaattatttttagagagagaaattccaaaggacaactcgaagttatggttcacaaacttcaaaatgaaattaaaaaactgactgttgaactaatgaaagcaaaagatcaacaagaggatcaccttaaacacttaagaaccctcgaaaaaacattagaaaaaatggagagacaaaaaaggcagcagcaggcagcacagataagactgatccaagaggtggaactcaaagcttcagctgccgatagagaaatatacttacttagaacttcccttcatcgagaaagagaacaagcgcaacaacttcatcaacttcttgcattgaaagaacaggaacacaggaaggaacttgaaacaagggagttttttactgatgctgacttccaggatgccttagctaaagaaatagccaaagaagagaaaaagcatgagcaaatgataaaagaataccaagagaaaattgacgtgttaagccagcagtatatggatttagaaaatgaattccgtattgctttaactgttgaagccagaagatttcaagatgttaaagatggttttgaaaatgttgcaactgagttagcaaagagcaaacatgctcttatttgggctcaacgaaaagaaaatgagtcttcctctttaattaaagatctgacctgtatggtaaaggaacaaaaaacaaaactggcagaagtttctaaattgaaacaagaaacagcagcaaatttacagaatcaaatcaacacccttgaaattttaattgaagatgacaagcagaagagtattcaaatagaacttctcaagcacgaaaaagtccagcttatttctgagctagcagccaaggaatcactaatatttggtttaaggacagaaagaaaagtatggggacatgagctggcacaacaaggatcttctctagcccaaaatcgtggaaaattggaggctcaaattgagagtttatctagagagaatgaatgtctgcgaaagacaaatgaaagtgatagtgatgcattaagaataaagtgcaaaatcatagacgaccaaactgaaactattagaaaattaaaagattgtttacaagaaaaagatgaacacatcaaaagattacaagaaaagatcacagaaatagaaaaatgcactcaagaacaacttgatgaaaaatcttcacaactggatgaggtacttgagaagttggaaaggcacaatg

SEQ ID NO: 147914 - DNA, 2122 bp, Homo sapiens
  Payload ID: 9262
  Gene Symbol: LRRCC1
  Gene Name: leucine rich repeat and coiled-coil centrosomal protein 1
  ENST ID: ENST00000522567
  CDS Start-End: 82-192
cgcgcttccgggaggcttgtcccaagctcacggacccctcgctgggtgccggttaagaccccgctccccgtcgccagtgctatggaggcggcggcggcggtggtggcggcagaggcggaagtggaaaacgaagacggcgacagcagctgcggggatgtatgcttcatggacaaaggcttgcagaggacttgaagaactaattaatctgactagactaaatgtatcttataaccacatagatgatcttagtggattgattccccttcatggaattaagcataaacttagatatattgatctacatagtaatcgtatagatagtatccatcacttacttcagtgtatggtaggattgcacttcctgaccaatcttattttggagaaagatggagacgataatcctgtctgtcgactgccagacttctaattcaatagataacgttcttgagaaagaccccagaccaaaaagagacacagatataacttctgaaagtgactatggaaacagaaaagaatgcaatagaaaagttcctcgaagatcaaaaatcccttatgatgccaaaaccattcaaactattaagcaccacaataaaaactacaactcttttgtaagttgtaatcgtaaaatgaaaccaccttaccttaaagaattatatgtaagctcatctttagcaaactgtcctatgttacaagaatcagaaaagccaaagactgaaataattaaagtagaccaaagtcactcagaagacaacacttaccagtcccttgttgaacagctagaccaagagagagagaagagatggagagctgagcaagccgaaaataaactcatggattatattgatgagctgcataaacatgcaaatgaaaaagaggatattcatagtctggctctacttaccacagataggctaaaggaaattatttttagagagagaaattccaaaggacaactcgaagttatggttcacaaacttcaaaatgaaattaaaaaactgactgttgaactaatgaaagcaaaagatcaacaagaggatcaccttaaacacttaagaaccctcgaaaaaacattagaaaaaatggagagacaaaaaaggcagcagcaggcagcacagataagactgatccaagaggtggaactcaaagcttcagctgccgatagagaaatatacttacttagaacttcccttcatcgagaaagagaacaagcgcaacaacttcatcaacttcttgcattgaaagaacaggaacacaggaaggaacttgaaacaagggagttttttactgatgctgacttccaggatgccttagctaaagaaatagccaaagaagagaaaaagcatgagcaaatgataaaagaataccaagagaaaattgacgtgttaagccagcagtatatggatttagaaaatgaattccgtattgctttaactgttgaagccagaagatttcaagatgttaaagatggttttgaaaatgttgcaactgagttagcaaagagcaaacatgctcttatttgggctcaacgaaaagaaaatgagtcttcctctttaattaaagatctgacctgtatggtaaaggaacaaaaaacaaaactggcagaagtttctaaattgaaacaagaaacagcagcaaatttacagaatcaaatcaacacccttgaaattttaattgaagatgacaagcagaagagtattcaaatagaacttctcaagcacgaaaaagtccagcttatttctgagctagcagccaaggaatcactaatatttggtttaaggacagaaagaaaagtatggggacatgagctggcacaacaaggatcttctctagcccaaaatcgtggaaaattggaggctcaaattgagagtttatctagagagaatgaatgtctgcgaaagacaaatgaaagtgatagtgatgcattaagaataaagtgcaaaatcatagacgaccaaactgaaactattagaaaattaaaagattgtttacaagaaaaagatgaacacatcaaaagattacaagaaaagatcacagaaatagaaaaatgcactcaagaacaacttgatgaaaaatcttcacaactggatgaggtacttgagaagttggaaaggcacaatgaaag

SEQ ID NO: 147915 - DNA, 1004 bp, Homo sapiens
  Payload ID: 9262
  Gene Symbol: LRRCC1
  Gene Name: leucine rich repeat and coiled-coil centrosomal protein 1
  ENST ID: ENST00000523669
  CDS Start-End: 59-169
aagctcacggacccctcgctgggtgccggttaagaccccgctccccgtcgccagtgctatggaggcggcggcggcggtggtggcggcagaggcggaagtggaaaacgaagacggcgacagcagctgcggggatgtatgcttcatggacaaaggcttgcagaggacttgaagaactaattaatctgactagactaaatgtatcttataaccacatagatgatcttagtggattgattccccttcatggaattaagcataaacttagatatattgatctacatagtaatcgtatagatagtatccatcacttacttcagtgtatggtaggattgcacttcctgaccaatcttattttggagaaagatggagacgataatcctgtctgtcgactgccagttgtaatcgtaaaatgaaaccaccttaccttaaagaattatatgtaagctcatctttagcaaactgtcctatgttacaagaatcagaaaagccaaagactgaaataattaaagtagaccaaagtcactcagaagacaacacttaccagtcccttgttgaacagctagaccaagagagagagaagagatggagagctgagcaagccgaaaataaactcatggattatattgatgagctgcataaacatgcaaatgaaaaagaggatattcatagtctggctctacttaccacagatagataagactgatccaagaggtggaactcaaagcttcagctgccgatagagaaatatacttacttagaacttcccttcatcgagaaagagaacaagcgcaacaacttcatcaacttcttgcattgaaagaacaggaacacaggaaggaacttgaaacaagggagttttttactgatgctgacttccaggatgccttagctaaagaaatagccaaagaagagaaaaagcatgagcaaatgataaaagaataccaagagaaaattgacgtgttaagccagcagtatatggatttagaaaatgaattccgtattgc

SEQ ID NO: 147916 - DNA, 2385 bp, Homo sapiens
  Payload ID: 9262
  Gene Symbol: LRRCC1
  Gene Name: leucine rich repeat and coiled-coil centrosomal protein 1
  ENST ID: ENST00000517875
  CDS Start-End: 59-169
aagctcacggacccctcgctgggtgccggttaagaccccgctccccgtcgccagtgctatggaggcggcggcggcggtggtggcggcagaggcggaagtggaaaacgaagacggcgacagcagctgcggggatgtatgcttcatggacaaaggcttgcagaggacttgaagaactaattaatctgactagactaaatgtatcttataaccacatagatgatcttagtggattgattccccttcatggaattaagcataaacttagatatattgatctacatagtaatcgtatagatagtatccatcacttacttcagtgtatggtaggattgcacttcctgaccaatcttattttggagaaagatggagacgataatcctgtctgtcgactgccagggtacagagcagttattctccagactttgccacagcttagaatcctagattgcaagaacatatttggtgaaccagtaaatttgacagaaataaattcatcacagctgcagtgcctagaaggtcttttggataatttagtttcttctgattctcccctaaatataagtgaagatgagatcattgatagaatgccagtgataacagcacctatcgatgagttagttcccttggaacagtttgcaagtacaccaagtgatgctgtgttgacgtcttttatgtctgtgtgtcaatcttctgagccagagaaaaataatcatgaaaacgatttgcagaatgagataaaacttcagaaattagatgaccaaattctacaacttctaaatgaaacttctaattcaatagataacgttcttgagaaagaccccagaccaaaaagagacacagatataacttctgaaagtgactatggaaacagaaaagaatgcaatagaaaagttcctcgaagatcaaaaatcccttatgatgccaaaaccattcaaactattaagcaccacaataaaaactacaactcttttgtaagttgtaatcgtaaaatgaaaccaccttaccttaaagaattatatgtaagctcatctttagcaaactgtcctatgttacaagaatcagaaaagccaaagactgaaataattaaagtagaccaaagtcactcagaagacaacacttaccagtcccttgttgaacagctagaccaagagagagagaagagatggagagctgagcaagccgaaaataaactcatggattatattgatgagctgcataaacatgcaaatgaaaaagaggatattcatagtctggctctacttaccacagataggctaaaggaaattatttttagagagagaaattccaaaggacaactcgaagttatggttcacaaacttcaaaatgaaattaaaaaactgactgttgaactaatgaaagcaaaagatcaacaagaggatcaccttaaacacttaagaaccctcgaaaaaacattagaaaaaatggagagacaaaaaaggcagcagcaggcagcacagataagactgatccaagaggtggaactcaaagcttcagctgccgatagagaaatatacttacttagaacttcccttcatcgagaaagagaacaagcgcaacaacttcatcaacttcttgcattgaaagaacaggaacacaggaaggaacttgaaacaagggagttttttactgatgctgacttccaggatgccttagctaaagaaatagccaaagaagagaaaaagcatgagcaaatgataaaagaataccaagagaaaattgacgtgttaagccagcagtatatggatttagaaaatgaattccgtattgctttaactgttgaagccagaagatttcaagatgttaaagatggttttgaaaatgttgcaactgagttagcaaagagcaaacatgctcttatttgggctcaacgaaaagaaaatgagtcttcctctttaattaaagatctgacctgtatggtaaaggaacaaaaaacaaaactggcagaagtttctaaattgaaacaagaaacagcagcaaatttacagaatcaaatcaacacccttgaaattttaattgaagatgacaagcagaagagtattcaaatagaacttctcaagcacgaaaaagtccagcttatttctgagctagcagccaaggaatcactaatatttggtttaaggacagaaagaaaagtatggggacatgagctggcacaacaaggatcttctctagcccaaaatcgtggaaaattggaggctcaaattgagagtttatctagagagaatgaatgtctgcgaaagacaaatgaaagtgatagtgatgcattaagaataaagtgcaaaatcatagacgaccaaactgaaactattagaaaattaaaagattgtttacaagaaaaagatgaacacatcaaaagattacaag

SEQ ID NO: 147917 - DNA, 3381 bp, Homo sapiens
  Payload ID: 9263
  Gene Symbol: LRFN1
  Gene Name: leucine rich repeat and fibronectin type III domain containing 1
  Uniprot ID: Q9P244
  ENST ID: ENST00000248668
  CDS Start-End: 1-2316
atggctccaggacccttctcctcggccctcctctcgccgccgcccgctgccctgccctttctgctgctgctctgggcgggggcatctcgtggccagccctgccccggccgctgcatctgccagaacgtggcgcccacactgacaatgctgtgcgccaagaccggcttgctctttgtgccgcccgccatcgaccggcgcgtggtggagctgcggctcaccgacaacttcatcgccgccgtgcgccgccgagacttcgccaacatgaccagcctggtgcacctcactctctcccggaacaccatcggccaggtggcagctggcgccttcgccgacctgcgtgccctccgggccctgcacctggacagcaaccgcctggcggaggtgcgcggcgaccagctccgcggcctgggcaacctccgccacctgatccttggaaacaaccagatccgccgggtggagtcggcggcctttgacgccttcctgtccaccgtggaggacctggatctgtcctacaacaacctggaggccctgccgtgggaggcggtgggccagatggtgaacctaaacaccctcacgctggaccacaacctcatcgaccacatcgcggaggggaccttcgtgcagcttcacaagctggtccgtctggacatgacctccaaccgcctgcataaactcccgcccgacgggctcttcctgaggtcgcagggcaccgggcccaagccgcccaccccgctgaccgtcagcttcggcggcaaccccctgcactgcaactgcgagctgctctggctgcggcggctgacccgcgaggacgacttagagacctgcgccacgcccgaacacctcaccgaccgctacttctggtccatccccgaggaggagttcctgtgtgagcccccgctgatcacacggcaggcggggggccgggccctggtggtggaaggccaggcggtgagcctgcgctgccgagcggtgggtgaccccgagccggtggtgcactgggtggcacctgatgggcggctgctggggaactccagccggacccgggtccggggggacgggacgctggatgtgaccatcaccaccttgagggacagtggcaccttcacttgtatcgcctccaatgctgctggggaagcgacggcgcccgtggaggtgtgcgtggtacctctgcctctgatggcacccccgccggctgccccgccgcctctcaccgagcccggctcctctgacatcgccacgccgggcagaccaggtgccaacgattctgcggctgagcgtcggctcgtggcagccgagctcacctcgaactccgtgctcatccgctggccagcccagaggcctgtgcccggaatacgcatgtaccaggttcagtacaacagttccgttgatgactccctcgtctacaggatgatcccgtccaccagtcagaccttcctggtgaatgacctggcggcgggccgtgcctacgacttgtgcgtgctggcggtctacgacgacggggccacagcgctgccggcaacgcgagtggtgggctgtgtacagttcaccaccgctggggatccggcgccctgccgcccgctgagggcccatttcttgggcggcaccatgatcatcgccatcgggggcgtcatcgtcgcctcggtcctcgtcttcatcgttctgctcatgatccgctataaggtgtatggcgacggggacagccgccgcgtcaagggctccaggtcgctcccgcgggtcagccacgtgtgctcgcagaccaacggcgcaggcacaggcgcggcacaggccccggccctgccggcccaggaccactacgaggcgctgcgcgaggtggagtcccaggctgcccccgccgtcgccgtcgaggccaaggccatggaggccgagacggcatccgcggagccggaggtggtccttggacgttctctgggcggctcggccacctcgctgtgcctgctgccatccgaggaaacttccggggaggagtctcgggccgcggtgggccctcgaaggagccgatccggcgccctggagccaccaacctcggcgccccctactctagctctagttcctgggggagccgcggcccggccgaggccgcagcagcgctattcgttcgacggggactacggggcactattccagagccacagttacccgcgccgcgcccggcggacaaagcgccaccggtccacgccgcacctggacggggctggagggggcgcggccggggaggatggagacctggggctgggctccgccagggcgtgcctggctttcaccagcaccgagtggatgctggagagtaccgtgtgagcggcgggcgggcgccgggacgcctgggtgccgcagaccaaacgcccagccgcacggacgctggggcgggactgggagaaagcgcagcgccaagacattggaccagagtggagacgcgcccttgtccccgggagggggcggggcagcctcgggctgcggctcgaggccacgcccccgtgcccagggcggggttcggggaccggctgccggcctcccttcccctatggactcctcgacccccctcctacccctcccctcgcgcgctcgcggacctcgctggagccggtgccttacacagcgaagcgcggggaggggcagggccccctgacactgcagcactgagacacgagccccctcccccagcccgtcacccggggccggggcgaggggcccatttcttgtatctggctggactagatcctattctgtcccgcggcggcctccaaagcctcccaccccaccccacgcacattcctggtccggtcgggtctggcttggggtccccctttctctgtttccctcgtttgtctctatcccgccctcttgtcgtctctctgtagtgcctgtctttccctatttgcctctcctttctctctgtcctgtcgtctcttgtccctcggccctccctggttttgtctagtctccctgtctctcctgatttcttctctttactcattctcccgggcaggtcccactggaaggaccagactctcccaaataaatccccacacgaacaaaatccaaaaccaaatccccctccctaccggagccgggaccctccgccgcagcagaattaaacttttttctgtgtctgaggccctgctgacctgtgtgtgtgtctgtatgtgtgtccgcgtgtagtgtgtgtgtgtgtgtgtgtgtgtgtgtgtgtgtgtgtgtgttgggggagggtgacctagattgcagcataaggactctaagtgagactgaaggaagatgggaagatgactaactggggccggaggagactggcagacaggcttttatcctctgagagacttagaggtggggaataatcacaaaaataaaatgatcataatagct

SEQ ID NO: 147918 - DNA, 3270 bp, Homo sapiens
  Payload ID: 9264
  Gene Symbol: LRFN2
  Gene Name: leucine rich repeat and fibronectin type III domain containing 2
  Uniprot ID: Q9ULH4
  ENST ID: ENST00000338305
  CDS Start-End: 544-2913
tatgcgcgcgcgcgtggggggcagtgtgcatgcggggagtacgggggagtgtgtttgtgtgtgcgtgtgggtgtgagtgcctggctccctctcgctgagacacacatacactcacacatacacaacccggcaggctcgtctgaacttgaagacaccccacattccaagatgcccgaggttcctgggaatgcctggggttcttcgatccggaaaatcctaccggcatcctcctagggagggattattattattatttttctttaatctggaagagaagagaacaagttgtgcttttccccccttcttcttgctaaatgccatggatataactgaataagcggctcagggctttccccgcgtggacgtccgaggccaccatctgcctgcattcgccggagccgccggagggtttagctcgagtctgtctcgggcggggaaggatgcgtggccgagccggggagcccgggcgccccgcggagccggcctcggtgccacccagccgggggtagatgctgcctcgcccaggcgctgagtgaccagaccatggagaccctgcttggtggcctgctagcgtttggcatggcgtttgccgtggtcgacgcctgccccaagtactgtgtctgccagaatctgtctgagtcactggggaccctgtgcccctccaaggggctgctctttgtaccccctgatattgaccggcggacagtggagctgcgcctgggcggcaacttcatcatccacatcagccgccaggactttgccaacatgacggggctggtggacctgaccctgtccaggaacaccatcagccacatccagcccttttcctttctggacctcgagagcctccgctccctgcatcttgacagcaatcggctgccaagccttggggaggacaccctccggggcctggtcaacctgcagcaccttatcgtgaacaacaaccagctgggcggcatcgcagatgaggcttttgaggacttcctgctgacattggaggatctggacctctcctacaacaacctccatggcctgccgtgggactccgtgcgacgcatggtcaacctccaccagctgagcctggaccacaacctgctggatcacatcgccgagggcacctttgcagacctgcagaaactggcccgcctggatctcacctccaatcggctgcagaagctgccccctgatcccatctttgcccgctcccaggcttcggctttgacagccacaccctttgccccacccttgtcctttagttttgggggtaacccacttcactgcaattgtgagcttctctggctgcggaggctcgagcgggacgatgacctggaaacctgtggctccccagggggcctcaagggtcgctacttctggcatgtgcgtgaggaggagtttgtgtgcgagccgcctctcatcacccagcacacacacaagttgctggttctggagggccaggcggccacactcaagtgcaaagccattggggaccccagcccccttatccactgggtagcccccgatgaccgcctggtagggaactcctcaaggaccgctgtctatgacaatggcaccctggacatcttcatcaccacatctcaggacagtggtgccttcacctgcattgctgccaatgctgccggagaggccacggccatggtggaggtctccatcgtccagctgccacacctcagcaacagcaccagccgcactgcaccccccaagtcccgcctctcagacatcactggctccagcaagaccagccggggaggtggaggcagtgggggcggagagcctcccaaaagccccccggaacgggctgtgcttgtgtctgaagtgaccaccacctcggccctggtcaagtggtctgtcagcaagtcagcaccccgggtgaagatgtaccagctgcagtacaactgctctgacgatgaggtactgatttacaggatgatcccagcctccaacaaggccttcgtggtcaacaacctggtgtcagggactggctacgacttgtgtgtgctggccatgtgggatgacacagccacgacactcacggccaccaacatcgtgggctgcgcccagttcttcaccaaggctgactacccgcagtgccagtccatgcacagccagattctgggcggcaccatgatcctggtcatcgggggcatcatcgtggccacgctgctggtcttcatcgtcatcctcatggtgcgctacaaggtctgcaaccacgaggcccccagcaagatggcagcggccgtgagcaatgtgtactcgcagaccaacggcgcccagccaccgcctccaagcagcgcaccagccggggccccgccgcagggcccgccgaaggtggtggtgcgcaacgagctcctggacttcaccgccagcctggcccgcgccagtgactcctcttcctccagctccctgggcagtggggaggctgcggggctgggacgggccccctggaggatcccaccctccgccccgcgccccaagcccagccttgaccgcctgatgggggccttcgcctccctggacctcaagagtcagagaaaggaggagctgctggactccaggactccagccgggagaggggctgggacgtcggcccggggccaccactcggaccgagagccactgctggggccccctgcggcccgggccaggagcctgctccccttgccgttggagggcaaggccaaacgcagccactccttcgacatgggggactttgctgctgcggcggcgggaggggtcgtgccgggcggctacagtcctcctcggaaggtctcgaacatctggacgaagcgcagcctctctgtcaacggcatgctcttgccctttgaggagagtgacctggtgggggcccgggggacttttggcagctccgaatgggtgatggagagcacggtctaggtgggggtgggcatgctccctttcctgtgcgcagggtgggagaaggggaaagaatctcactggcaagtgtttgtggagtttccatggtgatgtttacatccagggacagtttcgtctccctgtcaatggcctcgtgtccccccctaccccgcaacacccacatcacctccccaccacccggccggggtgtgctcagggaatgtggactcgctcaaatgccggactgagccctgagtgtttggaaaggcgagactccgcctttctaatcacaaatgtagcctacaagcaagcggctttggattgcttatgggtctagtgttgtttttatttcttaatttattttttttccatttccca

SEQ ID NO: 147919 - DNA, 2513 bp, Homo sapiens
  Payload ID: 9265
  Gene Symbol: LRFN3
  Gene Name: leucine rich repeat and fibronectin type III domain containing 3
  Uniprot ID: Q9BTN0
  ENST ID: ENST00000246529
  CDS Start-End: 453-2339
ccaaggggcctgaacccgagtttgggcctgaagtccttgctgcagacctgagtgcttaaatctggggcttgagacctcccaatcttgactcagcaccccaatatctgaatgcagaaccccgggatcggatctcagactctaaaccccaccgtttggctgcttagcatcccaagactggacctgggagaccctgaccctgaacaacccaaactggacccgtaaaactggaccctagaggcccaatatttaggggtctggaaccccgagtattaaggtctggagactccgttgccacagatttgagccgagtcaggacacagtccctctacagaagccttggggacaggaaaagcatgaccagatgctccctccagagccctgacctctgactcccctggagctaggactctgctccctggggctgcttctagctcaggacacccctgcccgcgatggccatcctcccgttgctcctgtgcctgctgccgctggcccctgcctcatccccaccccagtcagccacacccagcccatgtccccgccgctgccgctgccagacacagtcgctgcccctaagcgtgctgtgcccaggggcaggcctcctgttcgtgccaccctcgctggaccgccgggcagccgagctgcggctggcagacaacttcatcgcctccgtgcgccgccgcgacctggccaacatgacaggcctgctgcatctgagcctgtcgcggaacaccatccgccacgtggctgccggcgccttcgccgacctgcgggccctgcgtgccctgcacctggatggcaaccggctgacctcactgggcgagggccagctgcgcggcctggtcaacttgcgccacctcatcctcagcaacaaccagctggcagcgctggcggccggcgccctggatgattgtgccgagacactggaggacctcgacctctcctacaacaacctcgagcagctgccctgggaggccctgggccgcctgggcaacgtcaacacgttgggcctcgaccacaacctgctggcttctgtgcccgccggcgctttttcccgcctgcacaagctggcccggctggacatgacctccaaccgcctgaccacaatcccacccgacccactcttctcccgcctgcccctgctcgccaggccccggggctcgcccgcctctgccctggtgctggcctttggcgggaaccccctgcactgcaactgcgagctggtgtggctgcgtcgcctggcgcgggaggacgacctcgaggcctgcgcgtccccacctgctctgggcggccgctacttctgggcggtgggcgaggaggagtttgtctgcgagccgcccgtggtgactcaccgctcaccacctctggctgtgcccgcaggtcggccggctgccctgcgctgccgggcagtgggggacccagagccccgtgtgcgttgggtgtcaccccagggccggctgctaggcaactcaagccgtgcccgcgccttccccaatgggacgctggagctgctggtcaccgagccgggtgatggtggcatcttcacctgcattgcggccaatgcagctggcgaggccacagctgctgtggagctgactgtgggtcccccaccacctcctcagctagccaacagcaccagctgtgaccccccgcgggacggggatcctgatgctctcaccccaccctccgctgcctctgcttctgccaaggtggccgacactgggccccctaccgaccgtggcgtccaggtgactgagcacggggccacagctgctcttgtccagtggccggatcagcggcctatcccgggcatccgcatgtaccagatccagtacaacagctcggctgatgacatcctcgtctacaggatgatcccggcggagagccgctcgttcctgctgacggacctggcgtcaggccggacctacgatctgtgcgtgctcgccgtgtatgaggacagcgccacggggctcacggccacgcggcctgtgggctgcgcccgcttctccaccgaacctgcgctgcggccatgcggggcgccgcacgctcccttcctgggcggcacgatgatcatcgcgctgggcggcgtcatcgtagcctcggtactggtcttcatcttcgtgctgctaatgcgctacaaggtgcacggcggccagccccccggcaaggccaagattcccgcgcctgttagcagcgtttgctcccagaccaacggcgccctgggccccacgcccacgcccgccccgcccgccccggagcccgcggcgctcagggcccacaccgtggtccagctggactgcgagccctgggggcccggccacgaacctgtgggaccctagccaggcgcccccccctctaagggtcctctggccccacggacagcaggacccggacaccctgtgggacctggcctcaaactcaccaaatcgctcatggtttttaaaactctgatggggagggtgtcggggacaccggggcaaaacaagaaagtcctatttttccaagcttgggcg

SEQ ID NO: 147920 - DNA, 3689 bp, Homo sapiens
  Payload ID: 9265
  Gene Symbol: LRFN3
  Gene Name: leucine rich repeat and fibronectin type III domain containing 3
  Uniprot ID: Q9BTN0
  ENST ID: ENST00000588831
  CDS Start-End: 1055-2941
ctccatgttggccaggctggtctccaacgcctgatctcaaaagatccgcccgccttggcctcccaacgagccgggattacaggcgtgagccaccgcccccggctgtcagtgtgtcttgaggtctttccctaatcccagatggcacaagttttccctcttgcaggcagagaaaggagccttgggaaggagcccctctggcctgaaagatcaagcctattgctgggcatggccagattgaatcgggaattccggaaacccgagcctggaaccctgatctgggaccagcaccccgagatccggccgtggaaccccaagatctggagcctgaaccccagtatatggggctggaatctcaacatcggtcactgggacctcaatatttggagccggaaccccacaatttggaacacagaccccaatatttggagcagaaccccaagatttgacatctaaaacctcaagcctggagctgaactctgaattctgggcctgggaccttgaaatctgggactggatttccagtactgtaccctggaacccactcttggggacctgaaccctgggattcaggcctcaaattccaagatctggactgtgggattccaaggggcctgaacccgagtttgggcctgaagtccttgctgcagacctgagtgcttaaatctggggcttgagacctcccaatcttgactcagcaccccaatatctgaatgcagaaccccgggatcggatctcagactctaaaccccaccgtttggctgcttagcatcccaagactggacctgggagaccctgaccctgaacaacccaaactggacccgtaaaactggaccctagaggcccaatatttaggggtctggaaccccgagtattaaggtctggagactccgttgccacagatttgagccgagtcaggacacagtccctctacagaagccttggggacaggaaaagcatgaccagatgctccctccagagccctgacctctgactcccctggagctaggactctgctccctggggctgcttctagctcaggacacccctgcccgcgatggccatcctcccgttgctcctgtgcctgctgccgctggcccctgcctcatccccaccccagtcagccacacccagcccatgtccccgccgctgccgctgccagacacagtcgctgcccctaagcgtgctgtgcccaggggcaggcctcctgttcgtgccaccctcgctggaccgccgggcagccgagctgcggctggcagacaacttcatcgcctccgtgcgccgccgcgacctggccaacatgacaggcctgctgcatctgagcctgtcgcggaacaccatccgccacgtggctgccggcgccttcgccgacctgcgggccctgcgtgccctgcacctggatggcaaccggctgacctcactgggcgagggccagctgcgcggcctggtcaacttgcgccacctcatcctcagcaacaaccagctggcagcgctggcggccggcgccctggatgattgtgccgagacactggaggacctcgacctctcctacaacaacctcgagcagctgccctgggaggccctgggccgcctgggcaacgtcaacacgttgggcctcgaccacaacctgctggcttctgtgcccgccggcgctttttcccgcctgcacaagctggcccggctggacatgacctccaaccgcctgaccacaatcccacccgacccactcttctcccgcctgcccctgctcgccaggccccggggctcgcccgcctctgccctggtgctggcctttggcgggaaccccctgcactgcaactgcgagctggtgtggctgcgtcgcctggcgcgggaggacgacctcgaggcctgcgcgtccccacctgctctgggcggccgctacttctgggcggtgggcgaggaggagtttgtctgcgagccgcccgtggtgactcaccgctcaccacctctggctgtgcccgcaggtcggccggctgccctgcgctgccgggcagtgggggacccagagccccgtgtgcgttgggtgtcaccccagggccggctgctaggcaactcaagccgtgcccgcgccttccccaatgggacgctggagctgctggtcaccgagccgggtgatggtggcatcttcacctgcattgcggccaatgcagctggcgaggccacagctgctgtggagctgactgtgggtcccccaccacctcctcagctagccaacagcaccagctgtgaccccccgcgggacggggatcctgatgctctcaccccaccctccgctgcctctgcttctgccaaggtggccgacactgggccccctaccgaccgtggcgtccaggtgactgagcacggggccacagctgctcttgtccagtggccggatcagcggcctatcccgggcatccgcatgtaccagatccagtacaacagctcggctgatgacatcctcgtctacaggatgatcccggcggagagccgctcgttcctgctgacggacctggcgtcaggccggacctacgatctgtgcgtgctcgccgtgtatgaggacagcgccacggggctcacggccacgcggcctgtgggctgcgcccgcttctccaccgaacctgcgctgcggccatgcggggcgccgcacgctcccttcctgggcggcacgatgatcatcgcgctgggcggcgtcatcgtagcctcggtactggtcttcatcttcgtgctgctaatgcgctacaaggtgcacggcggccagccccccggcaaggccaagattcccgcgcctgttagcagcgtttgctcccagaccaacggcgccctgggccccacgcccacgcccgccccgcccgccccggagcccgcggcgctcagggcccacaccgtggtccagctggactgcgagccctgggggcccggccacgaacctgtgggaccctagccaggcgcccccccctctaagggtcctctggccccacggacagcaggacccggacaccctgtgggacctggcctcaaactcaccaaatcgctcatggtttttaaaactctgatggggagggtgtcggggacaccggggcaaaacaagaaagtcctatttttccaagcttgggcgaagacccttgccctcgtctctgtctatgggggttgggggacggagcaggggtctggagctggggaatgcctcctttggggagacaccccctccccgcccagttcagtctgaggaccccggaggaggctgaggatggcgatccattcagacaatagatgttccctgcgtgtcggctctgagcatgccctgggttgggggatgctgtggtgatccagatagccctgagccctgcccgcaggggcctaaagtcaaatgggagacagacacatccccagacagtgatagcacagagtgaccagggatgtggggatgagggaagcctgggggattgtgacagtccagaagaggtacccttgctcagccccaggtgtggtcagggagggcttcctggaggaggacacatgtgatctgagaatgacatatgaaggagataactgggcaaagagcagaaggaaagctctttcaggcagagggcacagcacaagcaaggtggtggtgtgccctgggcactgggggtgctatggtagaggtgaggcaggagggttgagcagggtctaggacctccaggctgagg

SEQ ID NO: 147921 - DNA, 2431 bp, Homo sapiens
  Payload ID: 9266
  Gene Symbol: LRFN4
  Gene Name: leucine rich repeat and fibronectin type III domain containing 4
  Uniprot ID: Q6PJG9
  ENST ID: ENST00000309602
  CDS Start-End: 244-2151
cttgtccccagcgcctggactcccccttaactgcttgggaaatgtgacctttgctctggggggcctggccctgcaggccccaaccttccctcatctctggcggccctcttgggcctctgacccagcccctccccgggccaggctcacagaagctggcttctgggactgtcctgggcccaagtgggcacctgcgccagccccacctgtgcctgggctgtggccccttcctacagggcgctcaccatggccccgccgctcctgctgctgctgctggccagtggagcggccgcctgcccgctgccctgcgtctgccagaacctgtccgagtcgctcagcaccctctgtgcccaccgaggcctgctgtttgtgccgcccaacgtggaccggcgcacagtggagctgcggctggctgacaacttcatccaggccctggggccccctgacttccgcaacatgacgggactggtggacctgacactgtctcgcaatgccatcacccgcattggggcccgcgcctttggggacctcgagagcctgcgttccctccaccttgacggcaacaggctggtggagctgggcaccgggagcctccggggccccgtcaatctgcagcacctcatcctcagcggcaaccagctgggccgcatcgcgccgggagccttcgacgacttcctagagagcctggaggacctggacctgtcctacaacaacctccggcaggtgccctgggccggcatcggcgccatgcctgccctgcacaccctcaacctggaccataaccttattgacgcactgcccccaggcgccttcgcccagctcggtcagctctcccgcctggacctcacctccaaccgcctggccacgctggctccggacccgcttttctctcgtgggcgtgatgcagaggcctctcccgcccccctggtgctgagctttagcgggaaccccctgcactgcaactgtgagctgctgtggctgcggcggctggcgcggccggacgacctggaaacgtgcgcctccccgcccggcctggccggccgctacttctgggcagtgcccgagggcgagttctcctgtgagccgcccctcattgcccgccacacgcagcgcctctgggtgctggaaggccagcgggccacgctgcggtgccgggccctgggtgaccccgcgcctaccatgcactgggtcggtcctgacgaccggttggttggcaactcctcccgagcccgggctttccccaacgggaccttagagattggggtgaccggcgctggggacgctgggggctacacctgcatcgccaccaaccctgctggtgaggccacagcccgagtagaactgcgggtgctggccttgccccatggtgggaacagcagtgccgaggggggccgccccgggccctcggacatcgccgcctccgctcgcactgctgccgagggtgaggggacgctggagtctgagccagccgtgcaggtgacggaggtgaccgccacctcagggctggtgagctggggtcccgggcggccagccgacccagtgtggatgttccaaatccagtacaacagcagcgaagatgagaccctcatctaccggattgtcccagcctccagccaccacttcctgctgaagcacctcgtccccggcgctgactatgacctctgcctgctggccttgtcaccggccgctgggccctctgacctcacggccaccaggctgctgggctgtgcccatttctccacgctgccggcctcgcccctgtgccacgccctgcaggcccacgtgctgggcgggaccctgaccgtggccgtggggggtgtgctggtggctgccttactggtcttcactgtggccttgctggttcggggccggggggccggaaatggccgcctccccctcaagctcagccacgtccagtcccagaccaatggaggccccagccccacacccaaggcccacccgccgcggagccccccgccccggccgcagcgcagctgctctctggacctgggagatgccgggtgctacggttatgccaggcgcctgggaggagcttgggcccgacggagccactctgtgcatggggggctgctcggggcagggtgccggggggtaggaggcagcgccgagcggctggaagagagtgtggtgtgatggacgggcagcttcctgtgtgctccaagggatgagcctcgtggggcagagggcccggggccgccgcctggcctgggagtccctccctggtttttattctcagtacctcaggctcccctgtgtacttggaggggcagggagccctttcctcggttctggcctccagaccagggtaagggcaggcccctccaacaggtgctcacagccaccgaggcaggggctgcagccacccactgggagtcttgtttttatttataataaaattgttggggacacctca

SEQ ID NO: 147922 - DNA, 1550 bp, Homo sapiens
  Payload ID: 9266
  Gene Symbol: LRFN4
  Gene Name: leucine rich repeat and fibronectin type III domain containing 4
  ENST ID: ENST00000393952
  CDS Start-End: 190-1446
aaggtgccgggaaccgagcgagccggggccgcgggcccgagcgccatgggcccgagggtgggcggcgggcggccggtcatccccgggcctcgtccccgcgggagagcggccaggagtcggcgggggccggccgggctcgcagggaggccggcccgcgccccctgagcgacggacaccagggcgctcaccatggccccgccgctcctgctgctgctgctggccagtggagcggccgcctgcccgctgccctgcgtctgccagaacctgtccgagtcgctcagcaccctctgtgcccaccgaggcctgctgtttgtgccgcccaacgtggaccggcgcacagtggagctgcggctggctgacaacttcatccaggccctggggccccctgacttccgcaacatgacgggactggtggacctgacactgtctcgcaatgccatcacccgcattggggcccgcgcctttggggacctcgagagcctgcgttccctccaccttgacggcaacaggctggtggagctgggcaccgggagcctccggggccccgtcaatctgcagcacctcatcctcagcggcaaccagctgggccgcatcgcgccgggagccttcgacgacttcctagagagcctggaggacctggacctgtcctacaacaacctccggcaggtgccctgggccggcatcggcgccatgcctgccctgcacaccctcaacctggaccataaccttattgacgcactgcccccaggcgccttcgcccagctcggtcagctctcccgcctggacctcacctccaaccgcctggccacgctggctccggacccgcttttctctcgtgggcgtgatgcagaggcctctcccgcccccctggtgctgagctttagcgggaaccccctgcactgcaactgtgagctgctgtggctgcggcggctggcgcggccggacgacctggaaacgtgcgcctccccgcccggcctggccggccgctacttctgggcagtgcccgagggcgagttctcctgtgagccgcccctcattgcccgccacacgcagcgcctctgggtgctggaaggccagcgggccacgctgcggtgccgggccctgggtgaccccgcgcctaccatgcactgggtcggtcctgacgaccggttggttggcaactcctcccgagcccgggctttccccaacgggaccttagagattggggtgaccggcgctggggacgctgggggctacacctgcatcgccaccaaccctgctggtgaggccacagcccgagtagaactgcgggtgctggccttgccccatggtgggaacagcaggcccggggccgccgcctggcctgggagtccctccctggtttttattctcagtacctcaggctcccctgtgtacttggaggggcagggagccctttcctcggttctggcctccagaccagggtaagggcaggcccctccaacaggtgctcacagccaccgaggcaggggctgcagccacccactgggagtcttgtttttatttataataaaattgttggggacacctca

SEQ ID NO: 147923 - DNA, 3723 bp, Homo sapiens
  Payload ID: 9267
  Gene Symbol: LRFN5
  Gene Name: leucine rich repeat and fibronectin type III domain containing 5
  Uniprot ID: Q96NI6
  ENST ID: ENST00000298119
  CDS Start-End: 1190-3349
atttgactgtcttttatccaactgcccagaagcaaatgtgttaactcggcgatgccccttcatgcccgggttcttgcagagctctgaggacgcccagacccattttcctggctggatttggagcggctgctgggctgtggacccaggtgtgtggatcgctttacccagaagcttggaaagcgccaatattaacctgcttccaggtacatcacaaggtcaagagagtgtcttgcagccctcttgtttccgtgtatctacaccttcttctcttggccagaaggatatttacgttttggttcacagcatttgaagccaaaagttcagcccttcgaactggtttgctatacaaaacaaaacaaaacaaataaggtaatgaggattgcttattaaactgcttaacaaaatccccgactcttcctcagccctttctcggctccctcctccccaccaaaatgtcaccagctcttgaattacgtggattcgggttggaggagaacttgaaggaaacgtgattaaagggctatgcgagaacgctctctttgctgcccgcggtccggtgggcttcgaagccaatcgtgagaaggaccggttccctccgtgctgcttcctccccgtgcagtgctgggtgtgcgtgtgcgagtgtgagtgcaagtgcgcgcgcgcccgggtgcgagtgtgtgtgagtgtgagcgtgtgtctgtgtgtgcgtgcgcggccgccctgcctctgcccgctccccgggcgcggagccgcgggtttcatggggcgattgcagcgattcccccacccagagcgacctgcgggcagcggcggcagtggcaggagccgcctttccgattccctacgatgcgggtgctgagctatggcaaagggcagcgaagtgacgagcgagacccgcgtacgactgtgaaagccacctggagccaccttgccgggattgtacctgcaggcagaaagtcttcctacgaccgtcttttcccttagaggcaccagaatccctgtaaccattcatccaggtgttgagaagatatgtagcagccgagcacccatcttttgacaccgtcctctgaaatcagctttggagatgctttcactctgtccgtcttctgcagcagccaggcagagtgccgactccttcacagccgtgaggaactcttcaggctccagaagctcttaaacctgatctacaatggaaaaaattcttttttatctgtttctcattggcatagcagtgaaagctcagatctgtccaaagcgttgtgtctgtcagattttgtctcctaatcttgcaaccctttgtgccaagaaagggcttttatttgttccaccaaacattgacagaagaactgtggaactgcggttggcagacaattttgttacaaatattaaaaggaaagattttgccaatatgaccagcttggtggacctgactctatccaggaatacaataagttttattacacctcatgctttcgctgacctacgaaatttgagggctttgcatttgaatagcaacagattgactaaaattacaaatgatatgttcagtggtctttccaatcttcatcatttgatactgaacaacaatcagctgactttaatttcctctacagcgtttgatgatgtcttcgcccttgaggagctggatctgtcctataataatctagaaaccattccttgggatgctgttgagaagatggttagcttgcatacccttagtttggatcacaatatgattgataacattcctaaggggaccttctcccatttgcacaagatgactcggttagatgtgacatcaaataaattgcagaagctaccacctgaccctctctttcagcgagctcaggtactagcaacctcaggaatcataagcccatctacttttgcattaagttttggtggaaaccccttgcattgcaattgtgaattgttgtggttgaggcgtctgtccagagaagatgacttagagacctgtgcttctcctccacttttaactggccgctacttttggtcaattcctgaagaagagtttttgtgtgagcctcctctcattactcgtcatacacatgagatgagagtcctggagggacaaagggcaacactgaggtgcaaagccaggggagaccctgagcctgcaattcactggatttctcctgaagggaagcttatttcaaatgcaacaagatctctggtgtatgataacggaacacttgacattcttatcacaactgtaaaggatacaggtgcttttacctgcattgcttccaatcctgctggggaagcaacacaaatagtggatcttcatataattaagctccctcacttactaaatagtacaaaccatatccatgagcctgatcctggttcttcagatatctcaacttctaccaagtcaggttctaatacaagcagtagtaatggtgatactaaattgagtcaagataaaattgtggtggcagaagctacatcatcaacggcactacttaaatttaattttcaaagaaatatccctggaatacgtatgtttcaaatccagtacaatggtacttatgatgacacccttgtttacagaatgatacctcctacgagcaaaacttttctggtcaataatctggctgctggaactatgtatgacttgtgtgtcttggccatatatgatgatggcatcacttccctcactgccacaagagtcgtgggttgcatccagtttactacggaacaggattatgtgcgttgccatttcatgcagtctcagtttttgggaggcaccatgattattattattggtggaatcattgtagcatctgtgctggtattcatcattattctgatgatccggtataaggtttgcaacaataatgggcaacacaaggtcaccaaggttagcaatgtttattcccaaactaacggggctcaaatacaaggctgtagtgtaacgctgccccagtccgtgtccaaacaagctgtgggacacgaagagaatgcccagtgttgtaaagctaccagtgacaatgtgattcaatcttcagaaacttgttcgagtcaggactcctctaccactacctctgctttgcctccttcctggacttcaagcacttctgtgtcccaaaagcagaaaagaaagactggcacaaagccaagtacagaaccacagaatgaagccgtcacaaatgttgaatcccaaaacactaacaggaacaactcaactgccttgcagttagctagccgtcctcccgattctgtcacagaggggcccacgtctaaaagagcacatataaagccaaatgctttgctgactaatgttgaccagattgtccaggaaacacagaggctggagttaatctgaagagcaccacttctcctctctctcctgaaaaaatttgccactgatatttttactggataaaattcaaaaatgtttcaattcacaaaggctaattgttgaactggtgtcgtagaagaaattgtctacaggagccaaggtgaaagtctctgatgacggcggaactggctccattagaccatggttcatcctcttttaaaaccaaatttttttttcttctggcctacaagtattttttttttaaaaaagaaaaaaagcctacattggcatcaagttctgtatcaatccatcttacattgccatccatgatttaacagactgtagaatcttgaataatctatatcactttaacaaataaatgttttactatgacagaa

SEQ ID NO: 147924 - DNA, 4253 bp, Homo sapiens
  Payload ID: 9267
  Gene Symbol: LRFN5
  Gene Name: leucine rich repeat and fibronectin type III domain containing 5
  ENST ID: ENST00000554171
  CDS Start-End: 2433-3833
aacttcagtgagagatagaacaacatgttaaaggattatgtggaaggagttttgggggaggaattcctgaagttcataaagatgagactacttgaagaagaatttgattcctctctaaaaagattaatagaacttacgagcttaggaacttagaagttcagcaggactgttttatctgcagctgtctttggtcatagtcaatataaaactccacatgcttcacaaatgcgtttactcatctgtttatgtgacactaacactccgtggaagagattgttacaggagatagagttattgagtcaaccccagacactaatcaggaactgactccactttacatggagatatcatcaacagaacatttgaaagtgtaggtattcagggagcactgaaggaaatacaataacattagagttggaagtaaaccatgcagggagaaaaagaccattttttctctttcaaggatgaacaactaaaactggtcgaggaaagtgtgtcagagggctcctccatcttgagagaataggaggaggggatatctgccaagaatgagaaaaagaaatgaagatttacaactcaggaaaaaatgatcagtaaaacattacaaagccttttaaagcaacgtgaagatcttgtttgctactagaaacatgaatttgtggcgggcaaggtacatgttattgtgctgcagcccagggaaggtaatggagaagtaggtgattttgtgtagtgagggacttgtgaccactgttggtaatagcacagaacataattatggaggggcagtaagggttacatgataatagttgactattaatattaggagaagcgcaggtagctagaaaggaacaaatgagttgagtcaattagaaagaaatttagtttgaagtttttgatgaatgtaaagaggcaaaaatgaattactttgtgagacatgggggcaaaaaaatatctgaaactttgggtttgaaatatgctatgtgatgacaagttacaaggcatggttatatgaagcgtaaacgagtgatagagagtgaatatgatcatcaatagcatgaaggagagaagcttttccttttttaaaaacaggatgatatggggtttcacaatgtattattagaggtagtatagatgtctgcatgtgtaagacagaaaagaaaagagaagagaagaaaagaaaagaaaaacaaaacatgcaaaccggtttttgaacttgtcgagtagggagaaagtggatcctagctttgaggatttgaaaagagggatataatcataaaatcatagagtaataggtttgggaagaaacttagaactaatattgtacaatactataacttatagatgaggaagatcataaccaagagaggaaatttcttgtccagaaacagctatctcttagataatggttgggactagaatgcaaggtagttaacctcccttgttcttggtaacagtaaagatgatggctgtggtggtagtgattttgaacatagtggtgtaggcatacataccaagagcttattaaataagaaaacttcgttcctagctaatacaaaatggaaaggtaaattaatgtttggctttaatgctccctccaaaatgttagctctgtaaggacaggggtttttcatctcttatttcttggtaacatatctgattgagttaatactcattatatatttgcagaatacatgaataaacacacctttttaaaatttagaatatgttgatcaattagatgctattgtagaactatgagtctgctaaagggaatgttattttatgaagcatttatcactccaagtattcactaagtattgatggaccatcagaatacataacacttactcagctcataatatgaaccacatgctgtacatacattattttttagtcctcgtaataactcttgaaagtaattattataccaatggggacctaagcttgtatttaaactgtcaatttcttactgctagagctcagaccaaaaatatatagtgaacttattgggcagatgttacaaaagataatttgtgtgataaagtctctcttgggacagaatacctctttaaacaaagaagatgtcaggccgaagtgggttcatcacaaagcattaattgatttgatattttcaaagatatttgagctaaatttacatgataaggagttagctaggcaaagaagaggaattaggatattccaaattggtggtgcagatgcctcacatatccaaaagaatccctgtaaccattcatccaggtgttgagaagatatgtagcagccgagcacccatcttttgacaccgtcctctgaaatcagctttggagatgctttcactctgtccgtcttctgcagcagccaggcagagtgccgactccttcacagccgtgaggaactcttcaggctccagaagctcttaaacctgatctacaatggaaaaaattcttttttatctgtttctcattggcatagcagtgaaagctcagatctgtccaaagcgttgtgtctgtcagattttgtctcctaatcttgcaaccctttgtgccaagaaagggcttttatttgttccaccaaacattgacagaagaactgtggaactgcggttggcagacaattttgttacaaatattaaaaggaaagattttgccaatatgaccagcttggtggacctgactctatccaggaatacaataagttttattacacctcatgctttcgctgacctacgaaatttgagggctttgcatttgaatagcaacagattgactaaaattacaaatgatatgttcagtggtctttccaatcttcatcatttgatactgaacaacaatcagctgactttaatttcctctacagcgtttgatgatgtcttcgcccttgaggagctggatctgtcctataataatctagaaaccattccttgggatgctgttgagaagatggttagcttgcatacccttagtttggatcacaatatgattgataacattcctaaggggaccttctcccatttgcacaagatgactcggttagatgtgacatcaaataaattgcagaagctaccacctgaccctctctttcagcgagctcaggtactagcaacctcaggaatcataagcccatctacttttgcattaagttttggtggaaaccccttgcattgcaattgtgaattgttgtggttgaggcgtctgtccagagaagatgacttagagacctgtgcttctcctccacttttaactggccgctacttttggtcaattcctgaagaagagtttttgtgtgagcctcctctcattactcgtcatacacatgagatgagagtcctggagggacaaagggcaacactgaggtgcaaagccaggggagaccctgagcctgcaattcactggatttctcctgaagggaagcttatttcaaatgcaacaagatctctggtgtatgataacggaacacttgacattcttatcacaactgtaaaggatacaggtgcttttacctgcattgcttccaatcctgctggggaagcaacacaaatagtggatcttcatataattaagctccctcacttactaaatagtacaaaccatatccatgagcctgatcctggttcttcagatatctcaacttctaccaagtcaggttctaatacaagcagtagtaatggtgatactaaattgagtcaagataaaattgtggtggcagaagctacatcatcaacggcactacttaaatttaattttcaaagaaatatccctggaatacgtatgtttcaaatccagtacaatggtacttatgatgacacccttgtttacagatgctttgctgactaatgttgaccagattgtccaggaaacacagaggctggagttaatctgaagagcaccacttctcctctctctcctgaaaaaatttgccactgatatttttactggataaaattcaaaaatgtttcaattcacaaaggctaattgttgaactggtgtcgtagaagaaattgtctacaggagccaaggtgaaagtctctgatgacggcggaactggctccattagaccatggttcatcctcttttaaaaccaaatttttttttcttctggcctacaagtattttttttttaaaaaagaaaaaaagcctacattggcatcaagttctgtatcaatccatcttacattgccatccatgatttaacagactgtagaatcttgaataatctatatcactttaacaaataaatgttttactatgacagaa

SEQ ID NO: 147925 - DNA, 2121 bp, Homo sapiens
  Payload ID: 9267
  Gene Symbol: LRFN5
  Gene Name: leucine rich repeat and fibronectin type III domain containing 5
  ENST ID: ENST00000554120
  CDS Start-End: 345-1742
gatgcgggtgctgagctatggcaaagggcagcgaagtgacgagcgagacccgcgtacgactgtgaaagccacctggagccaccttgccgggattgtacctgcaggcagaaagtcttcctacgaccgtcttttcccttagaggcaccagaatccctgtaaccattcatccaggtgttgagaagatatgtagcagccgagcacccatcttttgacaccgtcctctgaaatcagctttggagatgctttcactctgtccgtcttctgcagcagccaggcagagtgccgactccttcacagccgtgaggaactcttcaggctccagaagctcttaaacctgatctacaatggaaaaaattcttttttatctgtttctcattggcatagcagtgaaagctcagatctgtccaaagcgttgtgtctgtcagattttgtctcctaatcttgcaaccctttgtgccaagaaagggcttttatttgttccaccaaacattgacagaagaactgtggaactgcggttggcagacaattttgttacaaatattaaaaggaaagattttgccaatatgaccagcttggtggacctgactctatccaggaatacaataagttttattacacctcatgctttcgctgacctacgaaatttgagggctttgcatttgaatagcaacagattgactaaaattacaaatgatatgttcagtggtctttccaatcttcatcatttgatactgaacaacaatcagctgactttaatttcctctacagcgtttgatgatgtcttcgcccttgaggagctggatctgtcctataataatctagaaaccattccttgggatgctgttgagaagatggttagcttgcatacccttagtttggatcacaatatgattgataacattcctaaggggaccttctcccatttgcacaagatgactcggttagatgtgacatcaaataaattgcagaagctaccacctgaccctctctttcagcgagctcaggtactagcaacctcaggaatcataagcccatctacttttgcattaagttttggtggaaaccccttgcattgcaattgtgaattgttgtggttgaggcgtctgtccagagaagatgacttagagacctgtgcttctcctccacttttaactggccgctacttttggtcaattcctgaagaagagtttttgtgtgagcctcctctcattactcgtcatacacatgagatgagagtcctggagggacaaagggcaacactgaggtgcaaagccaggggagaccctgagcctgcaattcactggatttctcctgaagggaagcttatttcaaatgcaacaagatctctggtgtatgataacggaacacttgacattcttatcacaactgtaaaggatacaggtgcttttacctgcattgcttccaatcctgctggggaagcaacacaaatagtggatcttcatataattaagctccctcacttactaaatagtacaaaccatatccatgagcctgatcctggttcttcagatatctcaacttctaccaagtcaggttctaatacaagcagtagtaatggtgatactaaattgagtcaagataaaattgtggtggcagaagctacatcatcaacggcactacttaaatttaattttcaaagaaatatccctggaatacgtatgtttcaaatccagtacaatggtacttatgatgacacccttgtttacagaggctggagttaatctgaagagcaccacttctcctctctctcctgaaaaaatttgccactgatatttttactggataaaattcaaaaatgtttcaattcacaaaggctaattgttgaactggtgtcgtagaagaaattgtctacaggagccaaggtgaaagtctctgatgacggcggaactggctccattagaccatggttcatcctcttttaaaaccaaatttttttttcttctggcctacaagtattttttttttaaaaaagaaaaaaagcctacattggcatcaagttctgtatcaatccatcttacattgccatccatgatttaacagactgtagaatcttgaataatctatatcactttaacaaataaatgttttactatgacagaa

SEQ ID NO: 147926 - DNA, 3055 bp, Homo sapiens
  Payload ID: 9268
  Gene Symbol: LINGO1
  Gene Name: leucine rich repeat and Ig domain containing 1
  Uniprot ID: Q96FE5
  ENST ID: ENST00000355300
  CDS Start-End: 176-2038
gcgcggggcggacagacggacagccagccccgcgagggcgcgcggactgccgggcggaggtgtcggaggaggaggaaacggaggagggggctgggcaggggctggggcctggtcgggccggctggagagacatgcgattggtgaccgagccgagcggaccgaaggcgcgcccgagatgcaggtgagcaagaggatgctggcggggggcgtgaggagcatgcccagccccctcctggcctgctggcagcccatcctcctgctggtgctgggctcagtgctgtcaggctcggccacgggctgcccgccccgctgcgagtgctccgcccaggaccgcgctgtgctgtgccaccgcaagcgctttgtggcagtccccgagggcatccccaccgagacgcgcctgctggacctaggcaagaaccgcatcaaaacgctcaaccaggacgagttcgccagcttcccgcacctggaggagctggagctcaacgagaacatcgtgagcgccgtggagcccggcgccttcaacaacctcttcaacctccggacgctgggtctccgcagcaaccgcctgaagctcatcccgctaggcgtcttcactggcctcagcaacctgaccaagctggacatcagcgagaacaagatcgttatcctactggactacatgtttcaggacctgtacaacctcaagtcactggaggttggcgacaatgacctcgtctacatctctcaccgcgccttcagcggcctcaacagcctggagcagctgacgctggagaaatgcaacctgacctccatccccaccgaggcgctgtcccacctgcacggcctcatcgtcctgaggctccggcacctcaacatcaatgccatccgggactactccttcaagaggctgtaccgactcaaggtcttggagatctcccactggccctacttggacaccatgacacccaactgcctctacggcctcaacctgacgtccctgtccatcacacactgcaatctgaccgctgtgccctacctggccgtccgccacctagtctatctccgcttcctcaacctctcctacaaccccatcagcaccattgagggctccatgttgcatgagctgctccggctgcaggagatccagctggtgggcgggcagctggccgtggtggagccctatgccttccgcggcctcaactacctgcgcgtgctcaatgtctctggcaaccagctgaccacactggaggaatcagtcttccactcggtgggcaacctggagacactcatcctggactccaacccgctggcctgcgactgtcggctcctgtgggtgttccggcgccgctggcggctcaacttcaaccggcagcagcccacgtgcgccacgcccgagtttgtccagggcaaggagttcaaggacttccctgatgtgctactgcccaactacttcacctgccgccgcgcccgcatccgggaccgcaaggcccagcaggtgtttgtggacgagggccacacggtgcagtttgtgtgccgggccgatggcgacccgccgcccgccatcctctggctctcaccccgaaagcacctggtctcagccaagagcaatgggcggctcacagtcttccctgatggcacgctggaggtgcgctacgcccaggtacaggacaacggcacgtacctgtgcatcgcggccaacgcgggcggcaacgactccatgcccgcccacctgcatgtgcgcagctactcgcccgactggccccatcagcccaacaagaccttcgctttcatctccaaccagccgggcgagggagaggccaacagcacccgcgccactgtgcctttccccttcgacatcaagaccctcatcatcgccaccaccatgggcttcatctctttcctgggcgtcgtcctcttctgcctggtgctgctgtttctctggagccggggcaagggcaacacaaagcacaacatcgagatcgagtatgtgccccgaaagtcggacgcaggcatcagctccgccgacgcgccccgcaagttcaacatgaagatgatatgaggccggggcggggggcagggacccccgggcggccgggcaggggaaggggcctggccgccacctgctcactctccagtccttcccacctcctccctacccttctacacacgttctctttctccctcccgcctccgtcccctgctgccccccgccagccctcaccacctgccctccttctaccaggacctcagaagcccagacctggggaccccacctacacaggggcattgacagactggagttgaaagccgacgaaccgacacgcggcagagtcaataattcaataaaaaagttacgaactttctctgtaacttgggtttcaataattatggatttttatgaaaacttgaaataataaaaagagaaaaaaactatttcctatagctagtcggaatgcaaacttttgacgtcctgattgctccagggccctcttccaactcagtttcttgtttttctcttcctcctcctcctcttcttcctcctttctcttctcttccccagtggggagggatcactcaggaaaacaggaaaggaggttccagccccacccacctgcccaccccgccccaggcaccatcaggagcaggctagggggcaggcctgggcccagctccgggctggctttttgcagggcgcaggtggaggggacaggtctgccgatgggggtgggagcctgtctgctgggctgccaggcggcaccactgcaaggggtgggagcctggcttgggtgtggctgagactctggacagaggctggggtcctcctgggggacagcacagtcagtggagagagccaggggctggaggtggggcccaccccagcctctggtcccagctctgctgctcacttgctgtgtggcctcaagcaggtcactggcctctctgggcctcagtctccacatctgtacaaatgggaacattaccccctgccctgcctacctcacagggctgttgtgaggaattgatgagatgatgtatgtgaaacactttgtaacctgtaaagcgctgtgcacacgtg

SEQ ID NO: 147927 - DNA, 1035 bp, Homo sapiens
  Payload ID: 9268
  Gene Symbol: LINGO1
  Gene Name: leucine rich repeat and Ig domain containing 1
  ENST ID: ENST00000557798
  CDS Start-End: 58-1035
tccagacaggactgtccagagcaacggtgtgccagagagactgagaagtacccagaaatggtgcagctggaacagaaggtgagcaagaggatgctggcggggggcgtgaggagcatgcccagccccctcctggcctgctggcagcccatcctcctgctggtgctgggctcagtgctgtcaggctcggccacgggctgcccgccccgctgcgagtgctccgcccaggaccgcgctgtgctgtgccaccgcaagcgctttgtggcagtccccgagggcatccccaccgagacgcgcctgctggacctaggcaagaaccgcatcaaaacgctcaaccaggacgagttcgccagcttcccgcacctggaggagctggagctcaacgagaacatcgtgagcgccgtggagcccggcgccttcaacaacctcttcaacctccggacgctgggtctccgcagcaaccgcctgaagctcatcccgctaggcgtcttcactggcctcagcaacctgaccaagctggacatcagcgagaacaagatcgttatcctactggactacatgtttcaggacctgtacaacctcaagtcactggaggttggcgacaatgacctcgtctacatctctcaccgcgccttcagcggcctcaacagcctggagcagctgacgctggagaaatgcaacctgacctccatccccaccgaggcgctgtcccacctgcacggcctcatcgtcctgaggctccggcacctcaacatcaatgccatccgggactactccttcaagaggctgtaccgactcaaggtcttggagatctcccactggccctacttggacaccatgacacccaactgcctctacggcctcaacctgacgtccctgtccatcacacactgcaatctgaccgctgtgccctacctggccgtccgccacctagtctatctccgcttcctcaacctctcctacaaccccatcagcaccattgagggctccatgttgcatgagctgctccggctgcaggagatccagctggtgggcggg

SEQ ID NO: 147928 - DNA, 2677 bp, Homo sapiens
  Payload ID: 9268
  Gene Symbol: LINGO1
  Gene Name: leucine rich repeat and Ig domain containing 1
  Uniprot ID: Q96FE5
  ENST ID: ENST00000561030
  CDS Start-End: 459-2303
agaggataattccccattatacagagatatttagcctaatagaagccgacagatcattcagggcagtaatgtactccggcttcaagcgtgtagtttcctcagcctgaactcccagattaaaggctccttgcccagcccgccctgtgccggtgcctgtgaccttgactgcaatgatgggggatcttatgaccatgacctggctaccttgagtctgtggggctacacagccttcagcctgcatctccagggctctgactctatccagctcctggaccagctcccaagtctactcctgaccccagcctgggccaaggggacttctcaagctttgggacccagcaggacacagcagcagtcaggtgcatgctgggaccgcgacggacaggctgccgcaccccaggcccccagaggccagtctgtttgcctcccaacgccatctgacccaggtgagcaagaggatgctggcggggggcgtgaggagcatgcccagccccctcctggcctgctggcagcccatcctcctgctggtgctgggctcagtgctgtcaggctcggccacgggctgcccgccccgctgcgagtgctccgcccaggaccgcgctgtgctgtgccaccgcaagcgctttgtggcagtccccgagggcatccccaccgagacgcgcctgctggacctaggcaagaaccgcatcaaaacgctcaaccaggacgagttcgccagcttcccgcacctggaggagctggagctcaacgagaacatcgtgagcgccgtggagcccggcgccttcaacaacctcttcaacctccggacgctgggtctccgcagcaaccgcctgaagctcatcccgctaggcgtcttcactggcctcagcaacctgaccaagctggacatcagcgagaacaagatcgttatcctactggactacatgtttcaggacctgtacaacctcaagtcactggaggttggcgacaatgacctcgtctacatctctcaccgcgccttcagcggcctcaacagcctggagcagctgacgctggagaaatgcaacctgacctccatccccaccgaggcgctgtcccacctgcacggcctcatcgtcctgaggctccggcacctcaacatcaatgccatccgggactactccttcaagaggctgtaccgactcaaggtcttggagatctcccactggccctacttggacaccatgacacccaactgcctctacggcctcaacctgacgtccctgtccatcacacactgcaatctgaccgctgtgccctacctggccgtccgccacctagtctatctccgcttcctcaacctctcctacaaccccatcagcaccattgagggctccatgttgcatgagctgctccggctgcaggagatccagctggtgggcgggcagctggccgtggtggagccctatgccttccgcggcctcaactacctgcgcgtgctcaatgtctctggcaaccagctgaccacactggaggaatcagtcttccactcggtgggcaacctggagacactcatcctggactccaacccgctggcctgcgactgtcggctcctgtgggtgttccggcgccgctggcggctcaacttcaaccggcagcagcccacgtgcgccacgcccgagtttgtccagggcaaggagttcaaggacttccctgatgtgctactgcccaactacttcacctgccgccgcgcccgcatccgggaccgcaaggcccagcaggtgtttgtggacgagggccacacggtgcagtttgtgtgccgggccgatggcgacccgccgcccgccatcctctggctctcaccccgaaagcacctggtctcagccaagagcaatgggcggctcacagtcttccctgatggcacgctggaggtgcgctacgcccaggtacaggacaacggcacgtacctgtgcatcgcggccaacgcgggcggcaacgactccatgcccgcccacctgcatgtgcgcagctactcgcccgactggccccatcagcccaacaagaccttcgctttcatctccaaccagccgggcgagggagaggccaacagcacccgcgccactgtgcctttccccttcgacatcaagaccctcatcatcgccaccaccatgggcttcatctctttcctgggcgtcgtcctcttctgcctggtgctgctgtttctctggagccggggcaagggcaacacaaagcacaacatcgagatcgagtatgtgccccgaaagtcggacgcaggcatcagctccgccgacgcgccccgcaagttcaacatgaagatgatatgaggccggggcggggggcagggacccccgggcggccgggcaggggaaggggcctggccgccacctgctcactctccagtccttcccacctcctccctacccttctacacacgttctctttctccctcccgcctccgtcccctgctgccccccgccagccctcaccacctgccctccttctaccaggacctcagaagcccagacctggggaccccacctacacaggggcattgacagactggagttgaaagccgacgaaccgacacgcggcagagtcaataattcaataaaaaagttacgaactttctctgtaacttgggtttcaataattatggatttttatgaaaacttgaaataataaaaagagaaaaaaacta

SEQ ID NO: 147929 - DNA, 552 bp, Homo sapiens
  Payload ID: 9268
  Gene Symbol: LINGO1
  Gene Name: leucine rich repeat and Ig domain containing 1
  ENST ID: ENST00000559893
  CDS Start-End: 386-552
attattagctccatctaagagacaggaagacggagattccaagaggctcagggacttgcccggggtcacctggctgaccagtggccttgtcaggcctccacccagggatcttatgaccatgacctggctaccttgagtctgtggggctacacagccttcagcctgcatctccagggctctgactctatccagctcctggaccagctcccaagtctactcctgaccccagcctgggccaaggggacttctcaagctttgggacccagcaggacacagcagcagtcaggtgcatgctgggaccgcgacggacaggctgccgcaccccaggcccccagaggccagtctgtttgcctcccaacgccatctgacccaggtgagcaagaggatgctggcggggggcgtgaggagcatgcccagccccctcctggcctgctggcagcccatcctcctgctggtgctgggctcagtgctgtcaggctcggccacgggctgcccgccccgctgcgagtgctccgcccaggaccgcgctgtgctgtgccaccgcaagcgctt

SEQ ID NO: 147930 - DNA, 522 bp, Homo sapiens
  Payload ID: 9268
  Gene Symbol: LINGO1
  Gene Name: leucine rich repeat and Ig domain containing 1
  ENST ID: ENST00000564472
  CDS Start-End: 416-522
actctgagatctaacccaaggaggagcgggtgcccgagaggggaagggagctcaagaaaaaaaaaaatagcttgcttgacttaattatgactgattgtgacagcttacatctttagtctgaaaagtatctatgggggatcttatgaccatgacctggctaccttgagtctgtggggctacacagccttcagcctgcatctccagggctctgactctatccagctcctggaccagctcccaagtctactcctgaccccagcctgggccaaggggacttctcaagctttgggacccagcaggacacagcagcagtcaggtgcatgctgggaccgcgacggacaggctgccgcaccccaggcccccagaggccagtctgtttgcctcccaacgccatctgacccaggtgagcaagaggatgctggcggggggcgtgaggagcatgcccagccccctcctggcctgctggcagcccatcctcctgctggtgctgggctcagtgctgtcaggctcggccacgggctg

SEQ ID NO: 147931 - DNA, 588 bp, Homo sapiens
  Payload ID: 9268
  Gene Symbol: LINGO1
  Gene Name: leucine rich repeat and Ig domain containing 1
  ENST ID: ENST00000567726
  CDS Start-End: 213-588
gattttaagctccatctcttgctggcggtgccaccttgggcaagccatgtggccattctgagctgttttctcatctgcagaatggttgggatcatttgtgcttcaagagtcatgtgcatgctgggaccgcgacggacaggctgccgcaccccaggcccccagaggccagtctgtttgcctcccaacgccatctgacccaggtgagcaagaggatgctggcggggggcgtgaggagcatgcccagccccctcctggcctgctggcagcccatcctcctgctggtgctgggctcagtgctgtcaggctcggccacgggctgcccgccccgctgcgagtgctccgcccaggaccgcgctgtgctgtgccaccgcaagcgctttgtggcagtccccgagggcatccccaccgagacgcgcctgctggacctaggcaagaaccgcatcaaaacgctcaaccaggacgagttcgccagcttcccgcacctggaggagctggagctcaacgagaacatcgtgagcgccgtggagcccggcgccttcaacaacctcttcaacctccggacgctgggtctccgcagcaaccgcctga

SEQ ID NO: 147932 - DNA, 571 bp, Homo sapiens
  Payload ID: 9268
  Gene Symbol: LINGO1
  Gene Name: leucine rich repeat and Ig domain containing 1
  ENST ID: ENST00000570216
  CDS Start-End: 516-571
acctcgttccctggtttccctgatgaggcagttggaaggaggaggcagaccagtcctgcctccggcacccacaggccctgaggctccagtgcccacaggcagagagggcgactgagtccagcccaggctgagccctgcccagctgtactccccagacacccacccaacccgaggtgtcccaccgaggaggccctgatcttgagcccggagccctgagccctgagacgatgcttgaggatcttatgaccatgacctggctaccttgagtctgtggggctacacagccttcagcctgcatctccagggctctgactctatccagctcctggaccagctcccaagtctactcctgaccccagcctgggccaaggggacttctcaagctttgggacccagcaggacacagcagcagtcaggtgcatgctgggaccgcgacggacaggctgccgcaccccaggcccccagaggccagtctgtttgcctcccaacgccatctgacccaggtgagcaagaggatgctggcggggggcgtgaggagcatgcccagccccctcctggcctgctggcagcc

SEQ ID NO: 147933 - DNA, 611 bp, Homo sapiens
  Payload ID: 9268
  Gene Symbol: LINGO1
  Gene Name: leucine rich repeat and Ig domain containing 1
  ENST ID: ENST00000566711
  CDS Start-End: 396-611
gcacacgctgcgcgctctcacgcgcatacacacgccctccctgccgcgctcgccgccgcggccaccatcgcggagccgagccctgcggagcgggaaccgaggccggagcggggaccggaggcagccgagccgggggatgccggcccggagcggagccgcgcgcggacggcgcgcccgggacgcctccggcacccacaggccctgaggctccagtgcccacaggcagagagggcgactgagtccagcccaggctgagccctgcccagctgtactccccagacacccacccaacccgagtgcatgctgggaccgcgacggacaggctgccgcaccccaggcccccagaggccagtctgtttgcctcccaacgccatctgacccaggtgagcaagaggatgctggcggggggcgtgaggagcatgcccagccccctcctggcctgctggcagcccatcctcctgctggtgctgggctcagtgctgtcaggctcggccacgggctgcccgccccgctgcgagtgctccgcccaggaccgcgctgtgctgtgccaccgcaagcgctttgtggcagtccccgagggcatccccaccgagacgcgcctgctggaccta

SEQ ID NO: 147934 - DNA, 938 bp, Homo sapiens
  Payload ID: 9268
  Gene Symbol: LINGO1
  Gene Name: leucine rich repeat and Ig domain containing 1
  ENST ID: ENST00000561686
  CDS Start-End: 403-938
ggctcagcctcaggtcctgcggggctgaccagtgtgcagagtgccctgaaagtgccaggcctggctgggtgcttcccatcttcacagcagctgagaggcagctaccaccacccttcttatagaagaggaagcagaggctttgtgaagtgtcccaccgaggaggccctgatcttgagcccggagccctgagccctgagacgatgcttgaggatcttatgaccatgacctggctaccttgagtctgtggggctacacagccttcagcctgcatctccagggctctgactctatccagctcctggaccagctcccaagtctactcctgaccccagcctgggccaaggggacttctcaagctttgggacccagcaggacacagcagcagtcagggtgagcaagaggatgctggcggggggcgtgaggagcatgcccagccccctcctggcctgctggcagcccatcctcctgctggtgctgggctcagtgctgtcaggctcggccacgggctgcccgccccgctgcgagtgctccgcccaggaccgcgctgtgctgtgccaccgcaagcgctttgtggcagtccccgagggcatccccaccgagacgcgcctgctggacctaggcaagaaccgcatcaaaacgctcaaccaggacgagttcgccagcttcccgcacctggaggagctggagctcaacgagaacatcgtgagcgccgtggagcccggcgccttcaacaacctcttcaacctccggacgctgggtctccgcagcaaccgcctgaagctcatcccgctaggcgtcttcactggcctcagcaacctgaccaagctggacatcagcgagaacaagatcgttatcctactggactacatgtttcaggacctgtacaacctcaagtcactggaggttggcgacaatgacctcgtctacatctctcaccg

SEQ ID NO: 147935 - DNA, 567 bp, Homo sapiens
  Payload ID: 9268
  Gene Symbol: LINGO1
  Gene Name: leucine rich repeat and Ig domain containing 1
  ENST ID: ENST00000562933
  CDS Start-End: 533-567
gtgccaccgccccggactgttcccgcgcagcgaggtcccttccccggggcccccgggtggggccggtcgagccggcctccggcacccacaggccctgaggctccagtgcccacaggcagagagggcgactgagtccagcccaggctgagccctgcccagctgtactccccagacacccacccaacccgaggtgtcccaccgaggaggccctgatcttgagcccggagccctgagccctgagacgatgcttgaggatcttatgaccatgacctggctaccttgagtctgtggggctacacagccttcagcctgcatctccagggctctgactctatccagctcctggaccagctcccaagtctactcctgaccccagcctgggccaaggggacttctcaagctttgggacccagcaggacacagcagcagtcaggtgcatgctgggaccgcgacggacaggctgccgcaccccaggcccccagaggccagtctgtttgcctcccaacgccatctgacccaggtgagcaagaggatgctggcggggggcgtgaggagcatgcccagccc

SEQ ID NO: 147936 - DNA, 554 bp, Homo sapiens
  Payload ID: 9268
  Gene Symbol: LINGO1
  Gene Name: leucine rich repeat and Ig domain containing 1
  ENST ID: ENST00000563316
  CDS Start-End: 543-554
agttggaaggaggaggcagaccagtcctggtgagtgtccggggtggcaaggattgcagtctcagcggtggcctcagctctcacagcctccggcacccacaggccctgaggctccagtgcccacaggcagagagggcgactgagtccagcccaggctgagccctgcccagctgtactccccagacacccacccaacccgaggtgtcccaccgaggaggccctgatcttgagcccggagccctgagccctgagacgatgcttgaggatcttatgaccatgacctggctaccttgagtctgtggggctacacagccttcagcctgcatctccagggctctgactctatccagctcctggaccagctcccaagtctactcctgaccccagcctgggccaaggggacttctcaagctttgggacccagcaggacacagcagcagtcaggtgcatgctgggaccgcgacggacaggctgccgcaccccaggcccccagaggccagtctgtttgcctcccaacgccatctgacccaggtgagcaagaggatgctggcgggg

SEQ ID NO: 147937 - DNA, 3031 bp, Homo sapiens
  Payload ID: 9269
  Gene Symbol: LINGO2
  Gene Name: leucine rich repeat and Ig domain containing 2
  Uniprot ID: Q7L985
  ENST ID: ENST00000308675
  CDS Start-End: 446-2266
tgtaggaattgatgagtgccatcagaaagctgtatcatgagctgcctgcacttctaaagtgtccagtggatttttaatcacatgagcctggaaatagggttatgagaagaagctcagagcagagcaccgaaagtggccactaccagcatgaagagcccaacaattcaaactggtaagtgagtctcatcttgtttgttgcaggttcgtttcaagcagttggcttgtgggactctgagagatgctgctgcccatgacatgcgggaattatcatgatcaactacccagcttggatttcacccagtggccaagagctttgtgtgggagacggcaagggttggatttttcaaagattttctcaggataaatcatgaggaacctataacccttttggccacatgcaaaaaagcaagacccgtgaccaaggtgtagactaagaagtggagtcatgcttcacacggccatatcatgctggcagccattcctgggtctggctgtggtgttaatcttcatgggatccaccattggctgccccgctcgctgtgagtgctctgcccagaacaaatctgttagctgtcacagaaggcgattgatcgccatcccagagggcattcccatcgaaaccaaaatcttggacctcagtaaaaacaggctaaaaagcgtcaaccctgaagaattcatatcatatcctctgctggaagagatagacttgagtgacaacatcattgccaatgtggaaccaggagcattcaacaatctctttaacctgcgttccctccgcctaaaaggcaatcgtctaaagctggtccctttgggagtattcacggggctgtccaatctcactaagcttgacattagtgagaataagattgtcattttactagactacatgttccaagatctacataacctgaagtctctagaagtgggggacaatgatttggtttatatatcacacagggcattcagtgggcttcttagcttggagcagctcaccctggagaaatgcaacttaacagcagtaccaacagaagccctctcccacctccgcagcctcatcagcctgcatctgaagcatctcaatatcaacaatatgcctgtgtatgcctttaaaagattgttccacctgaaacacctagagattgactattggcctttactggatatgatgcctgccaatagcctctacggtctcaacctcacatccctttcagtcaccaacaccaatctgtctactgtacccttccttgcctttaaacacctggtatacctgactcaccttaacctctcctacaatcccatcagcactattgaagcaggcatgttctctgacctgatccgccttcaggagcttcatatagtgggggcccagcttcgcaccattgagcctcactccttccaagggctccgcttcctacgcgtgctcaatgtgtctcagaacctgctggaaactttggaagagaatgtcttctcctcccctagggctctggaggtcttgagcattaacaacaaccctctggcctgtgactgccgccttctctggatcttgcagcgacagcccaccctgcagtttggtggccagcaacctatgtgtgctggcccagacaccatccgtgagaggtctttcaaggatttccatagcactgccctttctttttactttacctgcaaaaaacccaaaatccgtgaaaagaagttgcagcatctgctagtagatgaagggcagacagtccagctagaatgcagtgcagatggagacccgcagcctgtgatttcctgggtgacaccccgaaggcgtttcatcaccaccaagtccaatggaagagccaccgtgttgggtgatggcaccttggaaatccgctttgcccaggatcaagacagcgggatgtatgtttgcatcgctagcaatgctgctgggaatgataccttcacagcctccttaactgtgaaaggattcgcttcagatcgttttctttatgcgaacaggacccctatgtacatgaccgactccaatgacaccatttccaatggcaccaatgccaatactttttccctggaccttaaaacaatactggtgtctacagctatgggctgcttcacattcctgggagtggttttattttgttttcttctcctttttgtgtggagccgagggaaaggcaagcacaaaaacagcattgaccttgagtatgtgcccagaaaaaacaatggtgctgttgtggaaggggaggtagctggacccaggaggttcaacatgaaaatgatttgaaggcccacccctcacattactgtctctttgtcaatgtgggtaatcagtaagacagtatggcacagtaaattactagattaagaggcagccatgtgcagctgcccctgtatcaaaagcagggtctatggaagcaggaggacttccaatggagactctccatcgaaaggcaggcaggcaggcatgtgtcagagcccttcacacagtgggatactaagtgtttgcgttgcaaatattggcgttctggggatctcagtaatgaacctgaatatttggctcacactcacggacaattattcagcattttctaccactgcaaaaaacaaaagaaaaaataaaaaagaacaacctacagtgtaggatttacatattaaaaagacacatttgtctaaaacatactctacagaaaaatttgtatctatgattatcatttgttaaagccttgcatcataccatattgttggttcagtaccacaaagagatcaatatattcttttcttccttttttgaaacatatatgctgtacatgttttaaagcaatatgaatgagaggttgtgcttttagttactcaccactatagatccaagtgtgatttcaccttccgttacctacagatgaccctgagactagatccctggagttatgggcggagatattttgagagatgtgtttgtctgatgtaggatgccaagaaacaggacccaaggcaaaactgctcaactctgttaacttctgttactataaataaaggcatgtgcctagttttg

SEQ ID NO: 147938 - DNA, 3044 bp, Homo sapiens
  Payload ID: 9269
  Gene Symbol: LINGO2
  Gene Name: leucine rich repeat and Ig domain containing 2
  Uniprot ID: Q7L985
  ENST ID: ENST00000379992
  CDS Start-End: 451-2271
tgtaggaattgatgagtgccatcagaaagctgtatcatgagctgcctgcacttctaaagtgtccagtggatttttaatcacatgagcctggaaatagggttatgagaagaagctcagagcagagcaccgaaagtggccactaccagcatgaagagcccaacaattcaaactggtgaagtgagaaaaacagaatgcagctttcaaggttcgtttcaagcagttggcttgtgggactctgagagatgctgctgcccatgacatgcgggaattatcatgatcaactacccagcttggatttcacccagtggccaagagctttgtgtgggagacggcaagggttggatttttcaaaagagtaaaccaggataaatcatgaggaacctataacccttttggccacatgcaaaaaagcaagacccgtgaccaaggtgtagactaagaagtggagtcatgcttcacacggccatatcatgctggcagccattcctgggtctggctgtggtgttaatcttcatgggatccaccattggctgccccgctcgctgtgagtgctctgcccagaacaaatctgttagctgtcacagaaggcgattgatcgccatcccagagggcattcccatcgaaaccaaaatcttggacctcagtaaaaacaggctaaaaagcgtcaaccctgaagaattcatatcatatcctctgctggaagagatagacttgagtgacaacatcattgccaatgtggaaccaggagcattcaacaatctctttaacctgcgttccctccgcctaaaaggcaatcgtctaaagctggtccctttgggagtattcacggggctgtccaatctcactaagcttgacattagtgagaataagattgtcattttactagactacatgttccaagatctacataacctgaagtctctagaagtgggggacaatgatttggtttatatatcacacagggcattcagtgggcttcttagcttggagcagctcaccctggagaaatgcaacttaacagcagtaccaacagaagccctctcccacctccgcagcctcatcagcctgcatctgaagcatctcaatatcaacaatatgcctgtgtatgcctttaaaagattgttccacctgaaacacctagagattgactattggcctttactggatatgatgcctgccaatagcctctacggtctcaacctcacatccctttcagtcaccaacaccaatctgtctactgtacccttccttgcctttaaacacctggtatacctgactcaccttaacctctcctacaatcccatcagcactattgaagcaggcatgttctctgacctgatccgccttcaggagcttcatatagtgggggcccagcttcgcaccattgagcctcactccttccaagggctccgcttcctacgcgtgctcaatgtgtctcagaacctgctggaaactttggaagagaatgtcttctcctcccctagggctctggaggtcttgagcattaacaacaaccctctggcctgtgactgccgccttctctggatcttgcagcgacagcccaccctgcagtttggtggccagcaacctatgtgtgctggcccagacaccatccgtgagaggtctttcaaggatttccatagcactgccctttctttttactttacctgcaaaaaacccaaaatccgtgaaaagaagttgcagcatctgctagtagatgaagggcagacagtccagctagaatgcagtgcagatggagacccgcagcctgtgatttcctgggtgacaccccgaaggcgtttcatcaccaccaagtccaatggaagagccaccgtgttgggtgatggcaccttggaaatccgctttgcccaggatcaagacagcgggatgtatgtttgcatcgctagcaatgctgctgggaatgataccttcacagcctccttaactgtgaaaggattcgcttcagatcgttttctttatgcgaacaggacccctatgtacatgaccgactccaatgacaccatttccaatggcaccaatgccaatactttttccctggaccttaaaacaatactggtgtctacagctatgggctgcttcacattcctgggagtggttttattttgttttcttctcctttttgtgtggagccgagggaaaggcaagcacaaaaacagcattgaccttgagtatgtgcccagaaaaaacaatggtgctgttgtggaaggggaggtagctggacccaggaggttcaacatgaaaatgatttgaaggcccacccctcacattactgtctctttgtcaatgtgggtaatcagtaagacagtatggcacagtaaattactagattaagaggcagccatgtgcagctgcccctgtatcaaaagcagggtctatggaagcaggaggacttccaatggagactctccatcgaaaggcaggcaggcaggcatgtgtcagagcccttcacacagtgggatactaagtgtttgcgttgcaaatattggcgttctggggatctcagtaatgaacctgaatatttggctcacactcacggacaattattcagcattttctaccactgcaaaaaacaaaagaaaaaataaaaaagaacaacctacagtgtaggatttacatattaaaaagacacatttgtctaaaacatactctacagaaaaatttgtatctatgattatcatttgttaaagccttgcatcataccatattgttggttcagtaccacaaagagatcaatatattcttttcttccttttttgaaacatatatgctgtacatgttttaaagcaatatgaatgagaggttgtgcttttagttactcaccactatagatccaagtgtgatttcaccttccgttacctacagatgaccctgagactagatccctggagttatgggcggagatattttgagagatgtgtttgtctgatgtaggatgccaagaaacaggacccaaggcaaaactgctcaactctgttaacttctgttactataaataaaggcatgtgcctagttttgatacagaa

SEQ ID NO: 147939 - DNA, 2981 bp, Homo sapiens
  Payload ID: 9269
  Gene Symbol: LINGO2
  Gene Name: leucine rich repeat and Ig domain containing 2
  Uniprot ID: Q7L985
  ENST ID: ENST00000613945
  CDS Start-End: 396-2216
ttgtaggaattgatgagtgccatcagaaagctgtatcatgagctgcctgcacttctaaagtgtccagtggatttttaatcacatgagcctggaaatagggttatgagaagaagctcagagcagagcaccgaaagtggccactaccagcatgaagagcccaacaattcaaactggtaagtgagtctcatcttgtttgttgcaggttcgtttcaagcagttggcttgtgggactctgagagatgctgctgcccatgacatgcgggaattatcatgatcaactacccagcttggatttcacccagtggccaagagctttgtgtgggagacggcaagggttggatttttcaaagattcatgcagacccgtgaccaaggtgtagactaagaagtggagtcatgcttcacacggccatatcatgctggcagccattcctgggtctggctgtggtgttaatcttcatgggatccaccattggctgccccgctcgctgtgagtgctctgcccagaacaaatctgttagctgtcacagaaggcgattgatcgccatcccagagggcattcccatcgaaaccaaaatcttggacctcagtaaaaacaggctaaaaagcgtcaaccctgaagaattcatatcatatcctctgctggaagagatagacttgagtgacaacatcattgccaatgtggaaccaggagcattcaacaatctctttaacctgcgttccctccgcctaaaaggcaatcgtctaaagctggtccctttgggagtattcacggggctgtccaatctcactaagcttgacattagtgagaataagattgtcattttactagactacatgttccaagatctacataacctgaagtctctagaagtgggggacaatgatttggtttatatatcacacagggcattcagtgggcttcttagcttggagcagctcaccctggagaaatgcaacttaacagcagtaccaacagaagccctctcccacctccgcagcctcatcagcctgcatctgaagcatctcaatatcaacaatatgcctgtgtatgcctttaaaagattgttccacctgaaacacctagagattgactattggcctttactggatatgatgcctgccaatagcctctacggtctcaacctcacatccctttcagtcaccaacaccaatctgtctactgtacccttccttgcctttaaacacctggtatacctgactcaccttaacctctcctacaatcccatcagcactattgaagcaggcatgttctctgacctgatccgccttcaggagcttcatatagtgggggcccagcttcgcaccattgagcctcactccttccaagggctccgcttcctacgcgtgctcaatgtgtctcagaacctgctggaaactttggaagagaatgtcttctcctcccctagggctctggaggtcttgagcattaacaacaaccctctggcctgtgactgccgccttctctggatcttgcagcgacagcccaccctgcagtttggtggccagcaacctatgtgtgctggcccagacaccatccgtgagaggtctttcaaggatttccatagcactgccctttctttttactttacctgcaaaaaacccaaaatccgtgaaaagaagttgcagcatctgctagtagatgaagggcagacagtccagctagaatgcagtgcagatggagacccgcagcctgtgatttcctgggtgacaccccgaaggcgtttcatcaccaccaagtccaatggaagagccaccgtgttgggtgatggcaccttggaaatccgctttgcccaggatcaagacagcgggatgtatgtttgcatcgctagcaatgctgctgggaatgataccttcacagcctccttaactgtgaaaggattcgcttcagatcgttttctttatgcgaacaggacccctatgtacatgaccgactccaatgacaccatttccaatggcaccaatgccaatactttttccctggaccttaaaacaatactggtgtctacagctatgggctgcttcacattcctgggagtggttttattttgttttcttctcctttttgtgtggagccgagggaaaggcaagcacaaaaacagcattgaccttgagtatgtgcccagaaaaaacaatggtgctgttgtggaaggggaggtagctggacccaggaggttcaacatgaaaatgatttgaaggcccacccctcacattactgtctctttgtcaatgtgggtaatcagtaagacagtatggcacagtaaattactagattaagaggcagccatgtgcagctgcccctgtatcaaaagcagggtctatggaagcaggaggacttccaatggagactctccatcgaaaggcaggcaggcaggcatgtgtcagagcccttcacacagtgggatactaagtgtttgcgttgcaaatattggcgttctggggatctcagtaatgaacctgaatatttggctcacactcacggacaattattcagcattttctaccactgcaaaaaacaaaagaaaaaataaaaaagaacaacctacagtgtaggatttacatattaaaaagacacatttgtctaaaacatactctacagaaaaatttgtatctatgattatcatttgttaaagccttgcatcataccatattgttggttcagtaccacaaagagatcaatatattcttttcttccttttttgaaacatatatgctgtacatgttttaaagcaatatgaatgagaggttgtgcttttagttactcaccactatagatccaagtgtgatttcaccttccgttacctacagatgaccctgagactagatccctggagttatgggcggagatattttgagagatgtgtttgtctgatgtaggatgccaagaaacaggacccaaggcaaaactgctcaactctgttaacttctgttactataaataaaggcatgtgcctagttttg

SEQ ID NO: 147940 - DNA, 2241 bp, Homo sapiens
  Payload ID: 9270
  Gene Symbol: LINGO3
  Gene Name: leucine rich repeat and Ig domain containing 3
  Uniprot ID: P0C6S8
  ENST ID: ENST00000585527
  CDS Start-End: 249-2027
gtagagatgggagtcttgctatgttgtgcaggctggtctcgaactcttgaactcaagcaattcttccatctcagcctcccaaaatgctgggtttacaggagcgagccgccgtgctgggacgggttaggggcgggctggcggcagaggcgccgcggaggggtgctaacggtgctaacgctgcccgctccccgcccgcccgcaggtgcgcaggaggatggtggcgcggccctaggcccacgctccgcaccatgacctgctggctgtgcgtcctgagcctgcccctgctcctgctgcccgcggcgccgcccccggctggaggctgcccggcccgctgcgagtgcaccgtgcagacccgcgcggtggcctgcacgcgccgccgcctgaccgccgtgcccgacggcatcccggccgagacccgcctgctggagctcagccgcaaccgcatccgctgcctgaacccgggcgacctggccgcgctgcccgcgctggaggagctggacctgagcgagaacgccatcgcgcacgtggagcccggcgccttcgccaacctgccgcgcctgcgcgtcctgcgtctccgtggcaaccagctgaagctcatcccgcccggggtcttcacgcgcctggacaacctcacgctgctggacctgagcgagaacaagctggtaatcctgctggactacactttccaggacctgcacagcctgcgccggctggaagtgggcgacaacgacctggtattcgtctcgcgccgcgccttcgcggggctgctggccctggaggagctgaccctggagcgctgcaacctcacggctctgtccggggagtcgctgggccatctgcgcagcctgggcgccctgcggctgcgccacctggccatcgcctccctggaggaccagaacttccgcaggctgcccgggctgctgcacctggagattgacaactggccgctgctggaggaggtggcggcgggcagcctgcggggcctgaacctgacctcgctgtcggtcacccacaccaacatcaccgccgtgccggccgccgcgctgcggcaccaggcgcacctcacctgcctcaatctgtcgcacaaccccatcagcacggtgccgcgggggtcgttccgggacctggtccgcctgcgcgagctgcacctggccggggccctgctggctgtggtggagccgcaggccttcctgggcctgcgccagatccgcctgctcaacctctccaacaacctgctctccacgttggaggagagcaccttccactcggtgaacacgctagagacgctgcgcgtggacgggaacccgctggcctgcgactgtcgcctgctgtggatcgtgcagcgtcgcaagaccctcaacttcgacgggcggctgccggcctgcgccaccccggccgaggtgcgcggcgacgcgctgcgaaacctgccggactccgtgctgttcgagtacttcgtgtgccgcaaacccaagatccgggagcggcggctgcagcgcgtcacggccaccgcgggcgaagacgtccgcttcctctgccgcgccgagggcgagccggcgcccaccgtggcctgggtgaccccccagcaccggccggtgacggccaccagcgcgggccgggcgcgcgtgctccccggggggacgctggagatccaggacgcgcggccgcaggacagcggcacctacacgtgcgtggccagcaacgcgggcggcaacgacacctacttcgccacgctgaccgtgcgccccgagccggccgccaaccggaccccgggcgaggcccacaacgagacgctggcggccctgcgcgcgccgctcgacctcaccaccatcctggtgtccaccgccatgggctgcatcaccttcctgggcgtggtcctcttctgcttcgtgctgctgttcgtgtggagccgcggccgcgggcagcacaaaaacaacttctcggtggagtactccttccgcaaggtggatgggccggccgccgcggcgggccagggaggcgcgcgcaagttcaacatgaagatgatctgaggggtccccagggcggaccctcccctcccctcccccgcgggccggccgctcgcgtgtccacctatgcatttcccggaggggaaggggacggctgcacggcgctccccaggcagaacttcccctttttttgtagacgcccaaccgcaggactgtttttcatcagcatgcgtcttttttgcagtttctcaagcgttttctaaagatttcaacccgt

SEQ ID NO: 147941 - DNA, 3379 bp, Homo sapiens
  Payload ID: 9271
  Gene Symbol: LINGO4
  Gene Name: leucine rich repeat and Ig domain containing 4
  Uniprot ID: Q6UY18
  ENST ID: ENST00000368820
  CDS Start-End: 939-2720
ttgtgtcctctaaggggacgggttcatctgagtaaacataaaccccaacttgtgccattctttataaaatgattttaaaggcaagaagtgtgtgtgtcagagggtgggggagattcttaaattagattacctgcatgcctgctctccagtctcattcctgggtcaagactcaggtttccagctcagcaatccatcagcattatacagatccaacccaccctcacccgacccctgcagtttctccccaggtggagcagtccctcagtgaggactgtgaacgaatcttcaggaacccccactgtaggagcctcaaactgagccccacgggagatgctctagactgagaacttcccataaatgatacccacggggaacgtttagatttagaggttgcacagaattgctccacatctgggagaccaaaagacagtcctctggaaggtggctggcccaagctccccagtgggggaatcaggatgtcagagagatcctctagaacctgctgttcttgctattgcatgacccctccctggcaccagagcctccctcctggctccctcccctgtcacttgccagcctgtagtggtgcttgctgcagccctccctggttgctttatttatttattttgcaccaacagggttgctgcagactcattcttgcctggtttaaaaagagagagagagagagaggaaaaaaaaaaaggagaaatgctttctggctcttttctccacctcagtcttggcagcagcggccgcagcagcaacagcagcagcagcagcggcaggcagcagccgggcagccaggcagcgggggttgaggcacacagggaaggtgcaggggcctgaggtgcagctcgaatgggacagggcccccagcgctggacagatgcagtgccaaacttgatgccaccttccagcttctccggactgaagagggaatggatgcagccacagctccaaagcaagcctggcccccatggcccccgctccttttcctcctcctcctacctggagggagcggtggcagctgccctgctgtgtgtgactgcacctcccagccccaggctgtgctctgtggccacaggcaactggaggctgtacctggaggactcccactggacactgagctcctggacctgagtgggaaccgcctgtgggggctccagcagggaatgctctcccgcctgagcctgctccaggaattggacctcagctacaaccagctctcaacccttgagcctggggccttccatggcctacaaagcctactcaccctgaggctgcagggcaatcggctcagaatcatggggcctggggtcttctcaggcctctctgctctgaccctgctggacctccgcctcaaccagattgttctcttcctagatggagcttttggggagctaggcagcctccagaagctggaggttggggacaaccacctggtatttgtggctccgggggcctttgcagggctagccaagttgagcaccctcaccctggagcgctgcaacctcagcacagtgcctggcctagcccttgcccgtctcccggcactagtggccctaaggcttagagaactggatattgggaggctgccagctggggccctgcgggggctggggcagctcaaggagctggagatccacctctggccatctctggaggctctggaccctgggagcctggttgggctcaatctcagcagcctggccatcactcgctgcaatctgagctcggtgcccttccaagcactgtaccacctcagcttcctcagggtcctggatctgtcccagaatcccatctcagccatcccagcccgaaggctcagccccctggtgcggctccaggagctacgcctgtcaggggcatgcctcacctccattgctgcccatgccttccatggcttgactgccttccacctcctggatgtggcagataacgcccttcagacactagaggaaacagctttcccttctccagacaaactggtcaccttgaggctgtctggcaaccccctaacctgtgactgccgcctcctctggctgctccggctccgccgccacctggactttggcatgtccccccctgcctgtgctggcccccatcatgtccaggggaagagcctgaaggagttttcagacatcctgcctccagggcacttcacctgcaaaccagccctgatccgaaagtcggggcctcgatgggtcattgcagaggagggcgggcatgcggttttctcctgctctggagatggagacccagcccccactgtctcctggatgaggcctcatggggcttggctgggcagggctgggagagtaagggtcctagaggatgggacactggagatccgctcagtgcagctacgggacagaggggcctatgtctgtgtggttagcaatgtcgctgggaatgactccctgaggacctggctggaagtcatccaggtggaaccaccaaacggcacactttctgaccccaacatcaccgtgccagggatcccagggcctttttttctggatagcagaggtgtggccatggtgctggcagtcggcttcctccccttcctcacctcagtgaccctctgctttggcctgattgccctttggagcaagggcaaaggtcgggtcaaacatcacatgacctttgactttgtggcacctcggccctctggggataaaaactctgggggtaaccgggtcactgccaagctcttctgacctttccttccccagtggggaacccaccaagtccgcttcagataccaaaggggaagacagaaccaaggctgcttgaaccagaacctagtcccgagcagcaccgctctcctgcacctcccgcctgcgttgtgcctcctgccggagagtctgcttcctgagcttttccggtctgaggatagcattgtcatttcttctctgagggtcccagggagctgcagatgcagaccccgtcgttagtccagcccctgcttcaccccctccacacacaaaacaggaaacataatcaaagcgctagtcagctagtctaaccactaggctttcttcacacatgcttatatcctttaataaccaattgccaaccacggctataagattatttcagaggtggggctgggaagtgccacttgctccttagagtctgtttgtcaaccaggcagagtccctttcttttctgctccccaccccaaccctgcccctatgtacaggaataagagcaaaggacccacaggctacagagaagaggatggggacagagtgtgggatggagaggacagaccatatactgcactgtgtttgcatgagcctctaccaccttcctctatctaccagatcattaaacctgctgtcaaagggccacaacagtagcagccaaaactaaa

SEQ ID NO: 147942 - DNA, 3146 bp, Homo sapiens
  Payload ID: 9272
  Gene Symbol: LRSAM1
  Gene Name: leucine rich repeat and sterile alpha motif containing 1
  Uniprot ID: Q6UWE0
  ENST ID: ENST00000300417
  CDS Start-End: 373-2544
agagacgcccttgtcgccatgtttgttgtgggcaggcgcctgaggctgacggctggcaagcagggcaccgcggtgcgctgaagctagagattccgaaagggggttcgggtagttcgctccggagaagtctgagaagggtggctccggtgatcccagccctagctgtttcccatattcctttatccacctgcctttgaaggagaccagactccggctccgcccggcccgtgccgggtggtctgcggccccgagtccgtgaccaagccctccgagtgatcggcctgccctcgggtgcacccgcgggtcccaacgtgggggatccctccatccgcaaagccagggtcctaaagatcgctctgggaaaagggaaggatgccgctcttcttccggaagcggaaacccagtgaggaggctcggaaacgcctggagtaccagatgtgtttggcaaaagaagctggggcagatgacattctcgacatctctaaatgtgagctctcagagattccatttggagcttttgcaacatgcaaagttctgcagaagaaggtgctgatcgtccacacgaatcacctcacttccctgcttcccaaatcctgcagcctcctgagtctggcaaccatcaaggttctagatctccacgataatcagctgacagcccttcctgacgatctggggcagctgactgccctccaggtcttaaacgtggaaaggaatcaactgatgcagctcccacgttccattgggaacctgacccagctccagactctcaatgttaaagacaacaagctgaaggagcttccagacaccgtgggggagcttcgaagcctgcgtaccctcaacatcagtggaaacgagatccagagattgccgcagatgctggctcacgttcgaaccctggagatgctgagccttgacgcctcggccatggtctacccgccgcgggaggtgtgtggtgccggcactgcggccatcttgcagttcctctgcaaagagtcagggctggaatactaccccccttctcagtacttgctgccaattctggagcaagatggaatcgagaactctcgggacagccctgatgggcccacggacagattctcaagggaggagttagagtggcagaacaggttctcagactatgagaagaggaaggaacagaagatgctggagaaactcgagtttgaacggcgcctggaactggggcagcgggagcacacccagctccttcagcagagcagcagccagaaggatgagatccttcagacggtcaaggaggagcagtcccggctggagcagggcctgagtgagcaccagcgccacctcaacgcagagcggcagcggctgcaggagcagctgaagcagacggaacagaacatttccagccggatccagaagctgctgcaggacaatcagagacaaaagaaaagctccgagattttgaaatcgctggaaaatgaaagaataagaatggaacagttgatgtccataacccaggaggagactgagagcctgcggcgacgtgacgttgcctccgccatgcagcagatgctgactgagagctgtaagaaccggctcatccagatggcctacgaatctcagaggcagaacttggtccagcaggcctgttccagcatggccgaaatggatgaacgattccagcagattctgtcgtggcagcaaatggatcagaacaaagccatcagccagatcctgcaggagagcgcgatgcagaaggctgcgttcgaggcactccaggtgaagaaagacctgatgcatcggcagatcaggagccagattaagttaatagaaactgagttattgcagctgacacagctggagttaaagaggaagtccctggacacagagtcactccaggagatgatctcggagcagcgctgggccctcagctccctgctccagcagctgctcaaagagaagcagcagcgagaggaagagctccgggaaatcctgacggagttagaagccaaaagtgaaaccaggcaggaaaattactggctgattcagtatcaacggcttttgaaccagaagcccttgtccttgaagctgcaagaagaggggatggagcgccagctggtggccctcctggaggagctgtcggctgagcactacctgcccatctttgcgcaccaccgcctctcactggacctgctgagccaaatgagcccaggggacctggccaaggtgggcgtctcagaagctggcctgcagcacgagatcctccggagagtccaggaactgctggatgcagccaggatccagccagagctgaaaccaccaatgggtgaggtcgtcacccctacggccccccaggagcctcctgagtctgtgaggccatccgctccccctgcagagctggaggtgcaggcctcagagtgtgtcgtgtgcctggaacgggaggcccagatgatcttcctcaactgtggccacgtctgctgctgccagcagtgctgccagccactgcgcacctgcccgctgtgccgccaggacatcgcccagcgcctccgcatctaccacagcagctgagtgctgcccgcccacctgggcctggtcctagccctgcctcggccactgtgagccccgggctcctgctcagccttgtgccagccagactcgtatgaggctcccccctgccctgggccccttccccactgcccaggagcccccatcctaagctccaagcatgtctgggccaggcagaggtgctcctcatccatgacaccaccagtctgaatggtcctgggggctggggctggagaggccgctgcaccaccacccgagcctgggagccagcgtcccagcctaatcacggatctgctgcctcccagctgtcttgactgaaggccaccgcccctgcaggagcttgggtcctcatctgggggccatgcacaggcccgtcccaccctgcatgtgggaagggagcaggagggcctggctgggtgaggggaggccttcctgggaaggcgtgtggtgcaggcctgtgctcacagtggcaccagcaaccctgggtctccctctctgctgctccccagaaccccggggccctcctgctctccacaactgtccctccttaccccatgtagctcgatccgaagcaggagtgtcaataaacctgtcttcagtgcgct

SEQ ID NO: 147943 - DNA, 3376 bp, Homo sapiens
  Payload ID: 9272
  Gene Symbol: LRSAM1
  Gene Name: leucine rich repeat and sterile alpha motif containing 1
  Uniprot ID: Q6UWE0
  ENST ID: ENST00000323301
  CDS Start-End: 605-2776
gtgggcaggcgcctgaggctgacggctggcaagcagggcaccgcggtgcgctgaagctagagattccgaaagggggttcgggtagttcgctccggagaagtctgagaagggtggctccggtgatcccagccctagctgtttcccatattcctttatcgtgagtgtcaccccggtccccgtcacccaatcccagagccccgcccctcccctgaggggtccgtagtcccattccgagaccccagtaccgcggcgacccctgctccctcgagcacttgttgtgtgcactttagttatcaaaacagtctatgtggaaatccagtcccgctcttcattcggagagtccgcgattcctagagcctcagacttcgtcatcccggtctgcgtgactttatgagattctgagtttctgttcccagcacctgcctttgaaggagaccagactccggctccgcccggcccgtgccgggtggtctgcggccccgagtccgtgaccaagccctccgagtgatcggcctgccctcgggtgcacccgcgggtcccaacgtgggggatccctccatccgcaaagccagggtcctaaagatcgctctgggaaaagggaaggatgccgctcttcttccggaagcggaaacccagtgaggaggctcggaaacgcctggagtaccagatgtgtttggcaaaagaagctggggcagatgacattctcgacatctctaaatgtgagctctcagagattccatttggagcttttgcaacatgcaaagttctgcagaagaaggtgctgatcgtccacacgaatcacctcacttccctgcttcccaaatcctgcagcctcctgagtctggcaaccatcaaggttctagatctccacgataatcagctgacagcccttcctgacgatctggggcagctgactgccctccaggtcttaaacgtggaaaggaatcaactgatgcagctcccacgttccattgggaacctgacccagctccagactctcaatgttaaagacaacaagctgaaggagcttccagacaccgtgggggagcttcgaagcctgcgtaccctcaacatcagtggaaacgagatccagagattgccgcagatgctggctcacgttcgaaccctggagatgctgagccttgacgcctcggccatggtctacccgccgcgggaggtgtgtggtgccggcactgcggccatcttgcagttcctctgcaaagagtcagggctggaatactaccccccttctcagtacttgctgccaattctggagcaagatggaatcgagaactctcgggacagccctgatgggcccacggacagattctcaagggaggagttagagtggcagaacaggttctcagactatgagaagaggaaggaacagaagatgctggagaaactcgagtttgaacggcgcctggaactggggcagcgggagcacacccagctccttcagcagagcagcagccagaaggatgagatccttcagacggtcaaggaggagcagtcccggctggagcagggcctgagtgagcaccagcgccacctcaacgcagagcggcagcggctgcaggagcagctgaagcagacggaacagaacatttccagccggatccagaagctgctgcaggacaatcagagacaaaagaaaagctccgagattttgaaatcgctggaaaatgaaagaataagaatggaacagttgatgtccataacccaggaggagactgagagcctgcggcgacgtgacgttgcctccgccatgcagcagatgctgactgagagctgtaagaaccggctcatccagatggcctacgaatctcagaggcagaacttggtccagcaggcctgttccagcatggccgaaatggatgaacgattccagcagattctgtcgtggcagcaaatggatcagaacaaagccatcagccagatcctgcaggagagcgcgatgcagaaggctgcgttcgaggcactccaggtgaagaaagacctgatgcatcggcagatcaggagccagattaagttaatagaaactgagttattgcagctgacacagctggagttaaagaggaagtccctggacacagagtcactccaggagatgatctcggagcagcgctgggccctcagctccctgctccagcagctgctcaaagagaagcagcagcgagaggaagagctccgggaaatcctgacggagttagaagccaaaagtgaaaccaggcaggaaaattactggctgattcagtatcaacggcttttgaaccagaagcccttgtccttgaagctgcaagaagaggggatggagcgccagctggtggccctcctggaggagctgtcggctgagcactacctgcccatctttgcgcaccaccgcctctcactggacctgctgagccaaatgagcccaggggacctggccaaggtgggcgtctcagaagctggcctgcagcacgagatcctccggagagtccaggaactgctggatgcagccaggatccagccagagctgaaaccaccaatgggtgaggtcgtcacccctacggccccccaggagcctcctgagtctgtgaggccatccgctccccctgcagagctggaggtgcaggcctcagagtgtgtcgtgtgcctggaacgggaggcccagatgatcttcctcaactgtggccacgtctgctgctgccagcagtgctgccagccactgcgcacctgcccgctgtgccgccaggacatcgcccagcgcctccgcatctaccacagcagctgagtgctgcccgcccacctgggcctggtcctagccctgcctcggccactgtgagccccgggctcctgctcagccttgtgccagccagactcgtatgaggctcccccctgccctgggccccttccccactgcccaggagcccccatcctaagctccaagcatgtctgggccaggcagaggtgctcctcatccatgacaccaccagtctgaatggtcctgggggctggggctggagaggccgctgcaccaccacccgagcctgggagccagcgtcccagcctaatcacggatctgctgcctcccagctgtcttgactgaaggccaccgcccctgcaggagcttgggtcctcatctgggggccatgcacaggcccgtcccaccctgcatgtgggaagggagcaggagggcctggctgggtgaggggaggccttcctgggaaggcgtgtggtgcaggcctgtgctcacagtggcaccagcaaccctgggtctccctctctgctgctccccagaaccccggggccctcctgctctccacaactgtccctccttaccccatgtagctcgatccgaagcaggagtgtcaataaacctgtcttcagtgcg

SEQ ID NO: 147944 - DNA, 2849 bp, Homo sapiens
  Payload ID: 9272
  Gene Symbol: LRSAM1
  Gene Name: leucine rich repeat and sterile alpha motif containing 1
  Uniprot ID: Q6UWE0
  ENST ID: ENST00000373322
  CDS Start-End: 78-2249
atcaggaagggggtgcaagagggttagtgattggggagcagaaggggtcctaaagatcgctctgggaaaagggaaggatgccgctcttcttccggaagcggaaacccagtgaggaggctcggaaacgcctggagtaccagatgtgtttggcaaaagaagctggggcagatgacattctcgacatctctaaatgtgagctctcagagattccatttggagcttttgcaacatgcaaagttctgcagaagaaggtgctgatcgtccacacgaatcacctcacttccctgcttcccaaatcctgcagcctcctgagtctggcaaccatcaaggttctagatctccacgataatcagctgacagcccttcctgacgatctggggcagctgactgccctccaggtcttaaacgtggaaaggaatcaactgatgcagctcccacgttccattgggaacctgacccagctccagactctcaatgttaaagacaacaagctgaaggagcttccagacaccgtgggggagcttcgaagcctgcgtaccctcaacatcagtggaaacgagatccagagattgccgcagatgctggctcacgttcgaaccctggagatgctgagccttgacgcctcggccatggtctacccgccgcgggaggtgtgtggtgccggcactgcggccatcttgcagttcctctgcaaagagtcagggctggaatactaccccccttctcagtacttgctgccaattctggagcaagatggaatcgagaactctcgggacagccctgatgggcccacggacagattctcaagggaggagttagagtggcagaacaggttctcagactatgagaagaggaaggaacagaagatgctggagaaactcgagtttgaacggcgcctggaactggggcagcgggagcacacccagctccttcagcagagcagcagccagaaggatgagatccttcagacggtcaaggaggagcagtcccggctggagcagggcctgagtgagcaccagcgccacctcaacgcagagcggcagcggctgcaggagcagctgaagcagacggaacagaacatttccagccggatccagaagctgctgcaggacaatcagagacaaaagaaaagctccgagattttgaaatcgctggaaaatgaaagaataagaatggaacagttgatgtccataacccaggaggagactgagagcctgcggcgacgtgacgttgcctccgccatgcagcagatgctgactgagagctgtaagaaccggctcatccagatggcctacgaatctcagaggcagaacttggtccagcaggcctgttccagcatggccgaaatggatgaacgattccagcagattctgtcgtggcagcaaatggatcagaacaaagccatcagccagatcctgcaggagagcgcgatgcagaaggctgcgttcgaggcactccaggtgaagaaagacctgatgcatcggcagatcaggagccagattaagttaatagaaactgagttattgcagctgacacagctggagttaaagaggaagtccctggacacagagtcactccaggagatgatctcggagcagcgctgggccctcagctccctgctccagcagctgctcaaagagaagcagcagcgagaggaagagctccgggaaatcctgacggagttagaagccaaaagtgaaaccaggcaggaaaattactggctgattcagtatcaacggcttttgaaccagaagcccttgtccttgaagctgcaagaagaggggatggagcgccagctggtggccctcctggaggagctgtcggctgagcactacctgcccatctttgcgcaccaccgcctctcactggacctgctgagccaaatgagcccaggggacctggccaaggtgggcgtctcagaagctggcctgcagcacgagatcctccggagagtccaggaactgctggatgcagccaggatccagccagagctgaaaccaccaatgggtgaggtcgtcacccctacggccccccaggagcctcctgagtctgtgaggccatccgctccccctgcagagctggaggtgcaggcctcagagtgtgtcgtgtgcctggaacgggaggcccagatgatcttcctcaactgtggccacgtctgctgctgccagcagtgctgccagccactgcgcacctgcccgctgtgccgccaggacatcgcccagcgcctccgcatctaccacagcagctgagtgctgcccgcccacctgggcctggtcctagccctgcctcggccactgtgagccccgggctcctgctcagccttgtgccagccagactcgtatgaggctcccccctgccctgggccccttccccactgcccaggagcccccatcctaagctccaagcatgtctgggccaggcagaggtgctcctcatccatgacaccaccagtctgaatggtcctgggggctggggctggagaggccgctgcaccaccacccgagcctgggagccagcgtcccagcctaatcacggatctgctgcctcccagctgtcttgactgaaggccaccgcccctgcaggagcttgggtcctcatctgggggccatgcacaggcccgtcccaccctgcatgtgggaagggagcaggagggcctggctgggtgaggggaggccttcctgggaaggcgtgtggtgcaggcctgtgctcacagtggcaccagcaaccctgggtctccctctctgctgctccccagaaccccggggccctcctgctctccacaactgtccctccttaccccatgtagctcgatccgaagcaggagtgtcaataaacctgtcttcagtgcg

SEQ ID NO: 147945 - DNA, 3044 bp, Homo sapiens
  Payload ID: 9272
  Gene Symbol: LRSAM1
  Gene Name: leucine rich repeat and sterile alpha motif containing 1
  Uniprot ID: Q6UWE0
  ENST ID: ENST00000373324
  CDS Start-End: 354-2444
tgtttgttgtgggcaggcgcctgaggctgacggctggcaagcagggcaccgcggtgcgctgaagctagagattccgaaagggggttcgggtagttcgctccggagaagtctgagaagggtggctccggtgatcccagccctagctgtttcccatattcctttatccacctgcctttgaaggagaccagactccggctccgcccggcccgtgccgggtggtctgcggccccgagtccgtgaccaagccctccgagtgatcggcctgccctcgggtgcacccgcgggtcccaacgtgggggatccctccatccgcaaagccagggtcctaaagatcgctctgggaaaagggaaggatgccgctcttcttccggaagcggaaacccagtgaggaggctcggaaacgcctggagtaccagatgtgtttggcaaaagaagctggggcagatgacattctcgacatctctaaatgtgagctctcagagattccatttggagcttttgcaacatgcaaagttctgcagaagaaggtgctgatcgtccacacgaatcacctcacttccctgcttcccaaatcctgcagcctcctgagtctggcaaccatcaaggttctagatctccacgataatcagctgacagcccttcctgacgatctggggcagctgactgccctccaggtcttaaacgtggaaaggaatcaactgatgcagctcccacgttccattgggaacctgacccagctccagactctcaatgttaaagacaacaagctgaaggagcttccagacaccgtgggggagcttcgaagcctgcgtaccctcaacatcagtggaaacgagatccagagattgccgcagatgctggctcacgttcgaaccctggagatgctgagccttgacgcctcggccatggtctacccgccgcgggaggtgtgtggtgccggcactgcggccatcttgcagttcctctgcaaagagtcagggctggaatactaccccccttctcagtacttgctgccaattctggagcaagatggaatcgagaactctcgggacagccctgatgggcccacggacagattctcaagggaggagttagagtggcagaacaggttctcagactatgagaagaggaaggaacagaagatgctggagaaactcgagtttgaacggcgcctggaactggggcagcgggagcacacccagctccttcagcagagcagcagccagaaggatgagatccttcagacggtcaaggaggagcagtcccggctggagcagggcctgagtgagcaccagcgccacctcaacgcagagcggcagcggctgcaggagcagctgaagcagacggaacagaacatttccagccggatccagaagctgctgcaggacaatcagagacaaaagaaaagctccgagattttgaaatcgctggaaaatgaaagaataagaatggaacagttgatgtccataacccaggaggagactgagagcctgcggcgacgtgacgttgcctccgccatgcagcagatgctgactgagagctgtaagaaccggctcatccagatggcctacgaatctcagaggcagaacttggtccagcaggcctgttccagcatggccgaaatggatgaacgattccagcagattctgtcgtggcagcaaatggatcagaacaaagccatcagccagatcctgcaggagagcgcgatgcagaaggctgcgttcgaggcactccaggtgaagaaagacctgatgcatcggcagatcaggagccaggagatgatctcggagcagcgctgggccctcagctccctgctccagcagctgctcaaagagaagcagcagcgagaggaagagctccgggaaatcctgacggagttagaagccaaaagtgaaaccaggcaggaaaattactggctgattcagtatcaacggcttttgaaccagaagcccttgtccttgaagctgcaagaagaggggatggagcgccagctggtggccctcctggaggagctgtcggctgagcactacctgcccatctttgcgcaccaccgcctctcactggacctgctgagccaaatgagcccaggggacctggccaaggtgggcgtctcagaagctggcctgcagcacgagatcctccggagagtccaggaactgctggatgcagccaggatccagccagagctgaaaccaccaatgggtgaggtcgtcacccctacggccccccaggagcctcctgagtctgtgaggccatccgctccccctgcagagctggaggtgcaggcctcagagtgtgtcgtgtgcctggaacgggaggcccagatgatcttcctcaactgtggccacgtctgctgctgccagcagtgctgccagccactgcgcacctgcccgctgtgccgccaggacatcgcccagcgcctccgcatctaccacagcagctgagtgctgcccgcccacctgggcctggtcctagccctgcctcggccactgtgagccccgggctcctgctcagccttgtgccagccagactcgtatgaggctcccccctgccctgggccccttccccactgcccaggagcccccatcctaagctccaagcatgtctgggccaggcagaggtgctcctcatccatgacaccaccagtctgaatggtcctgggggctggggctggagaggccgctgcaccaccacccgagcctgggagccagcgtcccagcctaatcacggatctgctgcctcccagctgtcttgactgaaggccaccgcccctgcaggagcttgggtcctcatctgggggccatgcacaggcccgtcccaccctgcatgtgggaagggagcaggagggcctggctgggtgaggggaggccttcctgggaaggcgtgtggtgcaggcctgtgctcacagtggcaccagcaaccctgggtctccctctctgctgctccccagaaccccggggccctcctgctctccacaactgtccctccttaccccatgtagctcgatccgaagcaggagtgtcaataaacctgtcttcagtgcg

SEQ ID NO: 147946 - DNA, 808 bp, Homo sapiens
  Payload ID: 9273
  Gene Symbol: LRRC1
  Gene Name: leucine rich repeat containing 1
  ENST ID: ENST00000370882
  CDS Start-End: 168-632
ccttgaagcacttccgaccgcgaagcccggcgcgagaagcgagctaacccaagagccaacaacgagcgcggagagggcagcggactgagcggagccgccggccagagcgggctcggagcccgggtctccgccgctcgggacccggctaggcggcggcgggggcggcgatgttccactgcatccccctgtggcggtgcaaccgtcatgtggagagcatcgacaagcgccactgctcgctggtctacgtccccgaggagatctaccgctatgcccggagcctggaggagctgctgctggacgccaaccagctccgcgagctgcccgagcaatttttccagctagtcaaattacgaaagcttggacttagtgataatgaaattcagcggctccctccagaaatagcaaacttcatgcagctggtggaactagatgtgtctcgaaatgagattcctgaaattccagaaagcatttcattctgtaaagcactgcaggtagctgacttcagcggaaacccactgactaggttgccagaaagctttcctgaattacagaatttaacatgtctttctgtaaatgacatctcactacagtctctacctgaaaatattggcaagcagaagacaactagctgacacctgttcagccagcaagttggtgtttttctgaaatgtacactgatgttttatctttatgccattagacttgctaattaaaaattctgcccttaaactctcaggaggagaagaagacaggaagccctcaatacactctaggtgtatggtatcagttgcagagaaaacagtggtat

SEQ ID NO: 147947 - DNA, 3180 bp, Homo sapiens
  Payload ID: 9273
  Gene Symbol: LRRC1
  Gene Name: leucine rich repeat containing 1
  Uniprot ID: Q9BTT6
  ENST ID: ENST00000370888
  CDS Start-End: 278-1852
ggaagctccgcgcggcggcgggggcggcgacggcgactggcgggtgggagtggaggcaccggctggcgggcgggggtacagggacggggcaggggctcccgctccaggttccttgaagcacttccgaccgcgaagcccggcgcgagaagcgagctaacccaagagccaacaacgagcgcggagagggcagcggactgagcggagccgccggccagagcgggctcggagcccgggtctccgccgctcgggacccggctaggcggcggcgggggcggcgatgttccactgcatccccctgtggcggtgcaaccgtcatgtggagagcatcgacaagcgccactgctcgctggtctacgtccccgaggagatctaccgctatgcccggagcctggaggagctgctgctggacgccaaccagctccgcgagctgcccgagcaatttttccagctagtcaaattacgaaagcttggacttagtgataatgaaattcagcggctccctccagaaatagcaaacttcatgcagctggtggaactagatgtgtctcgaaatgagattcctgaaattccagaaagcatttcattctgtaaagcactgcaggtagctgacttcagcggaaacccactgactaggttgccagaaagctttcctgaattacagaatttaacatgtctttctgtaaatgacatctcactacagtctctacctgaaaatattggcaatctttataacctggcttcactggaactgagagagaatcttcttacatatcttcctgactctcttacccagctgcgaagactagaagaacttgatttaggaaacaatgaaatatataatttgccagaatcaattggagccctcttacatctaaaagatctctggttggatggaaatcaactgtcagaattacctcaggaaataggaaatctgaagaacctgctgtgtttagatgtctctgaaaacaggttggaaagacttcctgaagaaatcagtggcctgacttcattaacggatttagtcatttcccagaacttattagaaacgattccggatggcattggaaaactaaagaaactgtcaatcttgaaggtggatcagaatagactcacacagttgcctgaagcagttggggaatgtgaaagtctcactgagttagttcttacagaaaatcagctcctgaccctgcctaaaagcattggaaaactaaagaagttgagcaacttgaatgcagacagaaataaattagtgtccttaccaaaagagatcggcgggtgctgcagcctcactgtgttctgtgtacgtgacaacagactaactcggatacctgcagaggtgtcacaggcaacagaacttcatgtcctggatgtggcagggaacaggttgctgcatctacctttatccctgactgccttgaagttgaaggctctgtggctatctgacaaccagtcccagcccctgcttacattccagacagacacagactacaccacaggagagaagattttaacctgtgtcttacttcctcagctgccttctgaacctacttgtcaagagaatctgcctcgctgtggtgcactggagaacttggtaaatgatgtctctgatgaagcctggaacgagcgtgctgtcaacagagtcagtgcgatccgatttgtggaggatgagaaagatgaagaagacaatgagacgagaacacttctaaggcgagccactccacacccaggggagttaaagcacatgaaaaagacagtggagaatttacggaatgacatgaatgctgctaaaggactggactcaaacaaaaacgaggtcaatcatgccattgaccgagtgaccacttctgtgtagagtttcacctccaagttttacctcctgtgtcttcctctgctgtcgagacgttcctgtctgcttcccgggagcctcacgtgctccttgtcctaaccagcccccgcgcgccatcttcccgtggagtgtggggaagctgctgtctcccaggaagtgccttactcatcccgcaaccagtcagcgcaccagtggtctcccggtgtgattttttttttttttaatttcagttgtttgtaataagtagaatacactactgtaaacatacgacctttgtttttgtcttatgttggggtaaaggaaagcaggaaggggaatttttatcctcctcccttccgtaaagtgctgggatattttgaatcccccaagttcccttggacctactgatgagagatagttttatgtatggggaaaaatggatactttttaaaccttttttggcagctcagatggtgtaaattttaaaattttgtataggtatttcataacaaaaatatgtatttcttttttgttattttatcttgaaaacggtacatattttagtatttgtgcagaaaaacaagtcctaaagtatttgtttttatttgtaccatccacttgtgccttactgtatcctgtgtcatgtccaatcagttgtaaacaatggcatctttgaacagtgtgatgagaataggaatgtggtgttttaaagcagtgttgcattttaatcagtaatctacctggtggatttgtttttaaccaaaaagatgaattatcaatgatttgtaattatatcagttgattttttttgaaaagatgaaccaaaggatttgactgctaatattttattccttacactttttttctgaataagtctctcataatgagtgcagtgtcagactgtgcctactctgatggtatgtgccatttgtaaaataaaatagagcagaaaaacacaaaaagagaacactggttcagacattcagtgggcaagtaaattatggactgcaaaataatgatttttattcaagaaagctttaaaagttttatatccagatatacaaccacaataaagcaaaataacctactatcaaaatagaaatgttgctatctttataagtgcaatttaatttgtaaatagagtttgaatcaaagtatcacaaaatactgcttcaagatttaattttaaatctgctaatttaagggatattgggaaaagttttggtgtgtttctgttgatttcttttttgtatgctgtgataaaagagaaatgaaaagtgccagtcactgtgtggtgtctaggaaaatcatatatatttttttctccaagaaataaattcatcctggacattggc

SEQ ID NO: 147948 - DNA, 2527 bp, Homo sapiens
  Payload ID: 9273
  Gene Symbol: LRRC1
  Gene Name: leucine rich repeat containing 1
  Uniprot ID: Q9BTT6
  ENST ID: ENST00000487251
  CDS Start-End: 642-1235
acttctggggcagccgtgagcagcgggcacacgggcagccacgaaagcagcagcgagggtggtgcaaacacctcaaaactacaccgaatccagtagcgcctggcgcccccggcgcgcaaggccgcctctactccgcctcatctttgtcccaagtcctttcacagtctgccttcctcaaacggcccgatgcgcccccgtctttgccggagtaagcagaccgccagcagccggcccgcaggtcagtcgaccctctctggatgcaggtcgccgggaaaacccggagcggagcatccctcgggccgggaaacgccctcggcgcgcacccactggcgcgcatgctcagtccgcgcggcggctgcgagtaggaagctccgcgcggcggcgggggcggcgacggcgactggcgggtgggagtggaggcaccggctggcgggcgggggtacagggacggggcaggggctcccgctccaggttccttgaagcacttccgaccgcgaagcccggcgcgagaagcgagctaacccaagagccaacaacgagcgcggagagggcagcggactgagcggagccgccggccagagcgggctcggagcccgggtctccgccgctcgggacccggctaggcggcggcgggggcggcgatgttccactgcatccccctgtggcggtgcaaccgtcatgtggagagcatcgacaagcgccactgctcgctggtctacgtccccgaggagatctaccgctatgcccggagcctggaggagctgctgctggacgccaaccagctccgcgagctgcccgagcaatttttccagctagtcaaattacgaaagcttggacttagtgataatgaaattcagcggctccctccagaaatagcaaacttcatgcagctggtggaactagatgtgtctcgaaatgagattcctgaaattccagaaagcatttcattctgtaaagcactgcaggtagctgacttcagcggaaacccactgactaggttgccagaaagctttcctgaattacagaatttaacatgtctttctgtaaatgacatctcactacagtctctacctgaaaatattggcaatctttataacctggcttcactggaactgagagagaatcttcttacatatcttcctgactctcttacccagctgcgaagactagaagaacttgatttaggaaacaatgaaatatataatttgaatcaattggagccctcttacatctaaaagatctctggttggatggaaatcaactgtcagaattacctcaggaaataggaaatctgaagaacctgctgtgtttagatgtctctgaaaacaggttggaaagacttcctgaagaaatcagtggcctgacttcattaacggatttagtcatttcccagaacttattagaaacgattccggatggcattggaaaactaaagaaactgtcaatcttgaaggtggatcagaatagactcacacagttgcctgaagcagttggggaatgtgaaagtctcactgagttagttcttacagaaaatcagctcctgaccctgcctaaaagcattggaaaactaaagaagttgagcaacttgaatgcagacagaaataaattagtgtccttaccaaaagaggtatgtgcttttagagaaatcacatgataataattatgaagaaataataataatacataagggatcaaaaatgtcaaatgctttgaaaagacgcatgtgttgttttttaaaggtgtgaactctaaatctgtgagtatagagccaactggaggaattatgtcaaagaatgatcatcagtaacattaaggagagttggaaaaggtgaatttataggattttaaatgggagaaagaaagagattgacattttgggtttgatatacagagaatggtgacaccattggcagaaattgataatttgggagtttgacagaggaagtggatgcctttgggtttgatttttgaatttaatgtgaaattaagctccatcccataagcaattggaattataaaaattgatcttgatgcaaccatatttctgggcagagatttacattgggccatgctcatgtcttggatgaggttgaacaaactgttcacaaaggcatacacatagaggaaggtgaatgggaagctaaagccagcttcctaggactttttttttggttagtagtctaagcacgagaaaatgagacatcaccatctgttgtggagagtagctgtatggactgagaggcatttaaattctggcaagggaggtggaaatgctgacaatgaggaggaagcttatagtgggtcaaacaaggaggtgtctagtgtgttgtttaaaaagaaggcttacaattagccaggcgtggtggcgggcgcctgtagtcccagctactcgggaggctgaggcaagagaattgcctgaacccgggaggctaaggttgcagtgagccgagaccacgccactgcactccagcccgggtgacagagcgagactctatctcaaaaaaaaaaaaaaaaaaaaaatgaaaag

SEQ ID NO: 147949 - DNA, 2599 bp, Homo sapiens
  Payload ID: 9274
  Gene Symbol: LRRC10
  Gene Name: leucine rich repeat containing 10
  Uniprot ID: Q5BKY1
  ENST ID: ENST00000361484
  CDS Start-End: 325-1158
gttaatattttatcattagggaaaaaaacagcaaagctattttcagcttgaaatgaaaaaaggttgataaaggggattggggcttaggtgattaaaggcaagcatgtgagtcagacatggcctcccagcccctgccggactgttgcgctgtcgccggacactcaagttgctatcaggagcacttttctctgtcaaagtgactggcttttgtcatgcaatccccaagttataatgggagggtaggataggccccagagcagtcagctgagccagccccgctcagtgagtctgtcctctggggctcgccatgcccccagcctccgcatggggaacaccatcagggccctcgtggccttcatccctgctgaccgttgccagaactatgtggtcagggacctccgtgagatgccgctggacaagatggtggatctgagtgggagccagttacgccgcttccccctgcacgtgtgctccttcagggagctggtcaagctctacctgagcgacaaccacctcaatagcctgcctccggagctggggcagctacagaacctgcagattctggccttggatttcaacaacttcaaggctctgccccaggtggtgtgcaccttgaaacagctctgcatcctctacctgggcaacaacaaactctgcgacctccccagtgagctgagcctgctccagaacctcaggaccctgtggatcgaggccaactgcctcacccagctgccggatgtggtctgtgagctgagtctccttaagactctgcatgccggctccaacgccctgcgtttgctgccaggccagctccggcgcctccaggagctgaggaccatctggctctcgggcaaccggctaactgactttcccactgtgctgcttcacatgcccttcctggaggtgattgatgtggactggaacagcatccgttacttccccagcctggcgcacctgtcaagtctgaagctggtcatctatgaccacaatccttgcaggaacgcacccaaggtggccaaaggtgtgcgccgtgtggggagatgggcagaggagacgccagagcccgaccctagaaaagccaggcgctatgcgttggtcagagaggaaagccaggagctacaggcaccagtccctctacttcctcctaccaactcctgaggagcttcagttgcaagtcaatgccaaggacccaactgcagcatgttctggaagcctctccattggagtggaaaggatggctctgggtcatttgggagtggctctgctagtagagactgatggagagagccaggtggaatgccataaatcacactgagaaaatatttctggcaaacagctcctcttccagaggggagttgtgtgccaatgatggcatgacaatccagagatcataacttctttgcaagaaaacagcttctccacacatgtattttgaaacactgaagagcaaaaggggctgggacactctgaactcctgcactctccagaagtgactggtcatgaagctcatgagctcctcaaataaggtatttgccatagaactaaatattctggtggtctgtctctttgcaggacatattttctttactgtaaatgaccataaacagtatcaatgtatcactgaggccaccgaaaaggacatttctacctaggcaatcagtcagattcacagaaaaaagttgtttgttgttgtaaaggctcaagatgaaactctttccccagcagtttagtgcctgctgaaaagatccctgatggacaatacttcttggtggactccagctgccccttttattattattagagacaaggtctcactctgttgctaggctggagtgcagtggcacaatcatggctcactgcagccccgaactactgggctcaagccttcctcccgcctcagcctgcccagtaactggtactacagatgtgcacacctggctaagtctttaattttttcgtagagatgaggtcttgctatgttgcccaagctagtttcaaactcctgggctcaagcgatgctcctgcttcagcctcccaaagtgctggggttacaggcatgagccaccacacccagccttcagctgtcaccttaaacttgacagtggctcatgctgatttagttcattttccctaaaaggtttgtcccaagatctgctcccaacagttgactgtcactgacaatgttggaagtcatctggaaaagagaacctctgtggtaatgtggtctcattaaagtcaagccttgttgtgattcctgtctacctccctgaagcaaagcccttctgtttattcacactaatgagccagagctgagctaaattgaatccctgtccttggaggaaaaccacatttccagaagcatgttagtttaaaggtagtaggtgagaaatgtgttctcttgaaacaagcactttgaaatttgaataggaagttgtagtgtatataggaagtctctgcctctttcgcctagtatctctgcctttgtttcaatttgttttgatttttacagactgttttgacaatgtataaaccaaggtattttgttttttggaagtatgtaaattgtgaccttcccacaaatatataaactttaaagaaa

SEQ ID NO: 147950 - DNA, 2219 bp, Homo sapiens
  Payload ID: 9275
  Gene Symbol: LRRC10B
  Gene Name: leucine rich repeat containing 10B
  Uniprot ID: A6NIK2
  ENST ID: ENST00000378075
  CDS Start-End: 200-1078
cgcggcgcgcggcggcggtgccccaagtgggtgcctcctcccggccccgcacggcccccctcccggcgcgggggaaggccggggcggggggcccgggggccggcgcggctccggcaccgtcggggcggctggggggcggccggggcggggcgatgcctggcggtggcagtggcggcggccccggccggggcccgtgaccatgggcatcgccgagtccacgccggatgagctgccgtcggacgcagaggagcagctgcgcagcggcgaccagcagctggagctgagcgggcggcggttgcggcggctgcccagcgcagtgtgcgcgctgagccgcctgcagaagctgtatgtgagcggcacggggctgcgcgagctgccggaggagatcgaggagctgcgcgagctgcgcatcctggcgctggacttcaacaagctcgagcgactgcctgacggcctgtgccgcctgccgcgcctcacgcgcctctatctgggcggcaaccggctgctggcgctgcccgccgacttcgcgcagttgcagagcctgcgctgcctctggatcgagggcaacttcttgcggcgcttcccgcggccgctgctgcgcctggtggcgctgcagtcgctccagatgggcgacaaccggctgcgcgcgctgccggccgagctgccgcgcatgacgggcttgcgcggcctctggctctacggcaaccgcttcgaggagttcccgcccgcgctgctgcgcatgggccgcctgcacatcctcgacctcgaccgcaaccgcctgggcggcttccccgacctgcacccgctgcgcgcgctgcgcgtcttctcctacgaccacaaccccgtcaccgggcccccgcgcgtcgcggacaccgtgttcctcgtgggcgagggcgccgtcgagcgcatggcggagcgcgacgagcccacgccccggcctccgccccggcgcccagcgcgggcctttgaggatgaggaggaggaagacctgctcataggcggcgctggttcccgggctctgggcgcccccgggggcagcttccgcgccctggaagccgctccaggactgggcacctgagcctatgttctggctgatgggcttcagccactctgagaggaggggctctaggaagctttggctggttaggcctgcgggactggtgggtccctacttaggtcaatggaacggctacttttggcgagttgccgggcacaggcagggctggggctcatcttcagacactcctaggtagtaagaggactgactataccctggctgatctgtgggcaattgtcagaccaagaagtctgggctgggtccagtccccgatggagccactgataacagaggcaccagcttcctcctggaaccagggtctctgagggccacagaattgtcacgtctccctgagtctggatgcagggcacccaacaccctccctctttctggggtttgggtctcctaggcccaccctttctaggacaggagccgctacctctgggatggactgcgtgcctgtgtggggcaggactgcccttgcgaggagggcctggcccaggagcaggggcttggagtggggctggtgcccgggacagaagtgggaaatagatgggggccccaacaccgaagctgccctcacccctccatcagggctgatcgtacatacctccctcctcggccccctgagattggtatggggcacagaaggcagggggtcacccccaccctattctgttctcttctcccagcctcccagcatgtgcctggaaccttgctgggaagagagagctccccctccactccccaccccatagcctgagccttccagctgtcaagtttgaaaagaagccaccgtgcctccagggcctcctgcaccgcagagaggggctctctgctctgggaggctgctcagcgcctctcccacggcctgcactctcctttcccttaaatgggcacagccagggtggctggcatgggactggcactctgtacctccactccgtcaccagggacagccccgagggggtgaggagaggggccttgctctgcaattcccagagccagatcttcctcatccaagcaataacgggacgagggagccagggccaaggacactcagggacactgttggggcagcggccccacatggtaatgttttctttagagagaagaaaaaacaactggctgtaaacgtaaattatatttcttggagaaagaa

SEQ ID NO: 147951 - DNA, 5328 bp, Homo sapiens
  Payload ID: 9276
  Gene Symbol: LRRC14
  Gene Name: leucine rich repeat containing 14
  Uniprot ID: Q15048
  ENST ID: ENST00000292524
  CDS Start-End: 147-1628
cggggctggaggcggtggctgcggttgcgggaccggcactatgctgggccttcctaccacttgtgtgtggcttggtagtggcctagggtctctcctccctgctgaagtccctctcctgcaggtggccgtctgcccggcccagcaccatgcacacgcttgtgttcttgagcacacggcaggtgctgcagtgccagccagctgcctgccaggccctgcccttgctgccacgcgaactcttccccctgctgttcaaggtggccttcatggacaagaagacagtggtactgcgcgagttggtacacacgtggcccttcccgctgctcagtttccagcagctgctacaggagtgtgcccactgcagccgtgccctcctgcaggagcggcctagcactgagagcatgcaggctgttatcctggggctgactgcccggctccacacctcagagcctggggccagcacacagcccctctgcaggaagcatgcgctgcgggtgctggacatgacgggcctcttggatgatggtgtggaacaggatcctggcaccatgagcatgtgggactgtactgctgccgtagctcgcacatgcattgcccagcagcagggtggggccgcagagcctgggccagcccccatccccgtggaggtgcgcgtggacctgcgggtgaaccgggcctcctatgcgttcctgcgggaggcactccgaagcagcgtgggcagcccgctgcggctctgctgccgggacctgcgagctgaggacctgcccatgcgcaacactgtggccctgctgcagcttctggatgcaggctgcctgcgccgcgtggacctgcgcttcaacaatctgggcctgcgcggcctgtctgtgatcatcccacacgtggcccgcttccagcacctggccagcctgcggctccactatgtgcatggggattcaaggcagccctccgtggatggcgaggacaacttccgctacttccttgcccagatgggccgcttcacctgtctgcgtgagctcagcatgggctcctctctcctttcagggaggctggaccagctgctcagcaccctgcagagccccctggagagcctggagttggccttctgtgctctgctgcctgaggacctacgcttcctggcacggagcccacatgctgcccacctcaagaagttggacctgagtggtaacgacctgtctggcagccagctggcacccttccagggtctgttgcaggcatcagcagccacactgttgcatctggagctgactgagtgtcagctcgcagacacccagctgttggccacactacccatcctgactcagtgcgccagtctccggtaccttggcctctatggcaacccactgtccatggcgggcctcaaggagctgctgcgggactcagtggcacaggctgagctgcgtactgtggtgcaccccttccctgtggactgctatgagggcttgccctggccgccgcctgcctctgtcctgctggaggcctccatcaatgaggagaagtttgcccgcgtagaagctgagttgcaccagctgcttctagcctcaggccgtgcccatgtgctctggaccacggacatctacgggcgactggctgcggactacttcagcctatgatgaagtagctctgggtgagacacaggccgccctgcagtctctttaggtaggcagggcctttgctgggacccctggtggaggccttcacaaaagcactggttactggtttcctgctgggtctaccttgcttctgggcacacctcaagcctcccctgctttctgcagtgccccacgcggttttccctgcacttgctccataattggctgatcatctgtgggccccggggctggatgtcaggcctccattgccctgctcagtttggctgcatttggctgccgtctggggtcctggtcctttgtgcaaatgctttgggattccagttgtgagctgagagagatgatggcctctctgggcctttcctctccctttactgagagctcagtgcttctggggttgaagttggacagaggcctgcttcagggaagctgggagtccccaggcactcacgcctcttacgtgttccctaccctgccacccagccaccccactgggctgggctcgggctggagggggtcatcaaggtacacatgtgcctggaagttgaatttgtggctgtttttttttctgtccacgttggtcacccttatccttatctctgctgtcacccccaacatggccacccggcaacaactgccatccagcctgtcgccccgcccttcgcggggcagccccgtcggcactgccggccagtccttgctcttcccacctttcggaggcccaagatcctactgtggccggccagggccagcgagggaccccccccatgcagagctggaggttggggtgatgtcttttcggaagagcttcaagggaggtgttggggcctccccggccaccttccattgctaccccaggattcccgagtgcaacgttcccggctcgcgccccacacacggctcagcgcacactgcgcggcttccacctttactgacggagcatgcgcgaggccgcaccggccaatctccggcgcccacgtcatccgcgcgcccgcggccctagcagtggatctcgtaggcgaccggcgggggcacgcggagtcccggccccgccccctgttccgggccgcagtcagcgggcgcctccgccggaccctcggcgaagagcggcttggagcggttgatgacgaacatctcgtggccgcgctcgtcgcggagctcctctagctgtgcgaacgtacaggggccgtccaagtagtcgttgacgaacagcgctccctcccccggaggcccccgcgccttttttcgcctgcggcgccggcgacagatcatggcgaccaggagcagcgccgtgagcgccagcagcgcgatggccgccgcaatggccgtctgtgtggccacgcccagggcgcggaaggccatgctgcccgcctcgggccggggctcgctgccggcggggcgggcggccggaggcggcggttgcgcgggctgctgcggctgctgccgggacgcgttgaccaggagccggaagggcacgcgggcagcgccgccggcgttggaggcctcgcactcgtacttaccggcgtgcgccagcgtgatgttgctgaggaagagcatgccgctgcccgtgtcggatgccgagtgtccgcccaggcccagcaacccgccttctagctgggcctgggctcgcggccggccctcgcgaggctggggcacctttctccaggtcaccaatggctgcgggtagccggaggcttggcaggcaacccgcaggtcctcacccaggttggctgtgagctccagcggctgcacgtggacagagggcggaatgcagatgaggctgctgtgggatacgtccaggagactctggagcgccaggcgcgggggctctgcacacatgatcttcctgtccctggaggtgagcagccgctggccgccctccttgatccaggcacccagccagtgcagggcgcagtcacagcgccatgggttctctgtgggagagcagcgttaggcaggtggcttgagggtgctgctaaaacagcctgtgcagttggggttttgcaggccaggacagaggcctctttcccacctcccacagcgttttcacacggagtccaaggccctgccaccccttccttgaccccaagctccttggggcggcaggcccttcaccctcgcccccctcccctttagctctgtgatgcctgcctgttacagatcacttctccgtcggtctctgagaaagcacctgctccttaagtcttcctgcaacaagtgccactgtttttaggaacctgggcgtccacatagacatctcaccagcactgaaacctcacaagtcctctcagccttgcctttggatgccctctcttgggaatgtccccagtcctggtcagctgtctctctcctttgcaattttgtctgcctcccctcagcctaaaagtgtgcagaaccctcaattctgttaagtcaccctgtggagttcctgtcttctgttttccccaggcagggtgcctgagctgtattccccagcacacccactcccgcagccctccagtgtggctgcaggcggtggtgcagccttccagactgctgcccagttgcctgatgtcagagcccctccacacatgagcctgctccctactgccaacaccgtggcccagacagagacgctttccgaggaagaggtacctgtgaggcgcaggacttgcagactggccaggggctgcagggcctctcggctgatggtgcccagctggttcctgctgaggtccagcagtgctagggaggacagccccgctagagcctggtcctccagcagctcaatgctgttttcttgcaggtgaagctcctgcagtcgctgaagtaaggacagcagatcgtgaggaaaaagggcgccgaggttgggggcatgtctctcttcttaccaagctagactgggttgccttttctaactattccagccctacagggcgaggggccataatggagtatcccgcccctttagaccccaggcgctcaccggcaggtgcaagaaggtgaaatccagcagccgcgccagctggttgcccgccaggtagagcacgcgcagctgggccaggcctacgaaggcgccgctgcgcaagccgcgcagccggttgctagtgagcgccagctccagcaggcgcggctgcgcgcggaaggcgccggcctccagggcgcgcaggctgttgttgtgcaggtagagccggcgcagagcggcgagtggcgccagggctcccggctctaggcgggcgatgttgttgtcctgcaggaacagtgtctgcaggccggggaaagaggaggcgcttaccccgttgcgggggtcttcctctccctgggggcaccccgtcctcccgcagctccacacggtgcccacctgcgtccctggcgggattcccagcgggacgacgcgcaaccgcagggcgccacactccaccgtggcgctgtagcagcggcaggctgctgggcagccggcggcgcggagcggcagtagtagcagcagcagcggcagcagtgcgggggccctcagggccatctcccgaggcccggttcctcaccggcccttccgcggttcagccgcagacgcgtgccctcctgaaacacaggttggcaggccagtctcggcagtcgagagccagccaatagatggaatggaggcctgcacctgcgtctaacttttgacgctataaataggttcaagaaactaataaaacgttctggttttctcctttgacaaaaa

SEQ ID NO: 147952 - DNA, 661 bp, Homo sapiens
  Payload ID: 9276
  Gene Symbol: LRRC14
  Gene Name: leucine rich repeat containing 14
  ENST ID: ENST00000525766
  CDS Start-End: 183-661
acagggagatggctgcgatttagttttgaggatgctacaggcagcagcagggctggcaccctgtgtcacaggcactatgctgggccttcctaccacttgtgtgtggcttggtagtggcctagggtctctcctccctgctgaagtccctctcctgcaggtggccgtctgcccggcccagcaccatgcacacgcttgtgttcttgagcacacggcaggtgctgcagtgccagccagctgcctgccaggccctgcccttgctgccacgcgaactcttccccctgctgttcaaggtggccttcatggacaagaagacagtggtactgcgcgagttggtacacacgtggcccttcccgctgctcagtttccagcagctgctacaggagtgtgcccactgcagccgtgccctcctgcaggagcggcctagcactgagagcatgcaggctgttatcctggggctgactgcccggctccacacctcagagcctggggccagcacacagcccctctgcaggaagcatgcgctgcgggtgctggacatgacgggcctcttggatgatggtgtggaacaggatcctggcaccatgagcatgtgggactgtactgctgccgtagctcgcacatgcattgcccagcagcagggtggggccgcagagcctgggcc

SEQ ID NO: 147953 - DNA, 2243 bp, Homo sapiens
  Payload ID: 9276
  Gene Symbol: LRRC14
  Gene Name: leucine rich repeat containing 14
  Uniprot ID: Q15048
  ENST ID: ENST00000529022
  CDS Start-End: 216-1697
ggcggggctggaggcggtggctgcggttgcgggaccgggagatggctgcgatttagttttgaggatgctacaggcagcagcagggctggcaccctgtgtcacaggcactatgctgggccttcctaccacttgtgtgtggcttggtagtggcctagggtctctcctccctgctgaagtccctctcctgcaggtggccgtctgcccggcccagcaccatgcacacgcttgtgttcttgagcacacggcaggtgctgcagtgccagccagctgcctgccaggccctgcccttgctgccacgcgaactcttccccctgctgttcaaggtggccttcatggacaagaagacagtggtactgcgcgagttggtacacacgtggcccttcccgctgctcagtttccagcagctgctacaggagtgtgcccactgcagccgtgccctcctgcaggagcggcctagcactgagagcatgcaggctgttatcctggggctgactgcccggctccacacctcagagcctggggccagcacacagcccctctgcaggaagcatgcgctgcgggtgctggacatgacgggcctcttggatgatggtgtggaacaggatcctggcaccatgagcatgtgggactgtactgctgccgtagctcgcacatgcattgcccagcagcagggtggggccgcagagcctgggccagcccccatccccgtggaggtgcgcgtggacctgcgggtgaaccgggcctcctatgcgttcctgcgggaggcactccgaagcagcgtgggcagcccgctgcggctctgctgccgggacctgcgagctgaggacctgcccatgcgcaacactgtggccctgctgcagcttctggatgcaggctgcctgcgccgcgtggacctgcgcttcaacaatctgggcctgcgcggcctgtctgtgatcatcccacacgtggcccgcttccagcacctggccagcctgcggctccactatgtgcatggggattcaaggcagccctccgtggatggcgaggacaacttccgctacttccttgcccagatgggccgcttcacctgtctgcgtgagctcagcatgggctcctctctcctttcagggaggctggaccagctgctcagcaccctgcagagccccctggagagcctggagttggccttctgtgctctgctgcctgaggacctacgcttcctggcacggagcccacatgctgcccacctcaagaagttggacctgagtggtaacgacctgtctggcagccagctggcacccttccagggtctgttgcaggcatcagcagccacactgttgcatctggagctgactgagtgtcagctcgcagacacccagctgttggccacactacccatcctgactcagtgcgccagtctccggtaccttggcctctatggcaacccactgtccatggcgggcctcaaggagctgctgcgggactcagtggcacaggctgagctgcgtactgtggtgcaccccttccctgtggactgctatgagggcttgccctggccgccgcctgcctctgtcctgctggaggcctccatcaatgaggagaagtttgcccgcgtagaagctgagttgcaccagctgcttctagcctcaggccgtgcccatgtgctctggaccacggacatctacgggcgactggctgcggactacttcagcctatgatgaagtagctctgggtgagacacaggccgccctgcagtctctttaggtaggcagggcctttgctgggacccctggtggaggccttcacaaaagcactggttactggtttcctgctgggtctaccttgcttctgggcacacctcaagcctcccctgctttctgcagtgccccacgcggttttccctgcacttgctccataattggctgatcatctgtgggccccggggctggatgtcaggcctccattgccctgctcagtttggctgcatttggctgccgtctggggtcctggtcctttgtgcaaatgctttgggattccagttgtgagctgagagagatgatggcctctctgggcctttcctctccctttactgagagctcagtgcttctggggttgaagttggacagaggcctgcttcagggaagctgggagtccccaggcactcacgcctcttacgtgttccctaccctgccacccagccaccccactgggctgggctcgggctggagggggtcatcaaggtacacatgtgcctggaagttgaa

SEQ ID NO: 147954 - DNA, 730 bp, Homo sapiens
  Payload ID: 9276
  Gene Symbol: LRRC14
  Gene Name: leucine rich repeat containing 14
  ENST ID: ENST00000530854
  CDS Start-End: 471-730
cttcgcgaaacgcaggcgaccgaggaccgtcgcgttccctgcggccggcgggaggggagggggcgtcgcacggaggtgcctgcctcccttggtgggcaggccgtctgctttggtgttctcccgtgacaagtgctcggttggtctgtcctgtcagagcgagtatgatcgttgagatctgtccaccggcagaactaggccgagggttggtgtctgggacttttcaggaaccggtgccttaaggacttacttgtatgtggaaaagtcgacaaaaagaagggccttggggccagagtgtcttccccggcccccttccctggcttgtcactcaggctgtgaccttgggccaggccgaggccttcattttctaatctgtcacagggagatggctgcgatttagttttgaggatgctacaggcagcagcagggctggcaccctgtgtcacaggtggccgtctgcccggcccagcaccatgcacacgcttgtgttcttgagcacacggcaggtgctgcagtgccagccagctgcctgccaggccctgcccttgctgccacgcgaactcttccccctgctgttcaaggtggccttcatggacaagaagacagtggtactgcgcgagttggtacacacgtggcccttcccgctgctcagtttccagcagctgctacaggagtgtgcccactgcagccgtgccctcctgcaggagcggcctagcactgagagcatgcaggc

SEQ ID NO: 147955 - DNA, 978 bp, Homo sapiens
  Payload ID: 9276
  Gene Symbol: LRRC14
  Gene Name: leucine rich repeat containing 14
  ENST ID: ENST00000527730
  CDS Start-End: 76-978
ggcggacggtctaggcggggctggaggcggtggctgcggttgcgggaccggtggccgtctgcccggcccagcaccatgcacacgcttgtgttcttgagcacacggcaggtgctgcagtgccagccagctgcctgccaggccctgcccttgctgccacgcgaactcttccccctgctgttcaaggtggccttcatggacaagaagacagtggtactgcgcgagttggtacacacgtggcccttcccgctgctcagtttccagcagctgctacaggagtgtgcccactgcagccgtgccctcctgcaggagcggcctagcactgagagcatgcaggctgttatcctggggctgactgcccggctccacacctcagagcctggggccagcacacagcccctctgcaggaagcatgcgctgcgggtgctggacatgacgggcctcttggatgatggtgtggaacaggatcctggcaccatgagcatgtgggactgtactgctgccgtagctcgcacatgcattgcccagcagcagggtggggccgcagagcctgggccagcccccatccccgtggaggtgcgcgtggacctgcgggtgaaccgggcctcctatgcgttcctgcgggaggcactccgaagcagcgtgggcagcccgctgcggctctgctgccgggacctgcgagctgaggacctgcccatgcgcaacactgtggccctgctgcagcttctggatgcaggctgcctgcgccgcgtggacctgcgcttcaacaatctgggcctgcgcggcctgtctgtgatcatcccacacgtggcccgcttccagcacctggccagcctgcggctccactatgtgcatggggattcaaggcagccctccgtggatggcgaggacaacttccgctacttccttgcccagatgggccgcttcacctgtctgcgtgagctcagcatgggctcctctctcctttcagggaggctggac

SEQ ID NO: 147956 - DNA, 1573 bp, Homo sapiens
  Payload ID: 9277
  Gene Symbol: LRRC14B
  Gene Name: leucine rich repeat containing 14B
  Uniprot ID: A6NHZ5
  ENST ID: ENST00000328278
  CDS Start-End: 29-1573
gtcgtggggagcggtcctgtctcgggccatggacacaatgaggtcactccgcttcatttctgcagaagctctggtgtcccacccccaggtggcccggcagagcctggacagcgtggcccacaacctctacccactcctgttcaaagccagctacctgctggagcaggcggaggtgacgcgcgcggtgctggggcgctggcccctggaggagttccggctgggagcgctgctgggtcctggtgccgaccacccccaggacctgcgcgacagaacctgcagggcctgcctggaggcgctggtgcgcggcctcgcggaccacgtgctgcaggaccggagccgccggcggctgcgggtggctgacctcacgggcatccgagatgtgcaggtgcagcggtgcccgtgcgggagggcgctgggcaggtggggccgcacccagctgctggccaggacctgctgtgagctgcaggcagagcccctcgcagccgggcgccccgtcgaggtcctcgccgacctcttcgtcactgagggcaacttcgaggcggtggtgcaggctctgaggccagcgggcccggcccctctgcgggtgcactgcccctcgttccgggcggacagcctgagccccagccagctcctgcacgtgctgcgtctggctggcccgggtgccctgcgcaagctggaggtggtgcacaacgtgcggctgcatgcgggccacgtgcagcagcttctggcccaggtgggcttcccccggctggcctcgctcaccctgcccaccaaggcctttgatgcaccccccacctacgcctccactcccgacggcgaggaccccctcctcgcctccatcgcccgggagctcagcaagatggcgcagctcactgagctcagtgtggccttctccacgctgaccgggaagatcccgacgctgcttggccccctacagaccccgctgcgagtactggacctggccaactgtgccctgaaccacacggacatggccttcttggcagactgtgcccacgctgcccacctggaggtgctggacctcagtggacacaacctggtcagcctgtacccctcgaccttcttcaggctgctcagccaggcttcccggacgctgaggatcctgacactggaggagtgtggcatcgtagacagccacgttggcatgctgatcctgggcctgagcccctgccaccggctgcgccagctcaagttcctcgggaacccgctgtcggcccgcgccctccggcgcctcttcaccgcactctgtgagctccccgagctgcgctgcattgagttcccggtgcccaaggactgctaccccgagggtgccgcctacccacaggacgagctggccatgtccaagttcaaccagcagaaatacgacgagatcgccgaggagctgcgtgccgtgctgctgcgggctgaccgagaggacatccaagtctccacacctctctttggaagttttgacccagacattcaagaaacaagcaatgagcttggtgctttcttgctgcaagctttcaaaactgctctagaaaacttctccagagcactcaaacaaatagagtag

SEQ ID NO: 147957 - DNA, 5883 bp, Homo sapiens
  Payload ID: 9278
  Gene Symbol: LRRC15
  Gene Name: leucine rich repeat containing 15
  Uniprot ID: Q8TF66
  ENST ID: ENST00000347624
  CDS Start-End: 87-1832
acactcatgctgcagccttgagccgtccctcgtcctcctctcaggctccctcttgtccacggcgggcgggcgccgagctgctggctatgccactgaagcattatctccttttgctggtgggctgccaagcctggggtgcagggttggcctaccatggctgccctagcgagtgtacctgctccagggcctcccaggtggagtgcaccggggcacgcattgtggcagtgcccacccctctgccctggaacgccatgagcctgcagatcctcaacacgcacatcactgaactcaatgagtccccgttcctcaatatctcagccctcatcgccctgaggattgagaagaatgagctgtcgcgcatcacgcctggggccttccgaaacctgggctcgctgcgctatctcagcctcgccaacaacaagctgcaggttctgcccatcggcctcttccagggcctggacagcctcgagtctctccttctgtccagtaaccagctgttgcagatccagccggcccacttctcccagtgcagcaacctcaaggagctgcagttgcacggcaaccacctggaatacatccctgacggagccttcgaccacctggtaggactcacgaagctcaatctgggcaagaatagcctcacccacatctcacccagggtcttccagcacctgggcaacctccaggtcctccggctgtatgagaacaggctcacggatatccccatgggcacttttgatgggcttgttaacctgcaggaactggctctgcagcagaaccagattggactgctctcccctggtctcttccacaacaaccacaacctccagagactctacctgtccaacaaccacatctcccagctgccacccagcgtcttcatgcagctgccccagctcaaccgtcttactctctttgggaattccctgaaggagctctctccggggatcttcgggcccatgcccaacctgcgggagctttggctctatgacaaccacatctcttctctacccgacaatgtcttcagcaacctccgccagttgcaggtcctgattcttagccgcaatcagatcagcttcatctccccgggtgccttcaacgggctaacggagcttcgggagctgtccctccacaccaacgcactgcaggacctggacgggaacgtcttccgcatgttggccaacctgcagaacatctccctgcagaacaaccgcctcagacagctcccagggaatatcttcgccaacgtcaatggcctcatggccatccagctgcagaacaaccagctggagaacttgcccctcggcatcttcgatcacctggggaaactgtgtgagctgcggctgtatgacaatccctggaggtgtgactcagacatccttccgctccgcaactggctcctgctcaaccagcctaggttagggacggacactgtacctgtgtgtttcagcccagccaatgtccgaggccagtccctcattatcatcaatgtcaacgttgctgttccaagcgtccatgtccccgaggtgcctagttacccagaaacaccatggtacccagacacacccagttaccctgacaccacatccgtctcttctaccactgagctaaccagccctgtggaagactacactgatctgactaccattcaggtcactgatgaccgcagcgtttggggcatgacccaggcccagagcgggctggccattgccgccattgtaattggcattgtcgccctggcctgctccctggctgcctgcgtcggctgttgctgctgcaagaagaggagccaagctgtcctgatgcagatgaaggcacccaatgagtgttaaagaggcaggctggagcagggctggggaatgatgggactggaggacctgggaatttcatctttctgcctccacccctgggtccatggagctttcccgtgattgctctttctggccccagagaaaggtgagcctacctcttcctgacttgcctgattctcccgtagagaagcaggtcgtgccggaccttcctacaatcaggaagatagatccaactggccatggcaaaagccctggggatttccgattcatacccctgggcttccttcgagagggctcttcctccaaatcctccccacctgtcctccaagaacagccttccctgcgcccaggccccctccgggcctctgtagactcagttagtccacagcctgctcacttcgtgggaatagttctccgctgagatagcccctctcgcctaagtattatgtaagttgatttcccttcttttgtttctcttgtttgtgctacggcttgacccagcatgtcccctcaaatgaaagttctccccttgattttctgctcctgaaggcagggtgagttctctcctcaaagaagacttcaaaccatttaactggtttcttaagagccgtcaatcagcctggttttggggatgctatgaaagagagaaggaaaatcatgccgctcagttcctggagacagaagagccgtcatcagtgtctcacttgtgatttttatctggaaaaggaagaaacaccccagcacagcaagctcagccttttagagaaggatatttccaaactgcaaactttgctttgaaaagtttagccctttaaggaatgaaatcatgtagaattttggacttctaaaaacattaaaatcagcttattaatacgggatagagaaagaaatctggtgcctgggggtccctgtgttcacccctagagtttgttttaaaatttttaattgaagcatgtgaagtgtacgtgcagaaaagtgggaacatgatagtgtatggcttggtggattttcacaaactgaacatacctgtgtaatcagcatctagacccagacccagagcatcacaaatatcccccatcctgggcttttcccagaggagatgggggcttctgaagatggacttacctgggacctgccccccatgagccaggacggtccccccacagtcagcctgtgcaaaggccccgtggccaggggtggaggagaatatgtgggtgtggacaggatgggagactgtggcctgaacaggagattttattatatctggagaccctgagagaccctgagacctggggcaccatggctggccaggtcagaagcatcctgactgcagaggtccgtgcagccacaccctcttccctgccagcaagctgtctgcggctcatcggaggcccctccgcctggagccttctatggacgtgatatgcctgtatctgtttttaattttcattcttcacttaggggaagtgaaatcgctcagagatgagatcctttaattgaaaacgaagtgtaacggaatctagtgtctttctaatgtggtaaaattctccatcaacatcacagtcagctggcagctgaacttcagaatctcacttacagcaggcgacacgggggtacaccgatgggtcacactgggtctgggggctccctggagctcctcctgcgtgtggtctggttaggagttgagttgtttgctccagggttattctcctcctcgagtcacagtcacacgaatacctgccttctctggctttcctgctatacacatattcacatggcgctcaagaagttaggctcatggcaacgtgtgtctttctctggacaactggcccagtttacagtgaaatggagaatttcaggtctccacgtctgcccaggaaagaacttcagctgactccacggggatctggaaatccacgaccaatcccgatcggctcttattagctccccgctccacaagacacctgtgctttggaaatccaccaccaatcccgatcggctcttattagctccccgctccacaagacacctgtgatctggaaatctaccaccaatcccgatcggctcttattagctccccgctccacaagacacctgtgacatcctccagggccacaggagcacgtgctgaccagttttcccttccagttcctgcacaaaaagtgtccagagggctgtttgcaaacactagtgcactttgtagcttttcaccctctgtcccagggaatctaggagagatgaggcccgtcagagtcaagagatgtcatccccccagggtctccaaggcatttccacactattggtggcacctggaggacatgcaccaaggcttgccagagccaacaggaagtgagcccagagcatggcacatgagcatcacccgctgatggtggcctgctgtgcctggtgccaacaggggcatcccggcccgtacccctccagacaggaagcatgggtttgcccacagacctgtcgggtgctcctgtgagtggcctccagatgtctttgtgcataggcacaagtgggccagggctggagggaggtgggaaacctcatcatccggtgggccctgccaatcttaacccagaacccttaggtattcctggcagtagccatgacattggagcaccttcctctccagccagaggctgacctgagggccactgtcctcagatgacaccacccaggagcaccctaggtgaggggtgagggcccccttatgtgaacctcttgcctcttcctttctcccatcagagtggttggatggagccattggcctccttttcttcagcgggcccttcaacctctctgcaccatgttgtctggctgaggagctactagaaaagctgagtggagtctcctttccaacaggatgatgcatttgctcaattctcagggctggaatgagccggctggtcccccagaaagctggagtggggtacagagttcagttttcctctctgtttacagctccttgacagtcccacgcccatctggagtgggagctgggagtcagtgttggagaagaaacaacaaaagccaattagaaccactatttttaaaaagtgcttactgtgcacagatactcttcaagcactggacgtggattctctctctagccctcagcacccctgcggtaggagtgccgcctctacccacttgtgatggggtacagaggcacttgctcttctgcatggtgttcaataggctgggagttttatttatctcttcaaactttgtacaagagctcatggcttgtcttgggctttcgtcattaaaccaaaggaaatggaagccattcccctgttgctctccttagtcttggtcatcagaacctcacttggtaccatatagatcaaaagctttgtaaccacaggaaaaaataaactcttccatcccttaaagaatagaatagtttgtccctctcatgggaattgggctgtatgtatattgttcttcctccttagaatttagagatacaagagttctacttagaacttttcatggacacaatttccacaacctttcagatgctgatgtagagctattgggaaagaacttccaaactcaggaagtttgcagagagcagacagctagagataactcgggacccagagttggtcgacagatgttagatgtatcctagcttttagctataaaccactcaaagattcagcccccagatcccacagtcagaactgaatctgcgttgttgggaagccagcagtggccttgggaaggaagccatggctgtggttcagagagggtgggctggcaagccacttccggggaaaactccttccgccccaggtttcttcttctcttaaggagagattgttctcaccaacccgctgccttcatgctgccttcaaagctagatcatgtttgccttgcttagagaattactgcaaatcagccccagtgcttggcgatgcatttacagatttctaggccctcagggttttgtagagtgtgagccctggtgggcagggttggggggtctgtcttctgctggatgctgcttgtaatccatttggtgtacagaatcaacaataaataatatacatgtata

SEQ ID NO: 147958 - DNA, 3248 bp, Homo sapiens
  Payload ID: 9278
  Gene Symbol: LRRC15
  Gene Name: leucine rich repeat containing 15
  Uniprot ID: Q8TF66
  ENST ID: ENST00000428839
  CDS Start-End: 114-1877
cagccttgagccgtccctcgtcctcctctcaggctccctcttgtccacggcgggcgggcgccgagctgctgatgtgtccctagcataacctggccccattcctttgcatctagatgcctttggacaaggctatgccactgaagcattatctccttttgctggtgggctgccaagcctggggtgcagggttggcctaccatggctgccctagcgagtgtacctgctccagggcctcccaggtggagtgcaccggggcacgcattgtggcagtgcccacccctctgccctggaacgccatgagcctgcagatcctcaacacgcacatcactgaactcaatgagtccccgttcctcaatatctcagccctcatcgccctgaggattgagaagaatgagctgtcgcgcatcacgcctggggccttccgaaacctgggctcgctgcgctatctcagcctcgccaacaacaagctgcaggttctgcccatcggcctcttccagggcctggacagcctcgagtctctccttctgtccagtaaccagctgttgcagatccagccggcccacttctcccagtgcagcaacctcaaggagctgcagttgcacggcaaccacctggaatacatccctgacggagccttcgaccacctggtaggactcacgaagctcaatctgggcaagaatagcctcacccacatctcacccagggtcttccagcacctgggcaacctccaggtcctccggctgtatgagaacaggctcacggatatccccatgggcacttttgatgggcttgttaacctgcaggaactggctctgcagcagaaccagattggactgctctcccctggtctcttccacaacaaccacaacctccagagactctacctgtccaacaaccacatctcccagctgccacccagcgtcttcatgcagctgccccagctcaaccgtcttactctctttgggaattccctgaaggagctctctccggggatcttcgggcccatgcccaacctgcgggagctttggctctatgacaaccacatctcttctctacccgacaatgtcttcagcaacctccgccagttgcaggtcctgattcttagccgcaatcagatcagcttcatctccccgggtgccttcaacgggctaacggagcttcgggagctgtccctccacaccaacgcactgcaggacctggacgggaacgtcttccgcatgttggccaacctgcagaacatctccctgcagaacaaccgcctcagacagctcccagggaatatcttcgccaacgtcaatggcctcatggccatccagctgcagaacaaccagctggagaacttgcccctcggcatcttcgatcacctggggaaactgtgtgagctgcggctgtatgacaatccctggaggtgtgactcagacatccttccgctccgcaactggctcctgctcaaccagcctaggttagggacggacactgtacctgtgtgtttcagcccagccaatgtccgaggccagtccctcattatcatcaatgtcaacgttgctgttccaagcgtccatgtccccgaggtgcctagttacccagaaacaccatggtacccagacacacccagttaccctgacaccacatccgtctcttctaccactgagctaaccagccctgtggaagactacactgatctgactaccattcaggtcactgatgaccgcagcgtttggggcatgacccaggcccagagcgggctggccattgccgccattgtaattggcattgtcgccctggcctgctccctggctgcctgcgtcggctgttgctgctgcaagaagaggagccaagctgtcctgatgcagatgaaggcacccaatgagtgttaaagaggcaggctggagcagggctggggaatgatgggactggaggacctgggaatttcatctttctgcctccacccctgggtccatggagctttcccgtgattgctctttctggccccagagaaaggtgagcctacctcttcctgacttgcctgattctcccgtagagaagcaggtcgtgccggaccttcctacaatcaggaagatagatccaactggccatggcaaaagccctggggatttccgattcatacccctgggcttccttcgagagggctcttcctccaaatcctccccacctgtcctccaagaacagccttccctgcgcccaggccccctccgggcctctgtagactcagttagtccacagcctgctcacttcgtgggaatagttctccgctgagatagcccctctcgcctaagtattatgtaagttgatttcccttcttttgtttctcttgtttgtgctacggcttgacccagcatgtcccctcaaatgaaagttctccccttgattttctgctcctgaaggcagggtgagttctctcctcaaagaagacttcaaaccatttaactggtttcttaagagccgtcaatcagcctggttttggggatgctatgaaagagagaaggaaaatcatgccgctcagttcctggagacagaagagccgtcatcagtgtctcacttgtgatttttatctggaaaaggaagaaacaccccagcacagcaagctcagccttttagagaaggatatttccaaactgcaaactttgctttgaaaagtttagccctttaaggaatgaaatcatgtagaattttggacttctaaaaacattaaaatcagcttattaatacgggatagagaaagaaatctggtgcctgggggtccctgtgttcacccctagagtttgttttaaaatttttaattgaagcatgtgaagtgtacgtgcagaaaagtgggaacatgatagtgtatggcttggtggattttcacaaactgaacatacctgtgtaatcagcatctagacccagacccagagcatcacaaatatcccccatcctgggcttttcccagaggagatgggggcttctgaagatggacttacctgggacctgccccccatgagccaggacggtccccccacagtcagcctgtgcaaaggccccgtggccaggggtggaggagaatatgtgggtgtggacaggatgggagactgtggcctgaacaggagattttattatatctggagaccctgagagaccctgagacctggggcaccatggctggccaggtcagaagcatcctgactgcagaggtccgtgcagccacaccctcttccctgccagcaagctgtctgcggctcatcggaggc

SEQ ID NO: 147959 - DNA, 5431 bp, Homo sapiens
  Payload ID: 9279
  Gene Symbol: LRRC16A
  Gene Name: leucine rich repeat containing 16A
  Uniprot ID: Q5VZK9
  ENST ID: ENST00000329474
  CDS Start-End: 369-4484
tgggcgggagctacgccggcccaagccccgccggggaccagcgagccgggaggaggagcaggcgccacagccgccccgcgccccgcgcccgcttgtaatccggtccgctccttattcagccgccgggaactgcgaggaggcgtcatgtagcagcagcagcaaatccgcctcgcatttgcaactcttttttttttttttggtggggcggggggcgcgcggcaaaattctgtctccgcccccccttttcttgcccacttccatttgcaagctgcatctgcctctctaaaaaaattgaggagttcggggaagggcagggggccataaatcagagttggacctgcaataacccccacacctacagggcaaccatgaccgaggagagctctgacgttcccagggagttgatagaaagcataaaggatgttattggcagaaagataaaaatttcagtgaagaagaaagtaaagttggaagttaagggagacaaagttgaaaacaaagtgctggtccttacatcatgccgagccttccttgtaacagcgcgaatccccaccaagctcgagttaaccttcagctacttggagattcatggcgtcgtttgcagcaagtcagctcagatgattgtggaaactgagaagtgcagcatttccatgaagatggcgtcacccgaggacgtgagtgaggtgctggctcacataggcacctgcctgaggaagatatttcctggcctctctccagtgagaatcatgaaaaaagtctccatggagccatctgagcgcctggctagtctccaggcgctgtgggacagccagaccgtggctgagcagggcccctgtggtggattttctcagatgtatgcctgtgtttgtgactggcttggattttcatacagggaagaagtacaatgggatgtggatacaatttatcttacccaagacaccagggaattgaatttacaagattttagtcatcttgaccacagggacctaatacctatcattgctgctctggaatataatcagtggttcacaaaactgtcctctaaggatctaaaactgtccactgatgtctgtgaacagatcttgagggtggtgagtaggtccaatcgactggaagaattggtgttggaaaatgctggacttagaacagattttgcacaaaaactggccagtgctctagcacataatcccaactcaggactccacacaattaaccttgctggcaacccactggaggatagaggtgtgtcctctttaagtattcaatttgccaaactcccaaagggattaaagcacttaaatttatctaaaacctcattatcacctaaaggggtgaacagcctttctcagtcactcagtgccaatccattgaccgcctctacccttgtccacctcgacctctcagggaacgtccttcgtggagatgacctctcacacatgtataattttttggcccagccaaatgccattgttcatctggatttatccaatacagaatgttccctggacatggtctgtggagctcttctccgtggatgccttcaatatttagctgtgctcaacctctccagaactgtcttctctcaccggaaaggaaaagaagtacctccatctttcaagcaattttttagtagttctctggctttgatgcacatcaacctttcaggcacaaaactgtctcctgagcccttaaaagcactgttattgggcctggcttgtaatcataacttgaaaggggtttctctggatctcagcaactgtgagctgagatcaggaggtgctcaagtattagaaggttgcattgctgaaatacacaacatcaccagcttagacatctctgacaatggtttagaatctgacctatctaccttaatagtgtggctcagtaaaaacagatcaatacaacacctggcgttaggcaaaaattttaataatatgaaatccaaaaatctgacacctgtattggacaacttagtacagatgattcaagatgaagaatcacctctgcagtccttgtccctggctgactcgaaactcaagactgaggtcaccatcatcatcaatgccctgggaagcaacacctccctgaccaaagtggacattagcggcaacggaatgggggacatgggagcgaagatgctggccaaagcactgcagatcaacactaagctcaggactgtaatatgggacaagaacaacatcactgcacaaggctttcaggatatagctgttgctatggaaaagaactacacattaagatttatgccaattcctatgtatgatgcttctcaagccctaaaaacaaaccctgaaaaaacagaagacgctctgcaaaagatagaaaactacctgctacgaaatcacgagactagaaaataccttcaagagcaggcctaccgcctgcagcagggtattgtcaccagcaccacccagcagatgattgacagaatatgtgtgaaagtacaagatcatctcaactccttacgaaattgtgggggagacgctatccaggaagatttaaaatcagcagagcggctcatgcgtgatgctaagaactctaaaacgttgttaccaaatttataccatgttggtggtgcatcttgggcgggagccagtggcttactatccagtccaattcaggagaccctggaatcaatggctggagaagttacaagagtagtagatgaacaactaaaggcgttgcttgagtccatggttgatgctgctgagaatctttgtcccaatgtgatgaaaaaagcccacattcgacaagacttgattcatgccagcaccgaaaagatttctattccacgtacctttgttaaaaatgtcctgttggagcagtctggaattgatatccttaacaaaattagtgaagtaaaattgacagtggcctcgttcctgtctgatagaattgtggatgaaatcctggatgcactctcacattgccatcataaactggctgaccatttcagcagacgtggcaagacccttcctcaacaagaatccttagagatcgagctggctgaggagaagccagttaaacgttccatcatcacagtggaggagctaacagagatagagcgtttggaagatctggatacctgtatgatgacccctaaatccaaaaggaagagtatccatagccgaatgctgcggcctgtttctagggcttttgaaatggagtttgatctagataaagcgctggaagaggtaccaattcacatcgaagacccgcccttcccatccctcagacaggagaagcggagctcgggatttatctctgagttgccctctgaagaggggaagaagctggaacactttaccaagttaaggccaaaaaggaataagaagcagcaacccacccaagcagcggtctgtgctgccaacatagtctcacaagatggtgaacagaatggtctcatggggagagtggatgaaggtgtagatgaattttttaccaagaaggtgaccaaaatggattccaagaaatggtcaacaagaggctcagagtcccatgagcttaatgaaggaggagatgaaaagaaaaagcgagattctcggaaaagtagtggctttctcaatttaatcaaatcccggtccaaatccgagcgaccaccaacgatcttgatgacagaagaaccctcctcaccaaaaggggcagtcagaagtccacctgtggactgtcccaggaaggacacaaaggccgccgagcacaatggcaattctgaacggatagaggagataaaaacacctgactcctttgaagagagtcaaggggaagaaatagggaaggtggaacggagtgacagcaagagcagcccacaggcagggcggaggtatggggtccaggtgatgggcagtggtctgctggcagagatgaaagccaagcaagagaagagagctgcgtgtgcgcagaagaagcttgggaatgatgccgtatcccaggattcttccagcccagctttgagcggcgtagaacggtcggatggaggtggggcagtgcctaaactgcacccaggtcttccagagaaccgctttggtttgggaacaccagaaaagaataccaaagcagaacccaaagcggaagcaggctccaggtctcggagctcatccagcacacctacgagcccgaagcccctcctgcagtcccccaaacccagtctggcagcacggcccgtcatcccgcagaaaccaagaaccgcctcacggcctgatgacattccagactctccatctagcccgaaagttgcccttcttccacctgtcctgaaaaaagttccttcagacaaagagagagatggccagagtagcccccagcccagccccaggacattttcacaggaagtttcaaggagaagctggggccagcaggcccaggagtatcaagaacaaaagcaacggtcctccagtaaagatggccatcaaggcagcaaatctaatgactccggggaagaagcagaaaaagagtttatttttgtgtaaaggtcacccacgcagaagtcttcctgtgcagggtgctttggtagccatcagagaggaaccaagggcaacatcttttcttcccaggcgttcttctctgggtgctttattctcttctttttctttatttcgcccccacccccatcccctgccttttttttttttttttttttttttttttgtatagaaacagatccatttcttggtaatcaaagcacatttgtttggtcttcctccaaccctttgcatttgatttctaaacattccttcatatgcctttaatgaaagccagcaattatcccatgggccctacttgaatttatctgaggcagctacagattgccctgcaagatgagtttttggagataaatgaaataactggacacacactcacacaagtaacaccacagcagacctcggagtactgctaagtgtacctgtgtcaaatccgcacaggactcaatatagcaatttattcttgatgtatgcaattgcacattgtaattatattaacagagcacactaataatttgtatagattatatatattagatcttgggtatggtttttaccttctcccatggggaacttcttccttcctgatgtggaattgtacatttaaagcttggtcggtgacctttgcataccatcaacgagcacagctaagaacagagtgagagaggcccatggctgattttaccatgtgcccagattaatgtatatagttgattggaatgaggttttatgaatattcatgtttttgaaggcctttaatttctgtctgcatattagcttttaatgtgtgattttaagagagaatactttgacacctgtaaaaatcaaaatactactctttataagacatttcacaaatattcacttacattacaggctggaagtattttattcatatgtatatttataccaataaaatgattttacaagtggaa

SEQ ID NO: 147960 - DNA, 3201 bp, Homo sapiens
  Payload ID: 9279
  Gene Symbol: LRRC16A
  Gene Name: leucine rich repeat containing 16A
  ENST ID: ENST00000635618
  CDS Start-End: 1-2799
gaagtacctccatctttcaagcaattttttagtagttctctggctttgatgcacatcaacctttcaggcacaaaactgtctcctgagcccttaaaagcactgttattgggcctggcttgtaatcataacttgaaaggggtttctctggatctcagcaactgtgagcttggccattgtctgagatcaggaggtgctcaagtattagaaggttgcattgctgaaatacacaacatcaccagcttagacatctctgacaatggtttagaatctgacctatctaccttaatagtgtggctcagtaaaaacagatcaatacaacacctggcgttaggcaaaaattttaataatatgaaatccaaaaatctgacacctgtattggacaacttagtacagatgattcaagatgaagaatcacctctgcagtccttgtccctggctgactcgaaactcaagactgaggtcaccatcatcatcaatgccctgggaagcaacacctccctgaccaaagtggacattagcggcaacggaatgggggacatgggagcgaagatgctggccaaagcactgcagatcaacactaagctcaggactgtaatatgggacaagaacaacatcactgcacaaggctttcaggatatagctgttgctatggaaaagaactacacattaagatttatgccaattcctatgtatgatgcttctcaagccctaaaaacaaaccctgaaaaaacagaagacgctctgcaaaagatagaaaactacctgctacgaaatcacgagactagaaaataccttcaagagcaggcctaccgcctgcagcagggtattgtcaccagcaccacccagcagatgattgacagaatatgtgtgaaagtacaagatcatctcaactccttacgaaattgtgggggagacgctatccaggaagatttaaaatcagcagagcggctcatgcgtgatgctaagaactctaaaacgttgttaccaaatttataccatgttggtggtgcatcttgggcgggagccagtggcttactatccagtccaattcaggagaccctggaatcaatggctggagaagttacaagagtagtagatgaacaactaaaggcgttgcttgagtccatggttgatgctgctgagaatctttgtcccaatgtgatgaaaaaagcccacattcgacaagacttgattcatgccagcaccgaaaagatttctattccacgtacctttgttaaaaatgtcctgttggagcagtctggaattgatatccttaacaaaattagtgaagtaaaattgacagtggcctcgttcctgtctgatagaattgtggatgaaatcctggatgcactctcacattgccatcataaactggctgaccatttcagcagacgtggcaagacccttcctcaacaagaatccttagagatcgagctggctgaggagaagccagttaaacgttccatcatcacagtggaggagctaacagagatagagcgtttggaagatctggatacctgtatgactctctgctgtacaagtatgacccctaaatccaaaaggaagagtatccatagccgaatgctgcggcctgtttctagggcttttgaaatggagtttgatctagataaagcgctggaagaggtaccaattcacatcgaagacccgcccttcccatccctcagacaggagaagcggagctcgggatttatctctgagttgccctctgaagaggggaagaagctggaacactttaccaagttaaggccaaaaaggaataagaagcagcaacccacccaagcagcggtctgtgctgccaacatagtctcacaagatggtgaacagaatggtctcatggggagagtggatgaaggtgtagatgaattttttaccaagaaggtgaccaaaatggattccaagaaatggtcaacaagaggctcagagtcccatgagcttaatgaaggaggagatgaaaagaaaaagcgagattctcggaaaagtagtggctttctcaatttaatcaaatcccggtccaaatccgagcgaccaccaacgatcttgatgacagaagaaccctcctcaccaaaaggggcagtcagaagtccacctgtggactgtcccaggaaggacacaaaggccgccgagcacaatggcaattctgaacggatagaggagataaaaacacctgactcctttgaagagagtcaaggggaagaaatagggaaggtggaacggagtgacagcaagagcagcccacaggcagggcggaggtatggggtccaggtgatgggcagtggtctgctggcagagatgaaagccaagcaagagaagagagctgcgtgtgcgcagaagaagcttgggaatgatgccgtatcccaggattcttccagcccagctttgagcggcgtagaacggtcggatggaggtggggcagtgcctaaactgcacccaggtcttccagagaaccgctttggtttgggaacaccagaaaagaataccaaagcagaacccaaagcggaagcaggctccaggtctcggagctcatccagcacacctacgagcccgaagcccctcctgcagtcccccaaacccagtctggcagcacggcccgtcatcccgcagaaaccaagaaccgcctcacggcctgatgacattccagactctccatctagcccgaaagttgcccttcttccacctgtcctgaaaaaagttccttcagacaaagagagagatggccagagtagcccccagcccagccccaggacattttcacaggaagcatgcccaactaatttctgaaacagtagtgcaaagaggagattattacaaaagacattcagatcatgacagtggcaagccttccagtagagggaaaagatcttcaaaactgtactccaccattgcagaagaggaagtgaatgcaattgggcacaggaagtcacagccaacaaatgtttcaaggagaagctggggccagcaggcccaggagtatcaagaacaaaagcaacggtcctccagtaaagatggccatcaaggcagcaaatctaatgactccggggaagaagcagaaaaagagtttatttttgtgtaaaggtcacccacgcagaagtcttcctgtgcagggtgctttggtagccatcagagaggaaccaagggcaacatcttttcttcccaggcgttcttctctgggtgctttattct

SEQ ID NO: 147961 - DNA, 1290 bp, Homo sapiens
  Payload ID: 9279
  Gene Symbol: LRRC16A
  Gene Name: leucine rich repeat containing 16A
  ENST ID: ENST00000461945
  CDS Start-End: 372-962
ttttgcggtttgggagggaggctgcgaggaggggcgcggtgcccgccgccgccaccgcagcaccgcacagcgtctctcctgggggtgcgacctacgccggggacccagcgctcgggcaccggaggccggcctcgcaccggtgcggaggccggctctcgcgagaaagcataaaggatgttattggcagaaagataaaaatttcagtgaagaagaaagtaaagttggaagttaagggagacaaagttgaaaacaaagtgctggtccttacatcatgccgagccttccttgtaacagcgcgaatccccaccaagctcgagttaaccttcagctacttggagattcatggcgtcgtttgcagcaagtcagctcagatgattgtggaaactgagaagtgcagcatttccatgaagatggcgtcacccgaggacgtgagtgaggtgctggctcacataggcacctgcctgaggaagatatttcctggcctctctccagtgagaatcatgaaaaaagtctccatggagccatctgagcgcctggctagtctccaggcgctgtgggacagccagaccgtggctgagcagggcccctgtggtggattttctcagatgtatgcctgtgtttgtgactggcttggattttcatacagggaagaagtacaatgggatgtggatacaatttatcttacccaagacaccagggaattgaatttacaagattttagtcatcttgaccacaggaaatccagaattgcagtgtggtccctgaagagctctagccaactgaatcggccagggaaaaagtatactagctggatatacctcctctttgcacagcctgggactacggaagatggtgaagcaggctcagctgtgtctgtagttgtggctgatgggcctaaagcctccagttctcaggcaattttttttttttcctgcttagagcagttctccttcttcctataagtgaggcaactttatactttcaaatttagacaagatgtttcctgtgtagctcataaaaaagtgaactgagaaagaaaaagggaaaatattttactttgtaagtattttccaataaaacaagaaaattgcacgtggaataagatagaagtttacagtcctccagtgtttggtctcagcgtttttggtccctttacaatcttaaaaatgatcgatctttggtttttgtgggtcaaaacattggtatttacaatattataaattaaaactaaaatttgaaatatttattaattaaaaagtgacactaataaagcaaaccattacgtactaa

SEQ ID NO: 147962 - DNA, 4597 bp, Homo sapiens
  Payload ID: 9280
  Gene Symbol: LRRC16B
  Gene Name: leucine rich repeat containing 16B
  Uniprot ID: Q8ND23
  ENST ID: ENST00000342740
  CDS Start-End: 155-4273
ggagcgctcaagcagccgcccctgaccggagcgggctcggccgctgctgcagcgctcagcgcccgggccctgctgaagccgggtctagcatgtgccgcggctccccggcggcggcggcggctcctctgcagcagcctcagcagcagcggccgccatggccaagcccagcgtggagctcacccgcgagttgcaagacagcatccggaggtgcctgagccaaggggccgtgctccaacaacatcatgtgaagttggagacaaagcccaagaagtttgaggaccgagtgctggccctgacctcctggcgcctccacctcttcctccttaaagtcccggccaaggtggagagctccttcaatgtcctggagatccgtgccttcaacacgctcagtcagaatcagatcctggtggagacggagcgtggcatggtgagcatgcgactgccatcagctgaaagtgtggaccaggtgacacgacatgtgagctctgccctgtccaaggtctgccctggccctgggtgtttgatccggcgtggaaacgcagacaccccagaggggccccgagatacatcccccaactctgagacttccacatctaccacccacagtgtctgcggtggcttctctgagacctacgctgctctgtgtgactacaatgggctacactgccgtgaggaggttcaatgggatgtggacaccatctaccatgctgaagataaccgggagttcaatcttttggatttcagccacttggagagccgagacttggccctaatggtagcagccctggcctacaaccagtggttcaccaaactctactgcaaggacttgcggctgggctctgaagtgctagaacaggtgctacataccctaagcaagtcggggagcctcgaagagctggtgctggacaacgccgggcttaagacggactttgtccagaagctggccggggtgtttggggagaacgggagctgtgtgctgcatgccctcactctgtcccacaaccccatcgaggacaagggttttctcagtctgagccagcagctcctctgcttcccctctggcctcaccaaactgtgcctggccaagactgccatttcccctcgagggctccaggcactcggccagaccttcggggcaaacccagcatttgccagctcccttcgatacctggacctgagcaagaatcctgggctcctcgccacggatgaggccaatgccctctacagtttcctggcccaacccaacgccctggtgcacctggacctgtcaggaactgactgcgtcatcgacttgcttctcggtgccctgctccacggctgctgctcccacctcacctacctcaacctggctcgcaacagctgctcccacaggaagggtcgagaggccccgccggccttcaagcagttcttcagcagcgcctacacactgagccacgtcaatctgtcggccacaaagctgcccctggaggccctcagggcgctgcttcagggcctctccctcaacagtcacctcagtgacctgcacctggatctcagcagctgcgagctccgttcagcgggagcccaagccttgcaggagcagctgggagctgtcacctgtgtaggcagcctggatctgtcagacaatgggttcgactcggacctcctgacactggtgcctgcacttggcaagaacaagtccctcaagcacctgtttttgggcaagaacttcaatgtcaaggccaagaccctggaggagatcctccacaagctggtgcagctgatccaggaagaggactgttccctgcagtcactgtcggtggcagactcccggctgaagcttcgcaccagcatcctcatcaatgccctgggcagcaacacctgcctggccaaggtggatctgagcggcaatggcatggaggacatcggggccaagatgctgtctaaggccctgcagataaactcctccctcagaactatcctatgggatcggaacaatacatctgccctgggcttcctggacatcgcaagggccctggagagcaaccacacgctgcgcttcatgtccttccccgtgagcgacatctcccaagcctatcgcagcgcgcctgagcgcaccgaggacgtctggcagaagatccaatggtgcttagtgaggaacaaccactcccagacgtgcccccaggagcaggccttcaggttgcagcagggcctggtgaccagcagcgccgagcaaatgctgcagcggctgtgtggacgagtgcaggaggaggtgcgggccctgagactatgccccctggagcctgtgcaggatgagctactctacgctcgggacctcatcaaagatgccaagaactcccgggcgctgtttcccagcctctatgagctgggccacgtgctggccaatgatgggcctgtgcggcagaggctggaatcagtagcaagtgaggtgtccaaagctgtggacaaggagctgcaggtgatcctggagtccatggtcagcctgacacaggagttatgccctgtggccatgcgggtggccgagggacacaacaagatgctgagcaatgtggcggagcgtgtcactgtgccccggaacttcatccgaggggcactgctggagcaagcaggacaggacattcagaacaagctggatgaagtgaagctctcagtcgtcacctacctaaccagctccatagtggatgagatcctgcaagagctctaccattcccacaagagcctggcccggcacctgacccagctaaggacgctgtcagatccaccagggtgcccaggccaagggcaggatctgtcctcccggggccgaggccggaaccatgaccatgaggagaccacagatgatgaacttgggaccaacattgacaccatggccatcaaaaagcagaaacgctgccgcaagattcggccggtgtctgccttcatcagcgggagccctcaggacatggaaagccaactggggaatctggggatcccccctggctggttctcaggacttgggggcagccagcccacagctagtggctcctgggaaggtctatctgagctgcccactcatggttacaaactaaggcatcaaacacaagggaggccccgcccccccaggaccacacctccaggacctggtcgacccagtatgccagcacctgggactcgtcaggagaatgggatggccacccgcctggatgaagggctggaggacttcttcagccgaagggtcctggaggaaagttctagctacccccggactctgaggaccgtgcggccaggactctcggaggcaccgctgcctccactccagaagaagaggcgccggggcctgtttcactttcgccggccccggagcttcaagggggacagggggccggggtcccctaccactggactcctcctccctccacccccaccccctcccccgactcaggagagcccccctagcccagaccccccaagcctcggcaataactcctctccctgctggagcccagaggaggagagcagcctcctccctggatttggtgggggccggggaccttccttccgccggaagatgggcactgaggggtcagagccaggggaggggggcccagcccctgggacagcacagcagccaagggttcacggtgttgcccttcccgggttggaaagagccaagggttggagcttcgatgggaaacgagagggcccaggcccagaccaggagggcagcacccaggcctggcagaaacggcgctcttcagacgacgcagggcctggatcctggaagcccccaccaccgccccaaagcaccaaaccaagcttcagcgccatgcgcagagcagaggccacatggcacatagctgaagagagtgcccccaaccacagctgccagagtcccagcccagcctcccaagatggggaagaggagaaggaggggaccctcttcccagagaggacacttccagctaggaatgccaagctacaggaccccgctctagctccatggcctcccaagccagtggctgtgcccaggggccgccagcctccccaggagccaggggtcagggaggaggctgaggctggagatgcagctccaggagtcaacaaaccccggctgaggctgagctcacagcaagaccaagaggagcccgaagtccaagggccccctgatccaggccggcggactgcccccctgaagcccaagaggacacggcgggcacagtcctgtgacaagctggaacctgatagaagacggcctcctgaccccacaggaaccagtgagccaggaacagactgacaactgccacaacaccctcctcagccctcgacatgtgcctcgcaaggactcagacccctatccacccccagtccccagggccccctgccagcccctgtcctacaggggcaagacggcaggaccaggcatgggggagctggaggcagggactagaacagagggagccacctggagagacggaggctgtcagtgcctgcctcgatacctctctctgcagagagcttctgggtgggggcttatctcctcccccaggagggtggatctctgtccctctatccccagggactctctcccctcttgtatagaataaaaaaacaaaatcat

SEQ ID NO: 147963 - DNA, 2002 bp, Homo sapiens
  Payload ID: 9281
  Gene Symbol: LRRC17
  Gene Name: leucine rich repeat containing 17
  Uniprot ID: Q8N6Y2
  ENST ID: ENST00000249377
  CDS Start-End: 282-1223
tataacgtgagggctgaatgcagcccattctctggagaacttcctcacacaccgcagcaaagagaagactgaaagacaaacctgggtgcagccagagaggtccagatagatgagcttgtggcatccattccccaagttcagcctagggactccacgtaccccagctgggtctcattgttccagaactgcattagttaagattacccagacttggatttcaaaggaatactttcattgttccgtctgtaacacgaagtaattggggccagctggatgtcaggatgcgtgtggttaccattgtaatcttgctctgcttttgcaaagcggctgagctgcgcaaagcaagcccaggcagtgtgagaagccgagtgaatcatggccgggcgggtggaggccggagaggctccaacccggtcaaacgctacgcaccaggcctcccgtgtgacgtgtacacatatctccatgagaaatacttagattgtcaagaaagaaaattagtttatgtgctgcctggttggcctcaggatttgctgcacatgctgctagcaagaaacaagatccgcacattgaagaacaacatgttttccaagtttaaaaagctgaaaagcctggatctgcagcagaatgagatctctaaaattgagagtgaggcgttctttggtttaaacaaactcaccaccctcttactgcagcacaaccagatcaaagtcttgacggaggaagtgttcatttacacacctctcttgagctacctgcgtctttatgacaacccctggcactgtacttgtgagatagaaacgcttatttcaatgttgcagattcccaggaaccggaatttggggaactacgccaagtgtgaaagtccacaagaacaaaaaaataaaaaactgcggcagataaaatctgaacagttgtgtaatgaagaagaaaaggaacaattggacccgaaaccccaagtgtcagggagacccccagtcatcaagcctgaggtggactcaactttttgccacaattatgtgtttcccatacaaacactggactgcaaaaggaaagagttgaaaaaagtgccaaacaacatccctccagatattgttaaacttgacttgtcatacaataaaatcaaccaacttcgacccaaggaatttgaagatgttcatgagctgaagaaattaaacctcagcagcaatggcattgaattcatcgatcctgggtctttgagatgaaaccctgcaagtagacttacgtgaatgatttttgctgtgccgcttttttagggctcacacatttagaagaattagatttatcaaacaacagtctgcaaaactttgactatggcgtattagaagacttgtattttttgaaactcttgtggctcagagataacccttggagatgtgactacaacattcactacctctactactggttaaagcaccactacaatgtccattttaatggcctggaatgcaaaacgcctgaagaatacaaaggatggtctgtgggaaaatatattagaagttactatgaagaatgccccaaagacaagttaccagcatatcctgagtcatttgaccaagacacagaagatgatgaatgggaaaaaaaacatagagatcacaccgcaaagaagcaaagcgtaataattactatagtaggataaggtagaaattgttctgattgtaattagttttgtattttctatactggtgttagaaaacatatgtttacatttgattaactgtgttgcctatttatgcagggtaatccagctaaaggaagctttctttaattataagtattattgtgactattatagtaatcaagagaatgctatcatcctgcttgcctgtccatttgtggaacagcatctggtgatatgcaattccacactggtaacctgcagcagttgggtcctaatgatggcattagactttcataatgtcctgtataaatgtttttactgcttttagaaaataaagaaaaaaaacttggttcatgttta

SEQ ID NO: 147964 - DNA, 1963 bp, Homo sapiens
  Payload ID: 9281
  Gene Symbol: LRRC17
  Gene Name: leucine rich repeat containing 17
  Uniprot ID: Q8N6Y2
  ENST ID: ENST00000339431
  CDS Start-End: 296-1621
gtgcacagcattagtataacgtgagggctgaatgcagcccattctctggagaacttcctcacacaccgcagcaaagagaagactgaaagacaaacctgggtgcagccagagaggtccagatagatgagcttgtggcatccattccccaagttcagcctagggactccacgtaccccagctgggtctcattgttccagaactgcattagttaagattacccagacttggatttcaaaggaatactttcattgttccgtctgtaacacgaagtaattggggccagctggatgtcaggatgcgtgtggttaccattgtaatcttgctctgcttttgcaaagcggctgagctgcgcaaagcaagcccaggcagtgtgagaagccgagtgaatcatggccgggcgggtggaggccggagaggctccaacccggtcaaacgctacgcaccaggcctcccgtgtgacgtgtacacatatctccatgagaaatacttagattgtcaagaaagaaaattagtttatgtgctgcctggttggcctcaggatttgctgcacatgctgctagcaagaaacaagatccgcacattgaagaacaacatgttttccaagtttaaaaagctgaaaagcctggatctgcagcagaatgagatctctaaaattgagagtgaggcgttctttggtttaaacaaactcaccaccctcttactgcagcacaaccagatcaaagtcttgacggaggaagtgttcatttacacacctctcttgagctacctgcgtctttatgacaacccctggcactgtacttgtgagatagaaacgcttatttcaatgttgcagattcccaggaaccggaatttggggaactacgccaagtgtgaaagtccacaagaacaaaaaaataaaaaactgcggcagataaaatctgaacagttgtgtaatgaagaagaaaaggaacaattggacccgaaaccccaagtgtcagggagacccccagtcatcaagcctgaggtggactcaactttttgccacaattatgtgtttcccatacaaacactggactgcaaaaggaaagagttgaaaaaagtgccaaacaacatccctccagatattgttaaacttgacttgtcatacaataaaatcaaccaacttcgacccaaggaatttgaagatgttcatgagctgaagaaattaaacctcagcagcaatggcattgaattcatcgatcctgccgcttttttagggctcacacatttagaagaattagatttatcaaacaacagtctgcaaaactttgactatggcgtattagaagacttgtattttttgaaactcttgtggctcagagataacccttggagatgtgactacaacattcactacctctactactggttaaagcaccactacaatgtccattttaatggcctggaatgcaaaacgcctgaagaatacaaaggatggtctgtgggaaaatatattagaagttactatgaagaatgccccaaagacaagttaccagcatatcctgagtcatttgaccaagacacagaagatgatgaatgggaaaaaaaacatagagatcacaccgcaaagaagcaaagcgtaataattactatagtaggataaggtagaaattgttctgattgtaattagttttgtattttctatactggtgttagaaaacatatgtttacatttgattaactgtgttgcctatttatgcagggtaatccagctaaaggaagctttctttaattataagtattattgtgactattatagtaatcaagagaatgctatcatcctgcttgcctgtccatttgtggaacagcatctggtgatatgcaattccacactggtaacctgcagcagttgggtcctaatgatggcattagactttcataatgtcctgtataaatgtttttactgcttttagaaaataaagaaaaaaaacttggttcatgttta

SEQ ID NO: 147965 - DNA, 801 bp, Homo sapiens
  Payload ID: 9281
  Gene Symbol: LRRC17
  Gene Name: leucine rich repeat containing 17
  ENST ID: ENST00000455453
  CDS Start-End: 489-801
tctggagcccacacccaacatggttggtgactgggagacagaaaaggatagaaaaaaaaaaggctcaggaagacaacaattcaagtcctacccttgtgtgtgcatctcaaggctgtgttcttttaaagaaggagaattctttgaatttcttaaatccgatgtgatggtgaactgcaggcttcggttttcatcatgctgagtcctaacatttgtgactacttcccccggggtggccatgtgaagcatcttatgcgcatgagcctattttatcctcccaacaatattaggaggtatcctcggtccgttttacagatgctgaagatgacccaggttgatacagttaagcagcctagggactccacgtaccccagctgggtctcattgttccagaactgcattagttaagattacccagacttggatttcaaaggaatactttcattgttccgtctgtaacacgaagtaattggggccagctggatgtcaggatgcgtgtggttaccattgtaatcttgctctgcttttgcaaagcggctgagctgcgcaaagcaagcccaggcagtgtgagaagccgagtgaatcatggccgggcgggtggaggccggagaggctccaacccggtcaaacgctacgcaccaggcctcccgtgtgacgtgtacacatatctccatgagaaatacttagattgtcaagaaagaaaattagtttatgtgctgcctggttggcctcaggatttgctgcacatgctgctagcaagaaacaagatccgcacattgaagaacaacatgttttccaagttta

SEQ ID NO: 147966 - DNA, 1626 bp, Homo sapiens
  Payload ID: 9282
  Gene Symbol: LRRC18
  Gene Name: leucine rich repeat containing 18
  Uniprot ID: Q8N456
  ENST ID: ENST00000298124
  CDS Start-End: 92-877
ctgggactagcaggtttttcatgatttttcctcacactgatcactatccaatcagaacaataaacttctaacactcccttactaaaagaacatggttaagggtgagaaaggccccaagggcaagaagatcaccctcaaggtggccaggaattgcatcaaaatcacttttgatgggaaaaagcgccttgacttgagcaagatgggaattaccaccttccccaagtgtattctgcgccttagtgacatggacgagctggaccttagccggaatcttatcaggaagatccctgactccatctccaagttccagaacctccggtggctggacctgcacagcaactacatagacaagctgcctgagtccattggccagatgaccagcctgctctacctcaacgtcagcaacaaccggctgaccagcaacgggctgcccgtggagctgaagcaactcaagaacatccgcgctgtgaacctaggcttgaaccacctggacagcgtgcccaccacactgggggccctgaaggagctccacgaggtagggctccatgacaacctactgaacaacatccccgtgagcatctccaagctccccaagctgaaaaagctcaacataaagcggaacccctttccaaagccaggtgagtcggaaatattcatagactccatcaggaggctggagaacttgtatgttgtggaggagaaggatctgtgtgcggcttgcctgagaaaatgccaaaacgcccgggacaacctgaatagaatcaagaacatggccacgacgacaccgagaaagaccatctttcccaatctgatctcacccaattccatggccaaggactcctgggaagactggagaatacgcttgacatcttcctagagtagctgtggcaaaatcttgaagactactcagctaacagaataaacgactctgaagaggagaagcccccagttaggagaagacagagtggcaagtgagatgttctggaaaccaggctcgccggagctggccaagccaccgacttgcttctcaaattcacttcacctcccttagctttagcccacctgtgtgtgaaaatgactttgggaaatatttgatgtggtttttaaaatgtatatagaaaaaaatttaagaaaattacagattatatattatagacaactaaatatttaagactttaagacttaaaaggcttactgcctctacatttcactcagactagtacatctcaatgccagtagtctgtgataaatttatgtaggtataatgagatactgatatggtttgggcatttgtctcctccaaacctcatgttgagatttgatccccagtgttggaggtggggcctaatggaaggtcatgggggtgggtccctcatgaatggcctggtgccatccttttggtaatgagtgagttctcactgtattagatcctgttgaaaattgattgttaaaaagaccttggcacctccctctcctctctctctcttcctctcactatgtgatgcctgctccccttcaccttccaccatgagtggaagcacctataccccaaagccctcaccagaaggaggtgccggcacctgtacagcttgtaagaaccatgactcaaataaacttcttttcttt

SEQ ID NO: 147967 - DNA, 1617 bp, Homo sapiens
  Payload ID: 9282
  Gene Symbol: LRRC18
  Gene Name: leucine rich repeat containing 18
  Uniprot ID: Q8N456
  ENST ID: ENST00000374160
  CDS Start-End: 78-863
tttttcatgatttttcctcacactgatcactatccaatcagaacaataaacttctaacactcccttactaaaagaacatggttaagggtgagaaaggccccaagggcaagaagatcaccctcaaggtggccaggaattgcatcaaaatcacttttgatgggaaaaagcgccttgacttgagcaagatgggaattaccaccttccccaagtgtattctgcgccttagtgacatggacgagctggaccttagccggaatcttatcaggaagatccctgactccatctccaagttccagaacctccggtggctggacctgcacagcaactacatagacaagctgcctgagtccattggccagatgaccagcctgctctacctcaacgtcagcaacaaccggctgaccagcaacgggctgcccgtggagctgaagcaactcaagaacatccgcgctgtgaacctaggcttgaaccacctggacagcgtgcccaccacactgggggccctgaaggagctccacgaggtagggctccatgacaacctactgaacaacatccccgtgagcatctccaagctccccaagctgaaaaagctcaacataaagcggaacccctttccaaagccaggtgagtcggaaatattcatagactccatcaggaggctggagaacttgtatgttgtggaggagaaggatctgtgtgcggcttgcctgagaaaatgccaaaacgcccgggacaacctgaatagaatcaagaacatggccacgacgacaccgagaaagaccatctttcccaatctgatctcacccaattccatggccaaggactcctgggaagactggagaatacgcttgacatcttcctagagtagctgtggcaaaatcttgaagactactcagctaacagaataaacgactctgaagaggagaagcccccagttaggagaagacagagtggcaagtgagatgttctggaaaccaggctcgccggagctggccaagccaccgacttgcttctcaaattcacttcacctcccttagctttagcccacctgtgtgtgaaaatgactttgggaaatatttgatgtggtttttaaaatgtatatagaaaaaaatttaagaaaattacagattatatattatagacaactaaatatttaagactttaagacttaaaaggcttactgcctctacatttcactcagactagtacatctcaatgccagtagtctgtgataaatttatgtaggtataatgagatactgatatggtttgggcatttgtctcctccaaacctcatgttgagatttgatccccagtgttggaggtggggcctaatggaaggtcatgggggtgggtccctcatgaatggcctggtgccatccttttggtaatgagtgagttctcactgtattagatcctgttgaaaattgattgttaaaaagaccttggcacctccctctcctctctctctcttcctctcactatgtgatgcctgctccccttcaccttccaccatgagtggaagcacctataccccaaagccctcaccagaaggaggtgccggcacctgtacagcttgtaagaaccatgactcaaataaacttcttttctttataaa

SEQ ID NO: 147968 - DNA, 3609 bp, Homo sapiens
  Payload ID: 9283
  Gene Symbol: LRRC19
  Gene Name: leucine rich repeat containing 19
  Uniprot ID: Q9H756
  ENST ID: ENST00000380055
  CDS Start-End: 112-1224
aaaacaaagtgaaatgtaatcatacgatgtactttttttaatgccgttgaaacagagttaatttcctttagcacacaagtcttagagacaaaagaaaaaaaggtctgcaacatgaaagtcacaggcatcacaatcctcttttggcccctctccatgatattattatcagacaaaatccagtcttctaaaagagaagtccaatgtaattttactgaaaaaaattataccttgattccagcagatatcaagaaagatgttactatacttgatctcagttataaccaaattactcttaatggtacagacacaagagttctacagacatactttttactcacagagctctatttgattgagaacaaggttactatcttacataataacggttttggtaacctctccagtctagaaattttaaatatctgtagaaactccatctatgtaattcaacagggtgcatttttaggcttaaataaactaaaacagttatatctctgccaaaacaaaatagaacaactgaatgctgatgtatttgtgcctctaagaagcctaaaacttctgaatctgcaaggcaatttgattagctatttggatgtaccaccactatttcatctggaattaataactttatatggaaacctatggaactgctcttgcagtctatttaatttgcagaactggttgaacacatcaaatgtgacattagaaaatgagaacatcaccatgtgtagctaccccaacagcctgcagagctacaatatcaaaacagtacctcataaggctgaatgccactcaaaatttccttcatcagtaactgaagatctttatattcattttcagcccatcagcaattcaatatttaatagctcttcgaacaacttaacaagaaattcagaacatgaacctcttggaaaaagttgggcttttcttgttggtgttgttgtcactgtactgacgacttcacttctcatttttattgctatcaaatgcccaatatggtacaatattctgcttagttataatcatcatcgcctggaagagcatgaagcagaaacctatgaagatggttttactggaaatccaagctctctttcacagataccagaaacaaactctgaagaaactacagtaatatttgaacaattacattcatttgtggtagatgatgatggatttattgaagacaaatatatagatatccatgaattatgtgaagaaaattaatttctttcaaagtttgctttttaaagcaaagttatcagctcactcagtttagatatggagattttgctatgtgacataacaaaatacagctggcaggcattcatattaatgacaacatacatgaatatcataaaattatgttctttgcattatattgagcaagcaggttcaaatacagtaactgacactcctcggtagttgacagttacatagtctacaatactagcactactattcttagcagtgcttgggtgaccatacgaactagtaaaaaggtctaaattattcatgaattaaaatgaatggattctcatattaacacaggtatttgacataatatgtattaagttatactaatgtttcaatcagtaaagaaataaaagtttaggatttattaatatatggaagtcaaagtgaggaacagagatagcttaaataatacactaagattgattttatgctcccagaataaaatcatagagttggaaaatatttttttgaaatgcttcctgaaatagcacaataaatttccttaaaatttcatagcaatttaaagcacaagcacaatgttcaggcataatccctaataagtcactattgattctggttataaagaaaggctgtcaccataatgcaggatcactacagtttaatgtcatactggcttccaaagtgggcatcacaattatctataaatcttgttttaaaaatacatatttccacctctctctgggagatttttattcaaattggtctgtgctgacactaaggaatcttcatgtggtccatggacagctatttctatctattcagtagatagagcaatgtttcccaaattgtttttctagaatactaatttccagagagacattcacaagtatttacagaagaagaaggaggtacatggtcaaattactacaggaaaaactagtagtttaaacaaggtgaaacaagattctttttcttttttttttttttttttttgagacaaagtctcgcactgtctcccaggctggactgcagcagcgcagtctcagatcactgcaacctccgcctcctgggttcaagcaattcttctgactcagcctcccgagtagctgggagtacaggtgcacaccaccatgcctggctaatttctgtatttttagtagagacagggtttcaccatgttggccaggctggtctcgaacgcctgacctcatgatctacccgcctcggcctcccaaagtgctgggattacaggcatggagcaccgtgcctggccaagattctttacaataggatttatgtaaaactttactaagctaaactgctctctgattattcaagagcaaagtattaaaaatttctcaaacttacttgacaacaaaacccattctttcagttacatctactaagagctcgtagttcaataacattccaaagaacgtagtttggaaaacactggcctatcggctgtaataggaagggtctaaagaaaattatttgctgagtcctcataatcaattggctataatcacaatttaataatttatcaatgcaaacagtacattaaaaactgtagcacaatctataatttttaccttcatatgcagagaaattaagaatttacatcttttacaaatatgtatatctctgaaataatgaaatatattgatgggtgaaataatatttctggtattttcttcattataacacgtggaatggaacagtggctagaggtatggatggagcaaggtcaaatatgagctgatggagctgggagctaaataagggtataatatgctacttctgtgtatgttgtgtatggtatagtatgctatttctgtgtatgttcaaattgtttatgtatataataaagttttaaaaatttgtatgtacttgacaattccttagaaaaaagaggctaaaataaaatagatctatgtcataatctatagaatagtcattttaaaagttacataattagtaaattcaatacaaatgtctactgagagaaaataaaaactaggatgatatacctgtaaaatagaagaacttactaatttataatacatatttgcttgtgtttacagacacatgttttcaacaaaggatataagtatattatggctaatgtttctttatatatcaattatactttgttttaaaccttaattataagaatgagatgattataggaacataaaatatctttttctaaacaatgtatcattctgctaaattatttcctaattataagatgcaaatattaatatttgagaaatgtagcaaaatgaaatataattgcaaatgagcaaagactacacttaagcttttatattcaagggcctctgttgaatatggggtattcaataaatatctgactacacaaagaaaaataaa

SEQ ID NO: 147969 - DNA, 1963 bp, Homo sapiens
  Payload ID: 9284
  Gene Symbol: LRRC2
  Gene Name: leucine rich repeat containing 2
  Uniprot ID: Q9BYS8
  ENST ID: ENST00000296144
  CDS Start-End: 183-1298
acttcaaagggcaaaagaaagaggagaacctccgcttaccacagccgggtagaaatgcctgaggaaagcagcggagctgaccgtgccagcatttacacagggaacacttcttgggcagccaggtgtcatggggcacagacccacagttcctgagaatgaacaggtaatttcatgctcccaaaatgggacataaagtggttgtcttcgacatttctgtcatcagagccttgtgggaaactcgtgtcaagaagcacaaagcttggcagaagaaggaggtggaaaggcttgagaagagcgccttggagaagataaaggaggagtggaactttgtggccgaatgcaggaggaagggcatcccccaggctgtatactgcaagaatggcttcatagacaccagcgtgcggcttctggacaagattgaaaggaacactctcacaaggcagagttcacttcccaaggacagaggcaaacggagcagtgcgtttgtgtttgaactttctggggagcactggacggagctcccagattcattgaaggagcagacacacctgagagaatggtacataagcaataccttgattcaaatcattcctacatatattcagttatttcaagcgatgagaattctggatctgccaaaaaaccaaatctcacatcttccagcagaaatcggttgtttgaagaacctgaaagaactcaatgtgggtttcaactatctgaagagcattcctccagaattgggagattgtgaaaatctagagagactggattgttctggaaatctagaattaatggagctgccctttgaattaagtaatttgaagcaagttacatttgtagatatctcagcaaacaagttttccagtgtcccaatctgtgtcctgcggatgtcgaatttgcagtggttggatatcagcagcaataacctgaccgacctgccgcaagatatagacaggctagaggagctgcagagctttctcttgtataaaaacaagttgacctaccttccctattccatgctgaacctgaagaagctcactctgttagtcgtcagtggggaccatttggtggagctcccaactgccctttgtgactcatccacacctttaaaatttgtaagccttatggacaatcctattgataatgcccaatgtgaagatggcaatgaaataatggaaagtgaacgggatcgccaacattttgataaagaagttatgaaagcctatattgaagaccttaaagaaagagaatctgttcccagctataccaccaaagtgtcttttagccttcaactttgatatccatcagaagactgcaaatctcactattctctggagctatatataaatctttgttatgatcatgtcatataggaagaatggcttgtgcttaaggacaaagtctagaaaccactatcatagttgctaaaaaaaatggttttcaaatgtcaaatacatgagtatctccctccatggactggagaattgaaaaattggtttgtatattgatatttccaggttcatttgcatatacttttttccaaataatgcacatttaatatgttttaaaatgtcttatttttaagaattataactaaaagaccaaatactgaagttaagtgcattgttttcaggaatcaaaagataaaggggccgggtgtggtggctcacacctgtaatcccagcactttgggaggccgaagtgggtggatcacctgaggtccggagttcgaggctggtttggccagcatggcgaaaccccatctctactaaaaatacaaaaaattagctgggcatggtggcagttgcctgtaatcctagctactcaggaggctgaggcaggagaatcgcttgaacctgggaggtggagttgcagtgagccgagatcatgcgactgcactccagcctgggtgacagagccagactctgtctcaaaaaaaaaaaaaaagaaaagaaaaagataa

SEQ ID NO: 147970 - DNA, 5100 bp, Homo sapiens
  Payload ID: 9284
  Gene Symbol: LRRC2
  Gene Name: leucine rich repeat containing 2
  Uniprot ID: Q9BYS8
  ENST ID: ENST00000395905
  CDS Start-End: 394-1509
cattccacaccctccgggatctccagtgtgaaaatgtctggccctgggtaggaggctgcagatagtccctgggccggggctcgcgctggccggctgcagcgcgcagggtgccaagccctcccctacgaagtctgttttgtctcaggctgggctgagtcacatagaatagatagatagttgatttagcacatgtcctccagatcatattatccgcctacaaatatagcctgttagcgcacaggcacgggaggcttcttccggctcggccgtgctgctcagcgggtgtaaacagcctctgcggtgtaaacagcctctgcggtgtaaacagccgcggcgggcaggccaggactgtcagtgcccgcccctcggggcaggtaatttcatgctcccaaaatgggacataaagtggttgtcttcgacatttctgtcatcagagccttgtgggaaactcgtgtcaagaagcacaaagcttggcagaagaaggaggtggaaaggcttgagaagagcgccttggagaagataaaggaggagtggaactttgtggccgaatgcaggaggaagggcatcccccaggctgtatactgcaagaatggcttcatagacaccagcgtgcggcttctggacaagattgaaaggaacactctcacaaggcagagttcacttcccaaggacagaggcaaacggagcagtgcgtttgtgtttgaactttctggggagcactggacggagctcccagattcattgaaggagcagacacacctgagagaatggtacataagcaataccttgattcaaatcattcctacatatattcagttatttcaagcgatgagaattctggatctgccaaaaaaccaaatctcacatcttccagcagaaatcggttgtttgaagaacctgaaagaactcaatgtgggtttcaactatctgaagagcattcctccagaattgggagattgtgaaaatctagagagactggattgttctggaaatctagaattaatggagctgccctttgaattaagtaatttgaagcaagttacatttgtagatatctcagcaaacaagttttccagtgtcccaatctgtgtcctgcggatgtcgaatttgcagtggttggatatcagcagcaataacctgaccgacctgccgcaagatatagacaggctagaggagctgcagagctttctcttgtataaaaacaagttgacctaccttccctattccatgctgaacctgaagaagctcactctgttagtcgtcagtggggaccatttggtggagctcccaactgccctttgtgactcatccacacctttaaaatttgtaagccttatggacaatcctattgataatgcccaatgtgaagatggcaatgaaataatggaaagtgaacgggatcgccaacattttgataaagaagttatgaaagcctatattgaagaccttaaagaaagagaatctgttcccagctataccaccaaagtgtcttttagccttcaactttgatatccatcagaagactgcaaatctcactattctctggagctatatataaatctttgttatgatcatgtcatataggaagaatggcttgtgcttaaggacaaagtctagaaaccactatcatagttgctaaaaaaaatggttttcaaatgtcaaatacatgagtatctccctccatggactggagaattgaaaaattggtttgtatattgatatttccaggttcatttgcatatacttttttccaaataatgcacatttaatatgttttaaaatgtcttatttttaagaattataactaaaagaccaaatactgaagttaagtgcattgttttcaggaatcaaaagataaaggggccgggtgtggtggctcacacctgtaatcccagcactttgggaggccgaagtgggtggatcacctgaggtccggagttcgaggctggtttggccagcatggcgaaaccccatctctactaaaaatacaaaaaattagctgggcatggtggcagttgcctgtaatcctagctactcaggaggctgaggcaggagaatcgcttgaacctgggaggtggagttgcagtgagccgagatcatgcgactgcactccagcctgggtgacagagccagactctgtctcaaaaaaaaaaaaaaagaaaagaaaaagataaagggattgtgaaaagagcatttatattggactaatcagatgagagtgttttgttattttgaaagagtttcttttactgagaataatcttccttgagtttatataaactgctatttccatatgttttaagttatattttggcaagtgtagactcccaggagagacttgtaggtacaatctaggccttgaagaaacaaaggctggaatatctgcccatgctttgggcatgagatgctcagatggtgcgtgggtagatctagttgaggaagtgtgggcctggctgttcatgggaagtcttcagtggccttcatggatggccatccagtcctgagtggtcaccctgggggtcctgggacacacctcagtaaagagcaaaggcaacgccctcagggtcccttcctccaagatggccatgtagggtaatggagatgaccagtccacactgataaggagttcctagcaaggcttccttgtgggtaccacaggacaactctgcccatagcaaagatgcttcagtccagagggagcccatgggctgtttgaatttgggagaggtgggattcattacaagactttgggctcttatgtcacatcacatgatttggagaaattagacacaatctcttatttttataccactgtcttgggctaaaataaacaggttgtggctgatggtgttgaagataaataagcttaaacaaataactttggccgggcacggtggctcacacctataatcccagcactatgggaggctgaggcaagcaggttgtttgagcccaggaatttgagaacaggattttgagaacagcttggacatcatgacgaaaccccatctccacaaaaaaattcaaaaaattagccaggtgtggtggcatgtgcctgtggtcccagctactcaggaggctgaggtgggaaaatcacttgagcccaggaggtcgaggctgcagtgtgctgtgattgtgacactgccctccagcctgggtgacagagtgagaccctgtctcaaaagcaaaacaaacagcaataacaatattattattgttataactaaaaaaaaaaaaacaaaaacaagcagcttttgtgactaagaaggaaaatatgcatatagtggcatatttttatatgaatcatctcctctgtggtcttgcccagtaccatccagtggagctttctgcagtgacggaaatgttctgtatttgcgttgtccaacgtggtaaaccagacacatgtgattcttgagcacttgaacaatgactgatgtgattgaagaacccatctttcaattcaattaaatttaaatagccacatttaactccagccttgggtttgacctgatggaaaattcccatgagagagtgctccaaaccgttccaaggtggggccagttgcgattctaaaggaagaagcactaaatggcagggtgatcagtccaaagcatttatgaggggagcttacatacagcatgggctgcagcgtccttgtgatgggcagtgagacaagggatgttctacctgggcatgtccccagcgagggggttgggggatggagttcacatgaagatgtaaggaatttgggtgggggctgggctggcttctacatgtttagcaacacggctgatctttcagtgtttccagcaacaacctaagcaccgttatcagtgcctaggaatgttcaaggcccaggctggggttcagacctgcagaggaaaacatcagctggctgggtcaaggcaccatgtgttacttggtcaggacagagacaaaaatgaggaaaactaggggaccccacacacatgtggctaccatactcctgaacaggtctagctagttatttgtttttttggaagttaatctggggtagaaatgtatggtgatttttattttctctgtctgaagaaccagccatttttaaaaaggttattattgacatcccaatattttgtcttggtgggcttactcataagtccaaacattttattctcaacaggtgtaaaacaggcagagcattctaaaaccacatggtagtgctttggtggaggactgcttccacttagaaacaaactctgagaagtaggctaagagaagacaagagggccgggcgcggtgactcacgcctataatcccagcactttgggaggccgagatgggtgaatcatgaggtcaggagttcgagaccagcctaaacaacatagtgaaaccctgtctctattaaaaatgcaaaaaattagccgggcgtggtgggcacccgtaatcccagctactcaggaggctgaggcaggagaattgcttgaacccaggaagcagaggttgcagtaagctgagatcccaccattgcactccagcctgggcaacagagtgagactccatctcaaaaaaaaaaaaaaaaaaaaaaaaagagagagagatgaaaagagtaggaaaatgagaaatcaccttcgttgaatcttaaatagttacatttttttctttttaacactaaaaatacaattcaaatttattagctctactacttgaatgattttggaattttatgtcatgctaaggtatgtgttacatatggccaagtggaaaatatatctgaagaggggctttcatacaaatagactgttcataatttatgtaaattttattttaataaaatcagttttttgtttaaaaaccttgtttcactgtcacatatgaaaaaaatactgcattgatatataattatttcatgttacataataacccaaaacaaataattacttgaatatgtttgtagagatactatttaatttattcatataaatgtgcagaaagattccaaaggagaatatatatcttgtgaaaatatggagatttgaaaatttgacatgatgcaaatagactgatacataatttggaaaggttatttacatggcagaatacatgtatgaatattaaagt

SEQ ID NO: 147971 - DNA, 3414 bp, Homo sapiens
  Payload ID: 9285
  Gene Symbol: LRRC20
  Gene Name: leucine rich repeat containing 20
  Uniprot ID: Q8TCA0
  ENST ID: ENST00000355790
  CDS Start-End: 479-1033
ggaggctcagtccgaggatgcctagatgttagcgagggagcacgcgctgagcttcccgaaccccatgccacaaaaacaaggcgccagcaggtcccgctcacgtcccagcgggcttctttccctggggtggggaagtgggtcaacttcgttctgatctgaaggggggtttgggactatttgggtcgctcctcacctccccacccgctccccggcttggcatggtccagagcccgggctggagccagcggtagggccagcttgcacacatggctccggaggctccggttgcccatccgagcccctgccaggctctaacgttcccaactgacaacaccagtaactaaatataggagcagatggtggggacgggctgtcgcagcggctcctttgcagaggtctccggactgcagataaggctcaggcccttttgtgagaagcagaccagcctgggggctggcggcaggacacctgtgtctgcatgctgaagaagatgggtgaggccgtggccagagtagcaaggaaggtcaacgagacggtggagagcggctctgacactctggacctggccgagtgcaagctggtctcctttcccattggcatctacaaggtcctgcggaatgtctctggccagatccacctcatcaccctggctaacaacgagcttaagtccctcaccagcaagttcatgaccacattcagtcagctccgagagctccacctggaggggaacttcctacaccgcctccccagcgaggtcagtgccctgcagcacctcaaggccattgacctgtcccggaaccagttccaggacttccctgagcagcttaccgccctgccggcgctggagaccatcaacctggaggagaacgagatcgtagatgtgcccgtggagaagctggccgccatgccagccttgcgcagcatcaacctccgcttcaacccactcaacgccgaggtgcgcgtgatcgccccgccgctcatcaagtttgacatgctcatgtctccggaaggcgcaagagcccccctaccttaggccaccctcctcatgcccacccagcaaggggcagaggccacaggcctggaaccctggaagggagggaggcccatgggaggccaagcctgggggctgggggcgggtgggccgagcagcacgtggtgggtggggtgcagctggtctggatagatagcttacagcagtagtgggctctggaatgcccaagggaagaggcaaggtggggcctgcagcctggactcggcactcacagctgctgtgcaaactcaggcagatctcctgccctctctgagccttgtcacttgaaaaaaacaggaccctttccctcctttgggctccctggaggtttttaagcagtacgtgcctccaagttacctccagatcagcaggcacaggtgggcattgccaggtattttctgagcccctgcgggtttgaggccttgtttttagtgctgagagccagttgctgccctgagaagagaagacaacctccatctatttattgcttcctgagaactgacctggatgcggccctctgcagggcccagtcttcagtcctgtggtccctggactggtgggaacctgaactaggagtcctgggagagctgtggtgggaatatgggctggcactgctgcagggcaagaacattcatgtaggagcccgaggaccagcaggctgggaatggggagcaagtcacgtcagctctgtcattccccacagttaacaaattggcggggtgggaagtcctgagtgctccgtccctctagcatcactcctgagctgcgggagaggtggcccagagaacagcagagtcagttacacctgcagctcttgtctaaagtgattagatggccaccctcaccactgtccagtccagcagcagcctggctgccttgtcatggcctcctgggggcagaaggcgatgtggaccacgggatttgtagccagccagctcccaggccaacgcccaaagccctgatgacctggttcttctgaggccctcaacctggcatcttagggtatggtcaggcaacagggtgaccagctgtcctggtttcccaggacatggaactttcaatgctaaaactgggacagtacccagcaagtggggatggttggtcccctaccaggagagggcctggggctcttgcttcccgagaacgcctgtggcttgaagaaccttgactgcttggtcctcaggtatctacctcccaccttctcctcatctgtggagcaagccaactcagtgccccagaccccacctgatctgcatctttgtttgcatctccagagacacctgaggccccagagcttgaggcaaagccaggccgtccaaatcctgtgtgccgtggacgagtggccactttactactcctaaggctaagatgttgagagctcagaccactgctcagagcagtaatccctgctcagaatgctcccagttccctcgtccctgcccaggtctcttgtctcttgggaaggaactgataggtcgggccattgttgggccatcactgagcgctcagtatctcaagagactctgttcattctgctcgtatcccaaggcctggttggtcaaactctgggcaaagggttttcaggatgaggaggtcaagacaggatctccagagctaccgagttcatctgtgggtgttgggggcaagtgggggctgaagtcctgtgcaggctgcgctggccccacctgccttgtgccctggagtggggtttctccttgttgaagaagaggcatccttctctgatgtgcacaaacacaatgtatgaccagagccttgcaactcaaagtgtggtctgtggaccagcagcggcagtgacacctgggagcttgttaggaatgcagagtctaggcctcaccctatacctcccgactcagaccctgcattttagcaagacccccagctgattcctataagcactttagagtttgagaagcaaggacctaggctggggatgtcctccgagcagagggtgaagtttctctcagttctctccctgccacttccagggatctgagcctgtgctcagcctcctccctaacccaccctgggagacacttggcctgttagattgttccagagtctgcatggcactcctgaagaagggagtgtgacctgcagtcaccaggagatgagggttaggtgtgcccagccctccagacccggcctttctggttaacccctgcatgccaagctgcctgctgccccaggtcctcacctcaggcctttgaaggggcagcttctggaagttgttttctcctctgcttggagagtttgcccttgtctgtcttggaaagtgtgggcagccacagatgcccccaaatcagagctcacagtgagtgagcccctaagcttcagtctgcaataaagaatgcattggtttcatc

SEQ ID NO: 147972 - DNA, 2906 bp, Homo sapiens
  Payload ID: 9285
  Gene Symbol: LRRC20
  Gene Name: leucine rich repeat containing 20
  Uniprot ID: Q8TCA0
  ENST ID: ENST00000357631
  CDS Start-End: 142-528
tcggaactcgcctggggcgccgccggcggcggagggagcgtgactgcgctgcgcagggcgctaggaggcattgtcgccgctcaggcccttttgtgagaagcagaccagcctgggggctggcggcaggacacctgtgtctgcatgctgaagaagatgggtgaggccgtggccagagtagcaaggaaggtcaacgagacggtggagagcggctctgacactctggacctggccgagtgcaagctggtctcctttcccattggcatctacaaggtcctgcggaatgtctctggccagatccacctcatcaccctggctaacaacgagcttaagtccctcaccagcaagttcatgaccacattcagtcagctccgagatgtgcccgtggagaagctggccgccatgccagccttgcgcagcatcaacctccgcttcaacccactcaacgccgaggtgcgcgtgatcgccccgccgctcatcaagtttgacatgctcatgtctccggaaggcgcaagagcccccctaccttaggccaccctcctcatgcccacccagcaaggggcagaggccacaggcctggaaccctggaagggagggaggcccatgggaggccaagcctgggggctgggggcgggtgggccgagcagcacgtggtgggtggggtgcagctggtctggatagatagcttacagcagtagtgggctctggaatgcccaagggaagaggcaaggtggggcctgcagcctggactcggcactcacagctgctgtgcaaactcaggcagatctcctgccctctctgagccttgtcacttgaaaaaaacaggaccctttccctcctttgggctccctggaggtttttaagcagtacgtgcctccaagttacctccagatcagcaggcacaggtgggcattgccaggtattttctgagcccctgcgggtttgaggccttgtttttagtgctgagagccagttgctgccctgagaagagaagacaacctccatctatttattgcttcctgagaactgacctggatgcggccctctgcagggcccagtcttcagtcctgtggtccctggactggtgggaacctgaactaggagtcctgggagagctgtggtgggaatatgggctggcactgctgcagggcaagaacattcatgtaggagcccgaggaccagcaggctgggaatggggagcaagtcacgtcagctctgtcattccccacagttaacaaattggcggggtgggaagtcctgagtgctccgtccctctagcatcactcctgagctgcgggagaggtggcccagagaacagcagagtcagttacacctgcagctcttgtctaaagtgattagatggccaccctcaccactgtccagtccagcagcagcctggctgccttgtcatggcctcctgggggcagaaggcgatgtggaccacgggatttgtagccagccagctcccaggccaacgcccaaagccctgatgacctggttcttctgaggccctcaacctggcatcttagggtatggtcaggcaacagggtgaccagctgtcctggtttcccaggacatggaactttcaatgctaaaactgggacagtacccagcaagtggggatggttggtcccctaccaggagagggcctggggctcttgcttcccgagaacgcctgtggcttgaagaaccttgactgcttggtcctcaggtatctacctcccaccttctcctcatctgtggagcaagccaactcagtgccccagaccccacctgatctgcatctttgtttgcatctccagagacacctgaggccccagagcttgaggcaaagccaggccgtccaaatcctgtgtgccgtggacgagtggccactttactactcctaaggctaagatgttgagagctcagaccactgctcagagcagtaatccctgctcagaatgctcccagttccctcgtccctgcccaggtctcttgtctcttgggaaggaactgataggtcgggccattgttgggccatcactgagcgctcagtatctcaagagactctgttcattctgctcgtatcccaaggcctggttggtcaaactctgggcaaagggttttcaggatgaggaggtcaagacaggatctccagagctaccgagttcatctgtgggtgttgggggcaagtgggggctgaagtcctgtgcaggctgcgctggccccacctgccttgtgccctggagtggggtttctccttgttgaagaagaggcatccttctctgatgtgcacaaacacaatgtatgaccagagccttgcaactcaaagtgtggtctgtggaccagcagcggcagtgacacctgggagcttgttaggaatgcagagtctaggcctcaccctatacctcccgactcagaccctgcattttagcaagacccccagctgattcctataagcactttagagtttgagaagcaaggacctaggctggggatgtcctccgagcagagggtgaagtttctctcagttctctccctgccacttccagggatctgagcctgtgctcagcctcctccctaacccaccctgggagacacttggcctgttagattgttccagagtctgcatggcactcctgaagaagggagtgtgacctgcagtcaccaggagatgagggttaggtgtgcccagccctccagacccggcctttctggttaacccctgcatgccaagctgcctgctgccccaggtcctcacctcaggcctttgaaggggcagcttctggaagttgttttctcctctgcttggagagtttgcccttgtctgtcttggaaagtgtgggcagccacagatgcccccaaatcagagctcacagtgagtgagcccctaagcttcagtctgcaataaagaatgcattggtttc

SEQ ID NO: 147973 - DNA, 2924 bp, Homo sapiens
  Payload ID: 9285
  Gene Symbol: LRRC20
  Gene Name: leucine rich repeat containing 20
  Uniprot ID: Q8TCA0
  ENST ID: ENST00000358141
  CDS Start-End: 142-546
tcggaactcgcctggggcgccgccggcggcggagggagcgtgactgcgctgcgcagggcgctaggaggcattgtcgccgctcaggcccttttgtgagaagcagaccagcctgggggctggcggcaggacacctgtgtctgcatgctgaagaagatgggtgaggccgtggccagagtagcaaggaaggtcaacgagacggtggagagcggctctgacactctggagctccacctggaggggaacttcctacaccgcctccccagcgaggtcagtgccctgcagcacctcaaggccattgacctgtcccggaaccagttccaggacttccctgagcagcttaccgccctgccggcgctggagaccatcaacctggaggagaacgagatcgtagatgtgcccgtggagaagctggccgccatgccagccttgcgcagcatcaacctccgcttcaacccactcaacgccgaggtgcgcgtgatcgccccgccgctcatcaagtttgacatgctcatgtctccggaaggcgcaagagcccccctaccttaggccaccctcctcatgcccacccagcaaggggcagaggccacaggcctggaaccctggaagggagggaggcccatgggaggccaagcctgggggctgggggcgggtgggccgagcagcacgtggtgggtggggtgcagctggtctggatagatagcttacagcagtagtgggctctggaatgcccaagggaagaggcaaggtggggcctgcagcctggactcggcactcacagctgctgtgcaaactcaggcagatctcctgccctctctgagccttgtcacttgaaaaaaacaggaccctttccctcctttgggctccctggaggtttttaagcagtacgtgcctccaagttacctccagatcagcaggcacaggtgggcattgccaggtattttctgagcccctgcgggtttgaggccttgtttttagtgctgagagccagttgctgccctgagaagagaagacaacctccatctatttattgcttcctgagaactgacctggatgcggccctctgcagggcccagtcttcagtcctgtggtccctggactggtgggaacctgaactaggagtcctgggagagctgtggtgggaatatgggctggcactgctgcagggcaagaacattcatgtaggagcccgaggaccagcaggctgggaatggggagcaagtcacgtcagctctgtcattccccacagttaacaaattggcggggtgggaagtcctgagtgctccgtccctctagcatcactcctgagctgcgggagaggtggcccagagaacagcagagtcagttacacctgcagctcttgtctaaagtgattagatggccaccctcaccactgtccagtccagcagcagcctggctgccttgtcatggcctcctgggggcagaaggcgatgtggaccacgggatttgtagccagccagctcccaggccaacgcccaaagccctgatgacctggttcttctgaggccctcaacctggcatcttagggtatggtcaggcaacagggtgaccagctgtcctggtttcccaggacatggaactttcaatgctaaaactgggacagtacccagcaagtggggatggttggtcccctaccaggagagggcctggggctcttgcttcccgagaacgcctgtggcttgaagaaccttgactgcttggtcctcaggtatctacctcccaccttctcctcatctgtggagcaagccaactcagtgccccagaccccacctgatctgcatctttgtttgcatctccagagacacctgaggccccagagcttgaggcaaagccaggccgtccaaatcctgtgtgccgtggacgagtggccactttactactcctaaggctaagatgttgagagctcagaccactgctcagagcagtaatccctgctcagaatgctcccagttccctcgtccctgcccaggtctcttgtctcttgggaaggaactgataggtcgggccattgttgggccatcactgagcgctcagtatctcaagagactctgttcattctgctcgtatcccaaggcctggttggtcaaactctgggcaaagggttttcaggatgaggaggtcaagacaggatctccagagctaccgagttcatctgtgggtgttgggggcaagtgggggctgaagtcctgtgcaggctgcgctggccccacctgccttgtgccctggagtggggtttctccttgttgaagaagaggcatccttctctgatgtgcacaaacacaatgtatgaccagagccttgcaactcaaagtgtggtctgtggaccagcagcggcagtgacacctgggagcttgttaggaatgcagagtctaggcctcaccctatacctcccgactcagaccctgcattttagcaagacccccagctgattcctataagcactttagagtttgagaagcaaggacctaggctggggatgtcctccgagcagagggtgaagtttctctcagttctctccctgccacttccagggatctgagcctgtgctcagcctcctccctaacccaccctgggagacacttggcctgttagattgttccagagtctgcatggcactcctgaagaagggagtgtgacctgcagtcaccaggagatgagggttaggtgtgcccagccctccagacccggcctttctggttaacccctgcatgccaagctgcctgctgccccaggtcctcacctcaggcctttgaaggggcagcttctggaagttgttttctcctctgcttggagagtttgcccttgtctgtcttggaaagtgtgggcagccacagatgcccccaaatcagagctcacagtgagtgagcccctaagcttcagtctgcaataaagaatgcattggtttc

SEQ ID NO: 147974 - DNA, 3095 bp, Homo sapiens
  Payload ID: 9285
  Gene Symbol: LRRC20
  Gene Name: leucine rich repeat containing 20
  Uniprot ID: Q8TCA0
  ENST ID: ENST00000373224
  CDS Start-End: 160-714
gcgtgactgcgctgcgcagggcgctaggaggcattgtcgccgtaagtggagccaaaagcggcccggagcgggaccacacgcttcttgccccgcaaagctcaggcccttttgtgagaagcagaccagcctgggggctggcggcaggacacctgtgtctgcatgctgaagaagatgggtgaggccgtggccagagtagcaaggaaggtcaacgagacggtggagagcggctctgacactctggacctggccgagtgcaagctggtctcctttcccattggcatctacaaggtcctgcggaatgtctctggccagatccacctcatcaccctggctaacaacgagcttaagtccctcaccagcaagttcatgaccacattcagtcagctccgagagctccacctggaggggaacttcctacaccgcctccccagcgaggtcagtgccctgcagcacctcaaggccattgacctgtcccggaaccagttccaggacttccctgagcagcttaccgccctgccggcgctggagaccatcaacctggaggagaacgagatcgtagatgtgcccgtggagaagctggccgccatgccagccttgcgcagcatcaacctccgcttcaacccactcaacgccgaggtgcgcgtgatcgccccgccgctcatcaagtttgacatgctcatgtctccggaaggcgcaagagcccccctaccttaggccaccctcctcatgcccacccagcaaggggcagaggccacaggcctggaaccctggaagggagggaggcccatgggaggccaagcctgggggctgggggcgggtgggccgagcagcacgtggtgggtggggtgcagctggtctggatagatagcttacagcagtagtgggctctggaatgcccaagggaagaggcaaggtggggcctgcagcctggactcggcactcacagctgctgtgcaaactcaggcagatctcctgccctctctgagccttgtcacttgaaaaaaacaggaccctttccctcctttgggctccctggaggtttttaagcagtacgtgcctccaagttacctccagatcagcaggcacaggtgggcattgccaggtattttctgagcccctgcgggtttgaggccttgtttttagtgctgagagccagttgctgccctgagaagagaagacaacctccatctatttattgcttcctgagaactgacctggatgcggccctctgcagggcccagtcttcagtcctgtggtccctggactggtgggaacctgaactaggagtcctgggagagctgtggtgggaatatgggctggcactgctgcagggcaagaacattcatgtaggagcccgaggaccagcaggctgggaatggggagcaagtcacgtcagctctgtcattccccacagttaacaaattggcggggtgggaagtcctgagtgctccgtccctctagcatcactcctgagctgcgggagaggtggcccagagaacagcagagtcagttacacctgcagctcttgtctaaagtgattagatggccaccctcaccactgtccagtccagcagcagcctggctgccttgtcatggcctcctgggggcagaaggcgatgtggaccacgggatttgtagccagccagctcccaggccaacgcccaaagccctgatgacctggttcttctgaggccctcaacctggcatcttagggtatggtcaggcaacagggtgaccagctgtcctggtttcccaggacatggaactttcaatgctaaaactgggacagtacccagcaagtggggatggttggtcccctaccaggagagggcctggggctcttgcttcccgagaacgcctgtggcttgaagaaccttgactgcttggtcctcaggtatctacctcccaccttctcctcatctgtggagcaagccaactcagtgccccagaccccacctgatctgcatctttgtttgcatctccagagacacctgaggccccagagcttgaggcaaagccaggccgtccaaatcctgtgtgccgtggacgagtggccactttactactcctaaggctaagatgttgagagctcagaccactgctcagagcagtaatccctgctcagaatgctcccagttccctcgtccctgcccaggtctcttgtctcttgggaaggaactgataggtcgggccattgttgggccatcactgagcgctcagtatctcaagagactctgttcattctgctcgtatcccaaggcctggttggtcaaactctgggcaaagggttttcaggatgaggaggtcaagacaggatctccagagctaccgagttcatctgtgggtgttgggggcaagtgggggctgaagtcctgtgcaggctgcgctggccccacctgccttgtgccctggagtggggtttctccttgttgaagaagaggcatccttctctgatgtgcacaaacacaatgtatgaccagagccttgcaactcaaagtgtggtctgtggaccagcagcggcagtgacacctgggagcttgttaggaatgcagagtctaggcctcaccctatacctcccgactcagaccctgcattttagcaagacccccagctgattcctataagcactttagagtttgagaagcaaggacctaggctggggatgtcctccgagcagagggtgaagtttctctcagttctctccctgccacttccagggatctgagcctgtgctcagcctcctccctaacccaccctgggagacacttggcctgttagattgttccagagtctgcatggcactcctgaagaagggagtgtgacctgcagtcaccaggagatgagggttaggtgtgcccagccctccagacccggcctttctggttaacccctgcatgccaagctgcctgctgccccaggtcctcacctcaggcctttgaaggggcagcttctggaagttgttttctcctctgcttggagagtttgcccttgtctgtcttggaaagtgtgggcagccacagatgcccccaaatcagagctcacagtgagtgagcccctaagcttcagtctgcaataaagaatgcattggtttcatc

SEQ ID NO: 147975 - DNA, 2959 bp, Homo sapiens
  Payload ID: 9285
  Gene Symbol: LRRC20
  Gene Name: leucine rich repeat containing 20
  ENST ID: ENST00000395010
  CDS Start-End: 228-575
ccccgcgcgccccgccccgccggctcggaactcgcctggggcgccgccggcggcggagggagcgtgactgcgctgcgcagggcgctaggaggcattgtcgccacctggccgagtgcaagctggtctcctttcccattggcatctacaaggtcctgcggaatgtctctggccagatccacctcatcaccctggctaacaacgagcttaagtccctcaccagcaagttcatgaccacattcagtcagctccgagagctccacctggaggggaacttcctacaccgcctccccagcgaggtcagtgccctgcagcacctcaaggccattgacctgtcccggaaccagttccaggacttccctgagcagcttaccgccctgccggcgctggagaccatcaacctggaggagaacgagatcgtagatgtgcccgtggagaagctggccgccatgccagccttgcgcagcatcaacctccgcttcaacccactcaacgccgaggtgcgcgtgatcgccccgccgctcatcaagtttgacatgctcatgtctccggaaggcgcaagagcccccctaccttaggccaccctcctcatgcccacccagcaaggggcagaggccacaggcctggaaccctggaagggagggaggcccatgggaggccaagcctgggggctgggggcgggtgggccgagcagcacgtggtgggtggggtgcagctggtctggatagatagcttacagcagtagtgggctctggaatgcccaagggaagaggcaaggtggggcctgcagcctggactcggcactcacagctgctgtgcaaactcaggcagatctcctgccctctctgagccttgtcacttgaaaaaaacaggaccctttccctcctttgggctccctggaggtttttaagcagtacgtgcctccaagttacctccagatcagcaggcacaggtgggcattgccaggtattttctgagcccctgcgggtttgaggccttgtttttagtgctgagagccagttgctgccctgagaagagaagacaacctccatctatttattgcttcctgagaactgacctggatgcggccctctgcagggcccagtcttcagtcctgtggtccctggactggtgggaacctgaactaggagtcctgggagagctgtggtgggaatatgggctggcactgctgcagggcaagaacattcatgtaggagcccgaggaccagcaggctgggaatggggagcaagtcacgtcagctctgtcattccccacagttaacaaattggcggggtgggaagtcctgagtgctccgtccctctagcatcactcctgagctgcgggagaggtggcccagagaacagcagagtcagttacacctgcagctcttgtctaaagtgattagatggccaccctcaccactgtccagtccagcagcagcctggctgccttgtcatggcctcctgggggcagaaggcgatgtggaccacgggatttgtagccagccagctcccaggccaacgcccaaagccctgatgacctggttcttctgaggccctcaacctggcatcttagggtatggtcaggcaacagggtgaccagctgtcctggtttcccaggacatggaactttcaatgctaaaactgggacagtacccagcaagtggggatggttggtcccctaccaggagagggcctggggctcttgcttcccgagaacgcctgtggcttgaagaaccttgactgcttggtcctcaggtatctacctcccaccttctcctcatctgtggagcaagccaactcagtgccccagaccccacctgatctgcatctttgtttgcatctccagagacacctgaggccccagagcttgaggcaaagccaggccgtccaaatcctgtgtgccgtggacgagtggccactttactactcctaaggctaagatgttgagagctcagaccactgctcagagcagtaatccctgctcagaatgctcccagttccctcgtccctgcccaggtctcttgtctcttgggaaggaactgataggtcgggccattgttgggccatcactgagcgctcagtatctcaagagactctgttcattctgctcgtatcccaaggcctggttggtcaaactctgggcaaagggttttcaggatgaggaggtcaagacaggatctccagagctaccgagttcatctgtgggtgttgggggcaagtgggggctgaagtcctgtgcaggctgcgctggccccacctgccttgtgccctggagtggggtttctccttgttgaagaagaggcatccttctctgatgtgcacaaacacaatgtatgaccagagccttgcaactcaaagtgtggtctgtggaccagcagcggcagtgacacctgggagcttgttaggaatgcagagtctaggcctcaccctatacctcccgactcagaccctgcattttagcaagacccccagctgattcctataagcactttagagtttgagaagcaaggacctaggctggggatgtcctccgagcagagggtgaagtttctctcagttctctccctgccacttccagggatctgagcctgtgctcagcctcctccctaacccaccctgggagacacttggcctgttagattgttccagagtctgcatggcactcctgaagaagggagtgtgacctgcagtcaccaggagatgagggttaggtgtgcccagccctccagacccggcctttctggttaacccctgcatgccaagctgcctgctgccccaggtcctcacctcaggcctttgaaggggcagcttctggaagttgttttctcctctgcttggagagtttgcccttgtctgtcttggaaagtgtgggcagccacagatgcccccaaatcagagctcacagtgagtgagcccctaagcttcagtctgcaataaagaatgcattggtttcatctgc

SEQ ID NO: 147976 - DNA, 2903 bp, Homo sapiens
  Payload ID: 9285
  Gene Symbol: LRRC20
  Gene Name: leucine rich repeat containing 20
  Uniprot ID: Q8TCA0
  ENST ID: ENST00000395011
  CDS Start-End: 115-519
gtgcaaaggccaagctggatgtggcctgagctctcggccctgcaagaggaggctcaggcccttttgtgagaagcagaccagcctgggggctggcggcaggacacctgtgtctgcatgctgaagaagatgggtgaggccgtggccagagtagcaaggaaggtcaacgagacggtggagagcggctctgacactctggagctccacctggaggggaacttcctacaccgcctccccagcgaggtcagtgccctgcagcacctcaaggccattgacctgtcccggaaccagttccaggacttccctgagcagcttaccgccctgccggcgctggagaccatcaacctggaggagaacgagatcgtagatgtgcccgtggagaagctggccgccatgccagccttgcgcagcatcaacctccgcttcaacccactcaacgccgaggtgcgcgtgatcgccccgccgctcatcaagtttgacatgctcatgtctccggaaggcgcaagagcccccctaccttaggccaccctcctcatgcccacccagcaaggggcagaggccacaggcctggaaccctggaagggagggaggcccatgggaggccaagcctgggggctgggggcgggtgggccgagcagcacgtggtgggtggggtgcagctggtctggatagatagcttacagcagtagtgggctctggaatgcccaagggaagaggcaaggtggggcctgcagcctggactcggcactcacagctgctgtgcaaactcaggcagatctcctgccctctctgagccttgtcacttgaaaaaaacaggaccctttccctcctttgggctccctggaggtttttaagcagtacgtgcctccaagttacctccagatcagcaggcacaggtgggcattgccaggtattttctgagcccctgcgggtttgaggccttgtttttagtgctgagagccagttgctgccctgagaagagaagacaacctccatctatttattgcttcctgagaactgacctggatgcggccctctgcagggcccagtcttcagtcctgtggtccctggactggtgggaacctgaactaggagtcctgggagagctgtggtgggaatatgggctggcactgctgcagggcaagaacattcatgtaggagcccgaggaccagcaggctgggaatggggagcaagtcacgtcagctctgtcattccccacagttaacaaattggcggggtgggaagtcctgagtgctccgtccctctagcatcactcctgagctgcgggagaggtggcccagagaacagcagagtcagttacacctgcagctcttgtctaaagtgattagatggccaccctcaccactgtccagtccagcagcagcctggctgccttgtcatggcctcctgggggcagaaggcgatgtggaccacgggatttgtagccagccagctcccaggccaacgcccaaagccctgatgacctggttcttctgaggccctcaacctggcatcttagggtatggtcaggcaacagggtgaccagctgtcctggtttcccaggacatggaactttcaatgctaaaactgggacagtacccagcaagtggggatggttggtcccctaccaggagagggcctggggctcttgcttcccgagaacgcctgtggcttgaagaaccttgactgcttggtcctcaggtatctacctcccaccttctcctcatctgtggagcaagccaactcagtgccccagaccccacctgatctgcatctttgtttgcatctccagagacacctgaggccccagagcttgaggcaaagccaggccgtccaaatcctgtgtgccgtggacgagtggccactttactactcctaaggctaagatgttgagagctcagaccactgctcagagcagtaatccctgctcagaatgctcccagttccctcgtccctgcccaggtctcttgtctcttgggaaggaactgataggtcgggccattgttgggccatcactgagcgctcagtatctcaagagactctgttcattctgctcgtatcccaaggcctggttggtcaaactctgggcaaagggttttcaggatgaggaggtcaagacaggatctccagagctaccgagttcatctgtgggtgttgggggcaagtgggggctgaagtcctgtgcaggctgcgctggccccacctgccttgtgccctggagtggggtttctccttgttgaagaagaggcatccttctctgatgtgcacaaacacaatgtatgaccagagccttgcaactcaaagtgtggtctgtggaccagcagcggcagtgacacctgggagcttgttaggaatgcagagtctaggcctcaccctatacctcccgactcagaccctgcattttagcaagacccccagctgattcctataagcactttagagtttgagaagcaaggacctaggctggggatgtcctccgagcagagggtgaagtttctctcagttctctccctgccacttccagggatctgagcctgtgctcagcctcctccctaacccaccctgggagacacttggcctgttagattgttccagagtctgcatggcactcctgaagaagggagtgtgacctgcagtcaccaggagatgagggttaggtgtgcccagccctccagacccggcctttctggttaacccctgcatgccaagctgcctgctgccccaggtcctcacctcaggcctttgaaggggcagcttctggaagttgttttctcctctgcttggagagtttgcccttgtctgtcttggaaagtgtgggcagccacagatgcccccaaatcagagctcacagtgagtgagcccctaagcttcagtctgcaataaagaatgcattggtttcatctgc

SEQ ID NO: 147977 - DNA, 663 bp, Homo sapiens
  Payload ID: 9285
  Gene Symbol: LRRC20
  Gene Name: leucine rich repeat containing 20
  ENST ID: ENST00000446961
  CDS Start-End: 140-663
ggaactcgcctggggcgccgccggcggcggagggagcgtgactgcgctgcgcagggcgctaggaggcattgtcgccgctcaggcccttttgtgagaagcagaccagcctgggggctggcggcaggacacctgtgtctgcatgctgaagaagatgggtgaggccgtggccagagtagcaaggaaggtcaacgagacggtggagagcggctctgacactctggacctggccgagtgcaagctggtctcctttcccattggcatctacaaggtcctgcggaatgtctctggccagatccacctcatcaccctggctaacaacgagcttaagtccctcaccagcaagttcatgaccacattcagtcagctccgagagctccacctggaggggaacttcctacaccgcctccccagcgaggtcagtgccctgcagcacctcaaggccattgacctgtcccggaaccagttccaggacttccctgagcagcttaccgccctgccggcgctggagaccatcaacctggaggagaacgagatcgtagatgtgcccgtggagaagctggccgccatgccagccttgcgcagcatcaacctccgcttcaacccactcaacgccgaggtgcgcgtgatcgccccgccgctcatcaagtttgacatgctcatgtc

SEQ ID NO: 147978 - DNA, 1615 bp, Homo sapiens
  Payload ID: 9286
  Gene Symbol: LRRC23
  Gene Name: leucine rich repeat containing 23
  Uniprot ID: Q53EV4
  ENST ID: ENST00000007969
  CDS Start-End: 221-1252
agccccgccccctctcttctcgcttctcagccctgcccacttctttttgtcctcagccaattagcggcccaacgccccttccgcgcctcatccgggttcccgggacgggaaagtggcgtggtaaccaggcaactactgatcaatcccctccccggctgatttgcgcatcaggaggaggactgagcttatctgactccagagctttcaggagggaagaaagatgtcagatgaagatgatctagaagactctgagccagaccaggatgattctgagaaagaagaggacgagaaggagacagaggagggggaggactacagaaaagagggggaagagttccctgaggaatggctgcccacccccctcacggaggacatgatgaaggaagggctttctctgctctgtaagacaggcaatgggctggctcatgcttatgtcaagctggaggttaaagagagggacctgacagacatctacttgctgcgctcctacatccatctgcgctatgtggatatttctgagaaccacctgacagacctgtctccactcaactacctcacccacctgctctggctcaaggctgatggcaatcggctgcgaagtgcccagatgaatgaactgccctacctgcagattgctagttttgcttataaccagattactgacactgaaggcatctctcatcctcgtcttgaaaccctgaatctcaaagggaacagcatccacatggtgacaggtctggaccccgagaagttgatcagcctgcacacagtggagcttcgggggaaccagctggaaagcaccctgggaatcaatcttcctaagctgaagaacctctacctggcccaaaacatgctgaagaaggtggaaggcttggaggatctgagcaatctcaccaccttgcatcttcgagacaaccagattgacaccctgagtggcttctccagagaaatgaaatcattgcagtacctcaacctgaggggcaacatggtggccaacctgggggagctggccaagcttcgagacctgcccaagctgcgagcgttggtgctgcttgataacccatgcacggacgaaaccagctaccgccaggaggccctggtgcagatgccataccttgaacgcctggacaaggaattctatgaggaggaggaacgggctgaggctgatgtgattcgacagaggctgaaggaagaaaaggagcaggagcctgagccccagcgtgacctggaacccgaacagtcattgatctagcagcagttctagcctctaaagatagagatcaaagacgctggccttcagacctgatcagactcccaggggcagccaccacatgtatgacagagaacagaggatgcctgtttttgccccaaagctggaaattcatcacaacctgaggcccaggatctgctctgtgccggtcctctgggcagtgtggggtgcagaatggggtgcctaggcctgagcgttgcctggagcctaggccgggggccgccctcgggcaggcgtgggtgagagccaagaccgcgtgggccgcggggtgctggtaggagtggttggagagacttgcgaaggcggctggggtgttcggatttccaataaagaaacagagtgatg

SEQ ID NO: 147979 - DNA, 1208 bp, Homo sapiens
  Payload ID: 9286
  Gene Symbol: LRRC23
  Gene Name: leucine rich repeat containing 23
  Uniprot ID: Q53EV4
  ENST ID: ENST00000323702
  CDS Start-End: 113-1051
gaaagtggcgtggtaaccaggcaactactgatcaatcccctccccggctgatttgcgcatcaggaggaggactgagcttatctgactccagagctttcaggagggaagaaagatgtcagatgaagatgatctagaagactctgagccagaccaggatgattctgagaaagaagaggacgagaaggagacagaggagggggaggactacagaaaagagggggaagagttccctgaggaatggctgcccacccccctcacggaggacatgatgaaggaagggctttctctgctctgtaagacaggcaatgggctggctcatgcttatgtcaagctggaggttaaagagagggacctgacagacatctacttgctgcgctcctacatccatctgcgctatgtggatatttctgagaaccacctgacagacctgtctccactcaactacctcacccacctgctctggctcaaggctgatggcaatcggctgcgaagtgcccagatgaatgaactgccctacctgcagattgctagttttgcttataaccagattactgacactgaaggcatctctcatcctcgtcttgaaaccctgaatctcaaagggaacagcatccacatggtgacaggtctggaccccgagaagttgatcagcctgcacacagtggagcttcgggggaaccagctggaaagcaccctgggaatcaatcttcctaagctgaagaacctctacctggcccaaaacatgctgaagaaggtggaaggcttggaggatctgagcaatctcaccaccttgcatcttcgagacaaccagattgacaccctgagtggcttctccagagaaatgaaatcattgcagtacctcaacctgaggagatcaaagacgctggccttcagacctgatcagactcccaggggcagccaccacatgtatgacagagaacagaggatgcctgtttttgccccaaagctggaaattcatcacaacctgaggcccaggatctgctctgtgccggtcctctgggcagtgtggggtgcagaatggggtgcctaggcctgagcgttgcctggagcctaggccgggggccgccctcgggcaggcgtgggtgagagccaagaccgcgtgggccgcggggtgctggtaggagtggttggagagacttgcgaaggcggctggggtgttcggatttccaataaagaaacagagtgat

SEQ ID NO: 147980 - DNA, 1628 bp, Homo sapiens
  Payload ID: 9286
  Gene Symbol: LRRC23
  Gene Name: leucine rich repeat containing 23
  Uniprot ID: Q53EV4
  ENST ID: ENST00000443597
  CDS Start-End: 220-1251
agtcgccgctctactctcaacggtggcgagctgcagttgccaagtgccccgtccccgttgccataacagcagtacacaacccctccttcccctcgcccgcttgctaaacagtccttccctctcgggaccaagggcctctccagaactgcttctgattgagcagaaacagggaggaggactgagcttatctgactccagagctttcaggagggaagaaagatgtcagatgaagatgatctagaagactctgagccagaccaggatgattctgagaaagaagaggacgagaaggagacagaggagggggaggactacagaaaagagggggaagagttccctgaggaatggctgcccacccccctcacggaggacatgatgaaggaagggctttctctgctctgtaagacaggcaatgggctggctcatgcttatgtcaagctggaggttaaagagagggacctgacagacatctacttgctgcgctcctacatccatctgcgctatgtggatatttctgagaaccacctgacagacctgtctccactcaactacctcacccacctgctctggctcaaggctgatggcaatcggctgcgaagtgcccagatgaatgaactgccctacctgcagattgctagttttgcttataaccagattactgacactgaaggcatctctcatcctcgtcttgaaaccctgaatctcaaagggaacagcatccacatggtgacaggtctggaccccgagaagttgatcagcctgcacacagtggagcttcgggggaaccagctggaaagcaccctgggaatcaatcttcctaagctgaagaacctctacctggcccaaaacatgctgaagaaggtggaaggcttggaggatctgagcaatctcaccaccttgcatcttcgagacaaccagattgacaccctgagtggcttctccagagaaatgaaatcattgcagtacctcaacctgaggggcaacatggtggccaacctgggggagctggccaagcttcgagacctgcccaagctgcgagcgttggtgctgcttgataacccatgcacggacgaaaccagctaccgccaggaggccctggtgcagatgccataccttgaacgcctggacaaggaattctatgaggaggaggaacgggctgaggctgatgtgattcgacagaggctgaaggaagaaaaggagcaggagcctgagccccagcgtgacctggaacccgaacagtcattgatctagcagcagttctagcctctaaagatagagatcaaagacgctggccttcagacctgatcagactcccaggggcagccaccacatgtatgacagagaacagaggatgcctgtttttgccccaaagctggaaattcatcacaacctgaggcccaggatctgctctgtgccggtcctctgggcagtgtggggtgcagaatggggtgcctaggcctgagcgttgcctggagcctaggccgggggccgccctcgggcaggcgtgggtgagagccaagaccgcgtgggccgcggggtgctggtaggagtggttggagagacttgcgaaggcggctggggtgttcggatttccaataaagaaacagagtgatgctcctgtgtctgac

SEQ ID NO: 147981 - DNA, 1140 bp, Homo sapiens
  Payload ID: 9286
  Gene Symbol: LRRC23
  Gene Name: leucine rich repeat containing 23
  ENST ID: ENST00000431207
  CDS Start-End: 411-599
gatttgcgcatcaggtagtcgccgctctactctcaacggtggcgagctgcagttgccaagtgccccgtccccgttgccataacagcagtacacaacccctccttcccctcgcccgcttgctaaacagtccttccctctcgggaccaagggcctctccagaactgcttctgattgagcagaaacagggtctgagcccctttgctaaggcgaattgagtgggagggttggagactgcgctttaggctggtgtaccagagggcccaaggaaattggcccagtggggagggaaaagtagaagaaatgaatggagcagggattacggatggcgcaatgggagctgagaggagaggaggaggaattggaggaggactgagcttatctgactccagagctttcaggagggaagaaagatgtcagatgaagatgatctagaagactctgagccagaccaggatgattctgagaaagaagaggacgagaaggagacagaggagggggaggactacagaaaagagggggaagagttccctgaggaaggacctgacagacatctacttgctgcgctcctacatccatctgcgctatgtggatatttctgagaaccacctgacagacctgtctccactcaactacctcacccacctgctctggctcaaggctgatggcaatcggctgcgaagtgcccagatgaatgaactgccctacctgcagattgctagttttgcttataaccagattactgacactgaaggcatctctcatcctcgtcttgaaaccctgaatctcaaagggaacagcatccacatggtgacaggtctggaccccgagaagttgatcagcctgcacacagtggagcttcgggggaaccagctggaaagcaccctgggaatcaatcttcctaagctgaagaacctctacctggcccaaaacatgctgaagaaggtggaaggcttggaggatctgagcaatctcaccaccttgcatcttcgagacaaccagattgacaccctgagtggcttctccagagaaatgaaatcattgcagtacctcaacctgaggggcaacatggtggccaacctgggggagctggccaagcttcgagacctgcccaagctgcgagcgttggtgctgcttgataac

SEQ ID NO: 147982 - DNA, 969 bp, Homo sapiens
  Payload ID: 9286
  Gene Symbol: LRRC23
  Gene Name: leucine rich repeat containing 23
  ENST ID: ENST00000428946
  CDS Start-End: 120-308
gggacgggaaagtggcgtggtaaccaggcaactactgatcaatcccctccccggctgatttgcgcatcaggaggaggactgagcttatctgactccagagctttcaggagggaagaaagatgtcagatgaagatgatctagaagactctgagccagaccaggatgattctgagaaagaagaggacgagaaggagacagaggagggggaggactacagaaaagagggggaagagttccctgaggaaggacctgacagacatctacttgctgcgctcctacatccatctgcgctatgtggatatttctgagaaccacctgacagacctgtctccactcaactacctcacccacctgctctggctcaaggctgatggcaatcggctgcgaagtgcccagatgaatgaactgccctacctgcagattgctagttttgcttataaccagattactgacactgaaggcatctctcatcctcgtcttgaaaccctgaatctcaaagggaacagcatccacatggtgacaggtctggaccccgagaagttgatcagcctgcacacagtggagcttcgggggaaccagctggaaagcaccctgggaatcaatcttcctaagctgaagaacctctacctggagatcaaagacgctggccttcagacctgatcagactcccaggggcagccaccacatgtatgacagagaacagaggatgcctgtttttgccccaaagctggaaattcatcacaacctgaggcccaggatctgctctgtgccggtcctctgggcagtgtggggtgcagaatggggtgcctaggcctgagcgttgcctggagcctaggccgggggccgccctcgggcaggcgtgggtgagagccaagaccgcgtgggccgcggggtgctggtaggagtggttggagagacttgcgaaggcggctggggtgttcggatttccaataaagaaacagagtgatg

SEQ ID NO: 147983 - DNA, 796 bp, Homo sapiens
  Payload ID: 9286
  Gene Symbol: LRRC23
  Gene Name: leucine rich repeat containing 23
  ENST ID: ENST00000436789
  CDS Start-End: 98-748
cgggaccaagggcctctccagaactgcttctgattgagcagaaacagggaggaggactgagcttatctgactccagagctttcaggagggaagaaagatgtcagatgaagatgatctagaagactctgagccagaccaggatgattctgagaaagaagaggacgagaaggagacagaggagggggaggactacagaaaagagggggaagagttccctgaggaatggctgcccacccccctcacggaggacatgatgaaggaagggctttctctgctctgtaagacaggcaatgggctggctcatgcttatgtcaagctggaggttaaagagagggacctgacagacatctacttgctgcgctcctacatccatctgcgctatgtggatatttctgagaaccacctgacagacctgtctccactcaactacctcacccacctgctctggctcaaggctgatggcaatcggctgcgaagtgcccagatgaatgaactgccctacctgcagattgctagttttgcttataaccagattactgacactgaaggcatctctcatcctcgtcttgaaaccctgaatctcaaagggaacagcatccacatggtgacaggtctggaccccgagaagttgatcagcctgcacacagtggagcttcgggggaaccagctggaaagcaccctgggaatcaatcttcctaagctgaagaacctctacctggagatcaaagacgctggccttcagacctgatcagactcccaggggcagccaccacatgtatgacagagaacagaggat

SEQ ID NO: 147984 - DNA, 671 bp, Homo sapiens
  Payload ID: 9286
  Gene Symbol: LRRC23
  Gene Name: leucine rich repeat containing 23
  ENST ID: ENST00000429740
  CDS Start-End: 1-609
atgtcagatgaagatgatctagaagactctgagccagaccaggatgattctgagaaagaagaggacgagaaggagacagaggagggggaggactacagaaaagagggggaagagttccctgaggaatggctgcccacccccctcacggaggacatgatgaaggaagggctttctctgctctgtaagacaggcaatgggctggctcatgcttatgtcaagctggaggttaaagagagggacctgacagacatctacttgctgcgctcctacatccatctgcgctatgtggatatttctgagaaccacctgacagacctgtctccactcaactacctcacccacctgctctggctcaaggctgatggcaatcggctgcgaagtgcccagatgaatgaactgccctacctgcagattgctagttttgcttataaccagattactgacactgaaggcatctctcatcctcgtcttgaaaccctgaatctcaaaggagatcaaagacgctggccttcagacctgatcagactcccaggggcagccaccacatgtatgacagagaacagaggatgcctgtttttgccccaaagctggaaattcatcacaacctgaggcccaggatctgctctgtgccggtcctctgggcagtgtggggtgcagaatggggtgcctag

SEQ ID NO: 147985 - DNA, 1387 bp, Homo sapiens
  Payload ID: 9286
  Gene Symbol: LRRC23
  Gene Name: leucine rich repeat containing 23
  ENST ID: ENST00000433346
  CDS Start-End: 479-1171
tcccgggctgtgaccctccccgaggccccgcccccacggcgaaggcccggggcagttaacccttctcttgctgcggcagagtccgcacccgggcaggcccatctcagaattaacgctttgatggcatcaccgcgtcgggaatccctggggatggtgttctccaccgtcaagacctttgagccgcctgagcgactaactcctgcgcccctgaggggacattttattcagaaattaaatcattcagagttccagcactgtcgggggtcatcgggctctgtccaccgccataggcctagcattgtcaccaacggagccatagagggacctcggcccaagctggggcctcttcattgtcgaagaaggcctcttgccagaccaggatctgtgggcgcggccaggctggaggactagggcggtggcagtggccaggaggaggactgagcttatctgactccagagctttcaggagggaagaaagatgtcagatgaagatgatctagaagactctgagccagaccaggatgattctgagaaagaagaggacgagaaggagacagaggagggggaggactacagaaaagagggggaagagttccctgaggaatggctgcccacccccctcacggaggacatgatgaaggaagggctttctctgctctgtaagacaggcaatgggctggctcatgcttatgtcaagctggaggttaaagagagggacctgacagacatctacttgctgcgctcctacatccatctgcgctatgtggatatttctgagaaccacctgacagacctgtctccactcaactacctcacccacctgctctggctcaaggctgatggcaatcggctgcgaagtgcccagatgaatgaactgccctacctgcagattgctagttttgcttataaccagattactgacactgaaggcatctctcatcctcgtcttgaaaccctgaatctcaaagggaacagcatccacatggtgacaggtctggaccccgagaagttgatcagcctgcacacagtggagcttcgggggaaccagctggaaagcaccctgggaatcaatcttcctaagctgaagaacctctacctggtagctcactgggtcagagggtggtgcagggaagagggcactgtcctgggggtcaggatgcctgctttctagtaggctcagctactaacttcatcattatgataataactggtattattatcaagaccatagttggttccagatgctgtggagatacacagccacctagcagggctgataatatataatgtgtggataatacagagataatttaccttgatacaggtagtagcaaaatggaccataattgaggtacaaacatcagtctgtggaaatgttttaggaaaa

SEQ ID NO: 147986 - DNA, 572 bp, Homo sapiens
  Payload ID: 9286
  Gene Symbol: LRRC23
  Gene Name: leucine rich repeat containing 23
  ENST ID: ENST00000415834
  CDS Start-End: 290-572
aaacagtccttccctctcgggaccaagggcctctccagaactgcttctgattgagcagaaacagggtctgagcccctttgctaaggcgaattgagtgggagggttggagactgcgctttaggctggtgtaccagagggcccaaggaaattggcccagtggggagggaaaagtagaagaaatgaatggagcagggattacggatggcgcaatgggagctgagaggagaggaggaggaattggaggaggactgagcttatctgactccagagctttcaggagggaagaaagatgtcagatgaagatgatctagaagactctgagccagaccaggatgattctgagaaagaagaggacgagaaggagacagaggagggggaggactacagaaaagagggggaagagttccctgaggaatggctgcccacccccctcacggaggacatgatgaaggaagggctttctctgctctgtaagacaggcaatgggctggctcatgcttatgtcaagctggaggttaaagagagggacctgacagacatctacttgctgcgctcctacatccatctgcgct

SEQ ID NO: 147987 - DNA, 1412 bp, Homo sapiens
  Payload ID: 9286
  Gene Symbol: LRRC23
  Gene Name: leucine rich repeat containing 23
  ENST ID: ENST00000451681
  CDS Start-End: 163-351
aattagcggcccaacgccccttccgcgcctcatccgggttcccgggacgggaaagtggcgtggtaaccaggcaactactgatcaatcccctccccggctgatttgcgcatcaggaggaggactgagcttatctgactccagagctttcaggagggaagaaagatgtcagatgaagatgatctagaagactctgagccagaccaggatgattctgagaaagaagaggacgagaaggagacagaggagggggaggactacagaaaagagggggaagagttccctgaggaaggacctgacagacatctacttgctgcgctcctacatccatctgcgctatgtggatatttctgagaaccacctgacagacctgtctccactcaactacctcacccacctgctctggctcaaggctgatggcaatcggctgcgaagtgcccagatgaatgaactgccctacctgcagattgctagttttgcttataaccagattactgacactgaaggcatctctcatcctcgtcttgaaaccctgaatctcaaagggaacagcatccacatggtgacaggtctggaccccgagaagttgatcagcctgcacacagtggagcttcgggggaaccagctggaaagcaccctgggaatcaatcttcctaagctgaagaacctctacctggcccaaaacatgctgaagaaggtggaaggcttggaggatctgagcaatctcaccaccttgcatcttcgagacaaccagattgacaccctgagtggcttctccagagaaatgaaatcattgcagtacctcaacctgaggggcaacatggtggccaacctgggggagctggccaagcttcgagacctgcccaagctgcgagcgttggtgctgcttgataacccatgcacggacgaaaccagctaccgccaggaggccctggtgcagatgccataccttgaacgcctggacaaggaattctatgaggaggaggaacgggctgaggctgatgtgattcgacagaggctgaaggaagaaaaggagcaggagcctgagccccagcgtgacctggaacccgaacagtcattgatctagcagcagttctagcctctaaagatagagatcaaagacgctggccttcagacctgatcagactcccaggggcagccaccacatgtatgacagagaacagaggatgcctgtttttgccccaaagctggaaattcatcacaacctgaggcccaggatctgctctgtgccggtcctctgggcagtgtggggtgcagaatggggtgcctaggcctgagcgttgcctggagcctaggccgggggccgccctcgggcaggcgtgggtgagagccaagaccgcgtgggccgcggggtgctggtaggagtggttggagagacttgcgaaggcggctgg

SEQ ID NO: 147988 - DNA, 1061 bp, Homo sapiens
  Payload ID: 9286
  Gene Symbol: LRRC23
  Gene Name: leucine rich repeat containing 23
  ENST ID: ENST00000622489
  CDS Start-End: 221-829
agccccgccccctctcttctcgcttctcagccctgcccacttctttttgtcctcagccaattagcggcccaacgccccttccgcgcctcatccgggttcccgggacgggaaagtggcgtggtaaccaggcaactactgatcaatcccctccccggctgatttgcgcatcaggaggaggactgagcttatctgactccagagctttcaggagggaagaaagatgtcagatgaagatgatctagaagactctgagccagaccaggatgattctgagaaagaagaggacgagaaggagacagaggagggggaggactacagaaaagagggggaagagttccctgaggaatggctgcccacccccctcacggaggacatgatgaaggaagggctttctctgctctgtaagacaggcaatgggctggctcatgcttatgtcaagctggaggttaaagagagggacctgacagacatctacttgctgcgctcctacatccatctgcgctatgtggatatttctgagaaccacctgacagacctgtctccactcaactacctcacccacctgctctggctcaaggctgatggcaatcggctgcgaagtgcccagatgaatgaactgccctacctgcagattgctagttttgcttataaccagattactgacactgaaggcatctctcatcctcgtcttgaaaccctgaatctcaaaggagatcaaagacgctggccttcagacctgatcagactcccaggggcagccaccacatgtatgacagagaacagaggatgcctgtttttgccccaaagctggaaattcatcacaacctgaggcccaggatctgctctgtgccggtcctctgggcagtgtggggtgcagaatggggtgcctaggcctgagcgttgcctggagcctaggccgggggccgccctcgggcaggcgtgggtgagagccaagaccgcgtgggccgcggggtgctggtaggagtggttggagagacttgcgaaggcggctggggtgttcggatttccaataaagaaacagagtgatgctcctgtgtctg

SEQ ID NO: 147989 - DNA, 1758 bp, Homo sapiens
  Payload ID: 9287
  Gene Symbol: LRRC24
  Gene Name: leucine rich repeat containing 24
  Uniprot ID: Q50LG9
  ENST ID: ENST00000529415
  CDS Start-End: 119-1660
ctgctcgggcccggccgccacctgcacggcgggggagccgctcgccgcgggagcgtcaggagggcacgcgtctgcggctgaaccgcggaagggccggtgaggaaccgggcctcgggagatggccctgagggcccccgcactgctgccgctgctgctgctactactgccgctccgcgccgccggctgcccagcagcctgccgctgctacagcgccacggtggagtgtggcgccctgcggttgcgcgtcgtcccgctgggaatcccgccagggacgcagacactgttcctgcaggacaacaacatcgcccgcctagagccgggagccctggcgccactcgccgctctgcgccggctctacctgcacaacaacagcctgcgcgccctggaggccggcgccttccgcgcgcagccgcgcctgctggagctggcgctcactagcaaccggctgcgcggcttgcgcagcggcgccttcgtaggcctggcccagctgcgcgtgctctacctggcgggcaaccagctggcgcggctgctggatttcaccttcttgcacctgccgcgactgcaggagcttcacctgcaagaaaacagcattgagctgctggaggaccaggctctagcggggctgtcctccctagcactgctggacctcagcaggaaccagctgggcaccatcagccgagaggccctgcagcccctggccagtctgcaagtcctgcgcctcacagagaacccatggcgctgtgactgcgccctgcactggctgggtgcctggatcaaggagggcggccagcggctgctcacctccagggacaggaagatcatgtgtgcagagcccccgcgcctggcgctccagagtctcctggacgtatcccacagcagcctcatctgcattccgccctctgtccacgtgcagccgctggagctcacagccaacctgggtgaggacctgcgggttgcctgccaagcctccggctacccgcagccattggtgacctggagaaaggtgccccagcctcgcgagggccggccgcgagcccaggcccagctagaaggcgggttgctgggcctgggcggacactcggcatccgacacgggcagcggcatgctcttcctcagcaacatcacgctggcgcacgccggtaagtacgagtgcgaggcctccaacgccggcggcgctgcccgcgtgcccttccggctcctggtcaacgcgtcccggcagcagccgcagcagcccgcgcaaccgccgcctccggccgcccgccccgccggcagcgagccccggcccgaggcgggcagcatggccttccgcgccctgggcgtggccacacagacggccattgcggcggccatcgcgctgctggcgctcacggcgctgctcctggtcgccatgatctgtcgccggcgccgcaggcgaaaaaaggcgcgggggcctccgggggagggagcgctgttcgtcaacgactacttggacggcccctgtacgttcgcacagctagaggagctccgcgacgagcgcggccacgagatgttcgtcatcaaccgctccaagccgctcttcgccgagggtccggcggaggcgcccgctgactgcggcccggaacagggggcggggccgggactccgcgtgcccccgccggtcgcctacgagatccactgctagggccgcgggcgcgcggatgacgtgggcgccggagattggccggtgcggcctcgcgcatgctccgtcagtaaaggtggaagccgcgcagtgtgcgctga

SEQ ID NO: 147990 - DNA, 1701 bp, Homo sapiens
  Payload ID: 9287
  Gene Symbol: LRRC24
  Gene Name: leucine rich repeat containing 24
  ENST ID: ENST00000533758
  CDS Start-End: 133-1665
tcccagcccggcgactgctcgggcccggccgccacctgcacggcgggggagccgctcgccgcgggagcgtcaggagggcacgcgtctgcggctgaaccgcggaagggccggtgaggaaccgggcctcgggagatggccctgagggcccccgcactgctgccgctgctgctgctactactgccgctccgcgccgccggctgcccagcagcctgccgctgctacagcgccacggtggagtgtggcgccctgcggttgcgcgtcgtcccgctgggaatcccgccagggacgcagacactgttcctgcaggacaacaacatcgcccgcctagagccgggagccctggcgccactcgccgctctgcgccggctctacctgcacaacaacagcctgcgcgccctggaggccggcgccttccgcgcgcagccgcgcctgctggagctggcgctcactagcaaccggctgcgcggcttgcgcagcggcgccttcgtaggcctggcccagctgcgcgtgctctacctggcgggcaaccagctggcgcggctgctggatttcaccttcttgcacctgccggagcttcacctgcaagaaaacagcattgagctgctggaggaccaggctctagcggggctgtcctccctagcactgctggacctcagcaggaaccagctgggcaccatcagccgagaggccctgcagcccctggccagtctgcaagtcctgcgcctcacagagaacccatggcgctgtgactgcgccctgcactggctgggtgcctggatcaaggagggcggccagcggctgctcacctccagggacaggaagatcatgtgtgcagagcccccgcgcctggcgctccagagtctcctggacgtatcccacagcagcctcatctgcattccgccctctgtccacgtgcagccgctggagctcacagccaacctgggtgaggacctgcgggttgcctgccaagcctccggctacccgcagccattggtgacctggagaaaggtgccccagcctcgcgagggccggccgcgagcccaggcccagctagaaggcgggttgctgggcctgggcggacactcggcatccgacacgggcagcggcatgctcttcctcagcaacatcacgctggcgcacgccggtaagtacgagtgcgaggcctccaacgccggcggcgctgcccgcgtgcccttccggctcctggtcaacgcgtcccggcagcagccgcagcagcccgcgcaaccgccgcctccggccgcccgccccgccggcagcgagccccggcccgaggcgggcagcatggccttccgcgccctgggcgtggccacacagacggccattgcggcggccatcgcgctgctggcgctcacggcgctgctcctggtcgccatgatctgtcgccggcgccgcaggcgaaaaaaggcgcgggggcctccgggggagggagcgctgttcgtcaacgactacttggacggcccctgtacgttcgcacagctagaggagctccgcgacgagcgcggccacgagatgttcgtcatcaaccgctccaagccgctcttcgccgagggtccggcggaggcgcccgctgactgcggcccggaacagggggcggggccgggactccgcgtgcccccgccggtcgcctacgagatccactgctagggccgcgggcgcgcggatgacgtgggcgccggagat

SEQ ID NO: 147991 - DNA, 2415 bp, Homo sapiens
  Payload ID: 9288
  Gene Symbol: LRRC25
  Gene Name: leucine rich repeat containing 25
  Uniprot ID: Q8N386
  ENST ID: ENST00000339007
  CDS Start-End: 655-1572
gctgggtgcagagccagaggaacgccagcgaccccagcagcgctgcggacggtgctggccgtggccgctgcggcccccgtgtccaggtgggccaggacgcagcctctgggcgccgtcgcttttccagcatcgcagaggcaaaagcgtggcagtgggacccaaaaggtaggactgaggctctagaacttgcacctgtgcagggactgcaaaccagacctgggaggaccctttcagcagcccccactccaccctatcccaggacttcccagcgacccgccgttctgggagataccgggagcgtgatcagggggcggggccgtttccaaggcaaccgcttatttgcatagggtcccgtcctggccaacgagggcgccccaaatgttcaggacatagaagaaggggttaactggcccggatctcctcctcgccttccaagcccgctaagcactggggttatctacccattccccagaaggggagactgaggcagcccaccagccaaaggaggcgaccagactggggctgcgttttaccatttcagaagcggcttgagctggtctgagctataataataaacactggcggtggaggcgagggcgaccacagggctgaggtcagggctaggattccggtgtctctacgtaggttgcttgaatggggggcaccctggcatggacgctgctgttgccgctgctgctgcgggagtcagacagcctagaaccgtcgtgcaccgtgtcctccgcggatgtggactggaacgcggagttcagtgccacgtgcctgaatttcagtggcctcagcctgagcctgcctcacaaccagtctctgcgggccagcaacgtgattctccttgacctgtctgggaacggcctgcgagagcttccagtgaccttctttgcccacctgcagaagcttgaggtcctgaacgtgctacgcaaccccttgtctcgtgtggatggggcgctggccgcccgctgtgaccttgacctgcaggccgactgcaactgtgccctggagtcctggcacgacatccgccgagacaactgctctggccagaagcctctgctctgctgggacacaaccagctcccagcacaacctctctgccttcctggaggtcagctgcgcccctggcctggcctctgcaactatcggggcagtggtggtcagcgggtgcctgcttcttggacttgccatcgctggccctgtgctggcctggagactctggcgatgccgagtggccagaagccgggagctgaacaaaccctgggctgctcaggatgggcccaagcccggtttaggcttgcagccacggtacggcagccggagcgcccccaagccccaagtggccgtgccatcctgcccctccactcccgactatgagaacatgtttgtgggccagccagcagccgagcaccagtgggatgaacaaggggctcacccttcagaggacaatgacttttacatcaactacaaggacatcgacctggcttcccagcctgtctactgtaacctgcagtcactgggccaggccccaatggatgaagaggagtacgtgatccccgggcactgagcctaagatgtcctaacctccacccagaaccccttcagtccctgctgggtgactcagggcgtcctaacgcctccatggcctcagtttccccatctgaagaatgggtacaggaaaggattgtccttgaggccccaggaagctctgccgccccctccctgtccctcatgccgctcctcagctccctcagctcctagagggggaagaggagagacccccaacaaggggacaggacggtcactgtgccaatcctgtcatcaccctcctgtggatgtacaggcagtgctcaataaatgcttcgaggctgatgaggctgctggctcagggtgcgtgggttcctcaaggtggggatttctgagttctaagaccaagtctccatctgagactcccaaattgctccccacctcccatccctgtttttttttgttgttgttgtttgtttgtttgtttttgaaactgagtgtcactctgtcacccaggctggagtgcaatgctgcggtctcagctcactgcaacctccgcctcctgggttcaagtgattctcctgcctcagcctcctgagtagctgggattacagcacccgccaccatgccgagctaatttttgtatttataatagagatggggtttcgccatgttggccaggctggtctcgaactcctgacctcaagcgatctgcccgcctcggcctcctgaagtgctgggattacaggcgtggccactgcgcccaggcacattcctcccttctgcccctctcagggccccttcccaggtccctgatctccaggcttggcctccagagcagcccacaccaaccccaaaataaaaaaatgtatatattccttta

SEQ ID NO: 147992 - DNA, 1924 bp, Homo sapiens
  Payload ID: 9288
  Gene Symbol: LRRC25
  Gene Name: leucine rich repeat containing 25
  Uniprot ID: Q8N386
  ENST ID: ENST00000595840
  CDS Start-End: 169-1086
tgcagagccagaggaacgccagcgaccccagcagcgctgcggacggtgctggccgtggccgctgcggcccccgtgtccaggtgggccaggacgcagcctctgggcgccgtcgcttttccagcatcgcagaggcaaaagcgtggcagtgggacccaaaaggttgcttgaatggggggcaccctggcatggacgctgctgttgccgctgctgctgcgggagtcagacagcctagaaccgtcgtgcaccgtgtcctccgcggatgtggactggaacgcggagttcagtgccacgtgcctgaatttcagtggcctcagcctgagcctgcctcacaaccagtctctgcgggccagcaacgtgattctccttgacctgtctgggaacggcctgcgagagcttccagtgaccttctttgcccacctgcagaagcttgaggtcctgaacgtgctacgcaaccccttgtctcgtgtggatggggcgctggccgcccgctgtgaccttgacctgcaggccgactgcaactgtgccctggagtcctggcacgacatccgccgagacaactgctctggccagaagcctctgctctgctgggacacaaccagctcccagcacaacctctctgccttcctggaggtcagctgcgcccctggcctggcctctgcaactatcggggcagtggtggtcagcgggtgcctgcttcttggacttgccatcgctggccctgtgctggcctggagactctggcgatgccgagtggccagaagccgggagctgaacaaaccctgggctgctcaggatgggcccaagcccggtttaggcttgcagccacggtacggcagccggagcgcccccaagccccaagtggccgtgccatcctgcccctccactcccgactatgagaacatgtttgtgggccagccagcagccgagcaccagtgggatgaacaaggggctcacccttcagaggacaatgacttttacatcaactacaaggacatcgacctggcttcccagcctgtctactgtaacctgcagtcactgggccaggccccaatggatgaagaggagtacgtgatccccgggcactgagcctaagatgtcctaacctccacccagaaccccttcagtccctgctgggtgactcagggcgtcctaacgcctccatggcctcagtttccccatctgaagaatgggtacaggaaaggattgtccttgaggccccaggaagctctgccgccccctccctgtccctcatgccgctcctcagctccctcagctcctagagggggaagaggagagacccccaacaaggggacaggacggtcactgtgccaatcctgtcatcaccctcctgtggatgtacaggcagtgctcaataaatgcttcgaggctgatgaggctgctggctcagggtgcgtgggttcctcaaggtggggatttctgagttctaagaccaagtctccatctgagactcccaaattgctccccacctcccatccctgtttttttttgttgttgttgtttgtttgtttgtttttgaaactgagtgtcactctgtcacccaggctggagtgcaatgctgcggtctcagctcactgcaacctccgcctcctgggttcaagtgattctcctgcctcagcctcctgagtagctgggattacagcacccgccaccatgccgagctaatttttgtatttataatagagatggggtttcgccatgttggccaggctggtctcgaactcctgacctcaagcgatctgcccgcctcggcctcctgaagtgctgggattacaggcgtggccactgcgcccaggcacattcctcccttctgcccctctcagggccccttcccaggtccctgatctccaggcttggcctccagagcagcccacaccaaccccaaaataaaaaaatgtatatattc

SEQ ID NO: 147993 - DNA, 1209 bp, Homo sapiens
  Payload ID: 9289
  Gene Symbol: LRRC26
  Gene Name: leucine rich repeat containing 26
  Uniprot ID: Q2I0M4
  ENST ID: ENST00000371542
  CDS Start-End: 109-1113
aatatttgtgcaggcgccgcaggaacgggctccgcggacgacgggctccagggacgcacaggcagcgggcctcccaccgcgggtgccgggggcgggggggctgcccccatgcggggcccttcctggtcgcggcctcggccgctgctgctgctgttgctgctgctgtcgccttggcctgtctgggcccaggtgtcggccacggcctcgccctcggggtccctgggcgccccggactgccccgaggtgtgcacgtgcgtgccgggaggcctggccagctgctcggcactctcgctgcccgccgtgcccccgggcctgagcctgcgcctgcgcgcgctgctgctggaccacaaccgcgtccgtgcgctgccgccaggtgccttcgcgggagcgggcgcgctacagcgcctggacctgcgcgagaacgggctgcactcggtgcatgtgcgagccttctggggcctgggcgcgctgcagctgctggacctgagcgccaaccagctggaagcactggcaccagggactttcgcgccgctgcgcgcgctgcgcaacctctcattggccggcaaccggctggcgcgcctggagcccgcggcgctaggcgcgctcccgctgctgcgctcactcagcctgcaggacaacgagctggcggcactcgcgccggggctgctgggccgcctgcccgctctagacgcgctgcacctgcgcggcaacccttggggctgcgggtgcgcgctgcgcccgctctgcgcctggctgcgccggcacccgctgcccgcgtcagaggccgagacggtgctctgcgtgtggccgggacgcctgacgctcagccccctgactgccttttccgacgccgcctttagccattgcgcgcagccgctcgccctgcgggacctggccgtggtttacacgctcgggccggcctccttcctcgtcagcctggcttcctgcctggcgctgggctctgggctcaccgcctgccgtgcgcgccgccgccgcctccgcaccgccgccctccgcccgccgagaccgccagacccgaaccccgatcccgacccccacggctgtgcctcgcccgcggacccggggagccccgccgctgccgcccaagcctgagcggccgcggccgcctggagcgctcgaagcttcccccatgcctttgccctccctttacactgtctgccggcgtcaacaagcgacacagaccgaaaa

SEQ ID NO: 147994 - DNA, 1809 bp, Homo sapiens
  Payload ID: 9290
  Gene Symbol: LRRC27
  Gene Name: leucine rich repeat containing 27
  Uniprot ID: Q9C0I9
  ENST ID: ENST00000344079
  CDS Start-End: 152-1303
cggcgtctccatggcgaccgcgttggctgggtggcctccattgtcgggctgctgctctcagcggcggggctcgccagcgcttcagtgggcggggacgcggcaggtgactccagaccaaggaggatgagctgctgtccctggaagagaacggatggagggaagcagctcctacgaagttccctctgtggctgctgctgatctggaggagggtgctggtcagactaggagcttgcctgccaccccctccaaagatgttcacaagggtgttggaggcatcatcttttcctcctcaccgattttagacttgagtgaaagtggtctgtgccgtttggaggaggtctttagaatccccagccttcaacaattgcatctgcaaaggaatgccctgtgtgtgattcctcaagatttctttcagttgcttccgaacctgacttggctggacctccggtacaatagaattaaagcgcttccttctgggattggagctcaccagcatttgaaaactttgcttttagaaagaaatcctatcaaaatgttacctgtggagctggggagcgtaaccacgctgaaagcactgaacctaagacactgccctctggaattccctcctcagctcgttgtgcagaagggattggtggctatccagcgcttcctgcggatgtgggcagtagaacactctctccccagaaatccaacttctcaagaggctccaccggttagagagatgaccctccgtgacctcccgagcccaggactggagttgtctggagaccacgcgtctaaccaaggagctgtgaacgctcaggacccagagggggctgtgatgaaagagaaggccagctttctcccacctgtggaaaagccagacctgagtgaactcaggaagtctgcggactcctcagagaactggcccagcgaggaggagatcaggcgcttttggaagctgaggcaggagattgttgagcacgtgaaggcagacgttctgggagatcagctcttgacgagggaattacctccaaatctcaaggcggccttgaacattgagaaagaactaccaaagccaagacacgttttcaggacaagggtccctaggaaacaggctctgcagagactacatgagagaaaaactcgaatcatgggcgtggtagggcgtgcgcctacacatatgggagaaggaagacagcctcctccaggagcatcttacccgacctcttgtcaccgtaccaaatggcgatccgagcaaaaagactggaagagagccgagcggcggcgctccgagagctccaggagaagcaggctctgatggagcagcagagacgagtattccaggccctgacacggtcatcagggaggttcattcttgtgttgctgtgactgccgccagtgccaccaccttgcgaggtgtgttggccgatggactcggtgtcctcagtgtcttctctgtcctccagctccactgaccacctggcttcacccctccctgggccccaggagtccggctggcatggaccacagccacagcacccccgtgcccctcacttggtggttggctttggccagcgggggcccccagcaggaggtcgaggaggaagggagagcgagggcctcgtctttactttcccggcttctttgtgagctgcctggagctggccgagtccagcctctccctccttctgggttccgacaatctctccttccctggtctgtcctgtgggcggctgcagcccggccctgactggcacagggctcttgcaccgcccctgtggctcacctgctccctccccaacatgaataaaccctcctgaagcc

SEQ ID NO: 147995 - DNA, 1765 bp, Homo sapiens
  Payload ID: 9290
  Gene Symbol: LRRC27
  Gene Name: leucine rich repeat containing 27
  Uniprot ID: Q9C0I9
  ENST ID: ENST00000368612
  CDS Start-End: 146-1552
aacttacccatccaaacccaaagaatggactcagagaacagtggaagaaagactttttaatgacggtcttgcaagattgggtgtctgatgggcaggcacacccagcagggttacaacaagccatttatcccctggaaatacagatatggatataaatacatataataatcaattgcatctgcaaaggaatgccctgtgtgtgattcctcaagatttctttcagttgcttccgaacctgacttggctggacctccggtacaatagaattaaagcgcttccttctgggattggagctcaccagcatttgaaaactttgcttttagaaagaaatcctatcaaaatgttacctgtggagctggggagcgtaaccacgctgaaagcactgaacctaagacactgccctctggaattccctcctcagctcgttgtgcagaagggattggtggctatccagcgcttcctgcggatgtgggcagtagaacactctctccccagaaatccaacttctcaagaggctccaccggttagagagatgaccctccgtgacctcccgagcccaggactggagttgtctggagaccacgcgtctaaccaaggagctgtgaacgctcaggacccagagggggctgtgatgaaagagaaggccagctttctcccacctgtggaaaagccagacctgagtgaactcaggaagtctgcggactcctcagagaactggcccagcgaggaggagatcaggcgcttttggaagctgaggcaggagattgttgagcacgtgaaggcagacgttctgggagatcagctcttgacgagggaattacctccaaatctcaaggcggccttgaacattgagaaagaactaccaaagccaagacacgttttcagaaggaagacagcctcctccaggagcatcttacccgacctcttgtcaccgtaccaaatggcgatccgagcaaaaagactggaagagagccgagcggcggcgctccgagagctccaggagaagcaggctctgatggagcagcagagacgagagaaaagggcactgcaggagtggagagagcgagcccagaggatgaggaagaggaaggaagagctcagcaaactcctgcctccgcggaggagcatggtggcatcaaagattccctctgccacagatctgatagataacaggaaagtaccactgaatccgcctggaaaaatgaaaccaagcaaagagaaatcgccacaagcaagtaaagaaatgagtgccctgcaggagagaaatttagaagagaagataaaacagcacgtcctccaaatgcgtgagcaaagaagattccatggccaggccccactggaggagatgaggaaggctgccgaggatctggaaattgccacagagctacaggatgaagtattgaagctaaaattgggattaaccttgaacaaagatcgtcgacgggcggccctcactggaaacctttcgcttggcctgccggcagcacagcctcaaaatacattttttaacacaaaatatggagaatcaggaaatgttcgcagataccagtgacaccaggtggctggactgatggagacgtcttcagacaggagccgctcagtcttctttcccgggcgtcgcctcctgtgtggtgccggaagagcgccaggttcagtgttaccctgagggctgatttcgcgcagcctgttgttttccttagacaggtccacgtccctctcctgaggctgtggaagatttcagccgtattaaaagaaaggacactgt

SEQ ID NO: 147996 - DNA, 2113 bp, Homo sapiens
  Payload ID: 9290
  Gene Symbol: LRRC27
  Gene Name: leucine rich repeat containing 27
  Uniprot ID: Q9C0I9
  ENST ID: ENST00000368613
  CDS Start-End: 307-1899
agctcgctgagccctcgaggcgggcggcggcaggaaggtggtgcctcggcccgtcgtgccctgtcgcctagctccagccgcgatgctgaccgcaaaggctgcccttctgaggcctggaatgtgaggcccagagcgtcggacccaactcagcctcgcccggatggggaaatcgaggcagggagcgggggtgggcgtgcgtggggatcccttgaaggcagcctcggaaaccccacggagcctgcgctgcctgggccctgtgtgactccagaccaaggaggatgagctgctgtccctggaagagaacggatggagggaagcagctcctacgaagttccctctgtggctgctgctgatctggaggagggtgctggtcagactaggagcttgcctgccaccccctccaaagatgttcacaagggtgttggaggcatcatcttttcctcctcaccgattttagacttgagtgaaagtggtctgtgccgtttggaggaggtctttagaatccccagccttcaacaattgcatctgcaaaggaatgccctgtgtgtgattcctcaagatttctttcagttgcttccgaacctgacttggctggacctccggtacaatagaattaaagcgcttccttctgggattggagctcaccagcatttgaaaactttgcttttagaaagaaatcctatcaaaatgttacctgtggagctggggagcgtaaccacgctgaaagcactgaacctaagacactgccctctggaattccctcctcagctcgttgtgcagaagggattggtggctatccagcgcttcctgcggatgtgggcagtagaacactctctccccagaaatccaacttctcaagaggctccaccggttagagagatgaccctccgtgacctcccgagcccaggactggagttgtctggagaccacgcgtctaaccaaggagctgtgaacgctcaggacccagagggggctgtgatgaaagagaaggccagctttctcccacctgtggaaaagccagacctgagtgaactcaggaagtctgcggactcctcagagaactggcccagcgaggaggagatcaggcgcttttggaagctgaggcaggagattgttgagcacgtgaaggcagacgttctgggagatcagctcttgacgagggaattacctccaaatctcaaggcggccttgaacattgagaaagaactaccaaagccaagacacgttttcagaaggaagacagcctcctccaggagcatcttacccgacctcttgtcaccgtaccaaatggcgatccgagcaaaaagactggaagagagccgagcggcggcgctccgagagctccaggagaagcaggctctgatggagcagcagagacgagagaaaagggcactgcaggagtggagagagcgagcccagaggatgaggaagaggaaggaagagctcagcaaactcctgcctccgcggaggagcatggtggcatcaaagattccctctgccacagatctgatagataacaggaaagtaccactgaatccgcctggaaaaatgaaaccaagcaaagagaaatcgccacaagcaagtaaagaaatgagtgccctgcaggagagaaatttagaagagaagataaaacagcacgtcctccaaatgcgtgagcaaagaagattccatggccaggccccactggaggagatgaggaaggctgccgaggatctggaaattgccacagagctacaggatgaagtattgaagctaaaattgggattaaccttgaacaaagatcgtcgacgggcggccctcactggaaacctttcgcttggcctgccggcagcacagcctcaaaatacattttttaacacaaaatatggagaatcaggaaatgttcgcagataccagtgacaccaggtggctggactgatggagacgtcttcagacaggagccgctcagtcttctttcccgggcgtcgcctcctgtgtggtgccggaagagcgccaggttcagtgttaccctgagggctgatttcgcgcagcctgttgttttccttagacaggtccacgtccctctcctgaggctgtggaagatttcagccgtattaaaagaaaggacactgtg

SEQ ID NO: 147997 - DNA, 6374 bp, Homo sapiens
  Payload ID: 9290
  Gene Symbol: LRRC27
  Gene Name: leucine rich repeat containing 27
  Uniprot ID: Q9C0I9
  ENST ID: ENST00000368614
  CDS Start-End: 106-1698
ggctgctgctctcagcggcggggctcgccagcgcttcagtgggcggggacgcggcaggtgactccagaccaaggaggatgagctgctgtccctggaagagaacggatggagggaagcagctcctacgaagttccctctgtggctgctgctgatctggaggagggtgctggtcagactaggagcttgcctgccaccccctccaaagatgttcacaagggtgttggaggcatcatcttttcctcctcaccgattttagacttgagtgaaagtggtctgtgccgtttggaggaggtctttagaatccccagccttcaacaattgcatctgcaaaggaatgccctgtgtgtgattcctcaagatttctttcagttgcttccgaacctgacttggctggacctccggtacaatagaattaaagcgcttccttctgggattggagctcaccagcatttgaaaactttgcttttagaaagaaatcctatcaaaatgttacctgtggagctggggagcgtaaccacgctgaaagcactgaacctaagacactgccctctggaattccctcctcagctcgttgtgcagaagggattggtggctatccagcgcttcctgcggatgtgggcagtagaacactctctccccagaaatccaacttctcaagaggctccaccggttagagagatgaccctccgtgacctcccgagcccaggactggagttgtctggagaccacgcgtctaaccaaggagctgtgaacgctcaggacccagagggggctgtgatgaaagagaaggccagctttctcccacctgtggaaaagccagacctgagtgaactcaggaagtctgcggactcctcagagaactggcccagcgaggaggagatcaggcgcttttggaagctgaggcaggagattgttgagcacgtgaaggcagacgttctgggagatcagctcttgacgagggaattacctccaaatctcaaggcggccttgaacattgagaaagaactaccaaagccaagacacgttttcagaaggaagacagcctcctccaggagcatcttacccgacctcttgtcaccgtaccaaatggcgatccgagcaaaaagactggaagagagccgagcggcggcgctccgagagctccaggagaagcaggctctgatggagcagcagagacgagagaaaagggcactgcaggagtggagagagcgagcccagaggatgaggaagaggaaggaagagctcagcaaactcctgcctccgcggaggagcatggtggcatcaaagattccctctgccacagatctgatagataacaggaaagtaccactgaatccgcctggaaaaatgaaaccaagcaaagagaaatcgccacaagcaagtaaagaaatgagtgccctgcaggagagaaatttagaagagaagataaaacagcacgtcctccaaatgcgtgagcaaagaagattccatggccaggccccactggaggagatgaggaaggctgccgaggatctggaaattgccacagagctacaggatgaagtattgaagctaaaattgggattaaccttgaacaaagatcgtcgacgggcggccctcactggaaacctttcgcttggcctgccggcagcacagcctcaaaatacattttttaacacaaaatatggagaatcaggaaatgttcgcagataccagtgacaccaggtggctggactgatggagacgtcttcagacaggagccgctcagtcttctttcccgggcgtcgcctcctgtgtggtgccggaagagcgccaggttcagtgttaccctgagggctgatttcgcgcagcctgttgttttccttagacaggtccacgtccctctcctgaggctgtggaagatttcagccgtattaaaagaaaggacactgtgagcacgtggtctcgccttcccttcttcctgcaggttcccgccaagccatgtgacagagtgctcacactcaggcacttgcctctctcctgtcctggagcccttgttacaaaagtactcacagctttccttcacttagttatttgagtgtgggagaggagaccaggtcacccgattcccgccaagccggaagtccctgcagcaccacctttggctaggagggaggggtgacagccaaaaagggcttcgggggagtggttaccctgctccctgcccagtgacaagccctcctttcccctgggggccctcctttcccctgctccctgcccagctacggggccctcctttcagccttgaccccttcctggttgctaccactcaggctgccactcagtggactccaccccagggacacggcagggtctgcagacctccccatgctagatcagccgtatttcatgctctgtctgcccaggctgtgtagattctgtgtgacttagtctcttgtgctgagtgtttgcttggatcttgaaaacatctttggtttgatttctttaacagaggtgagactattcagactttgtttatttttgtgttaattttggtaaatatggtttcagtgagtttcctcatttcatccaagttgtgcaatgtatcagcataaagttcctcttattttcagtatctttaggatccgtaataatgtcccctcttttattcttgacctggtgttcttcatcattcttgctatggatttatcaattttgttcctcttttccaaaagccccaggttttggcttcactggatttgctgtttgtcttctgtctcatgggtctctgcgccctgcacttcgtactttccgagagtttaactggtgcttagagagaaatgcatcacttccaaacccatgtattagagaagaagggcgtgaaatttatcacctaagctttccattcaggaagctagaaaaggtgtcagtgacctgttgcggcccagcggctggagcagcagacgtttgccatttctcacgcctgagggcaggcgttggagcagctcagccggcgttgctggtcagggtctcccgtgaggctggagtcagccgtgggttgagctgctctcctctgaaggtttaactgggcttggggctcagcttccaaggtgctcacctggttgttgatcagagagcgtgtccgttgtgatcccagtcctttgaaactgtgaagcctcgccccgcggcctgccgcaggatatgttttggtaaatgtagactgtgcacttgagaagaatgtattttgagttgttgggtacattgttttgtgtgtgtcaggtgacattgactaatcctgttgctcagagctcctgtacccttactgactgacttaagcctggtttctcagttactgagagaggcctgtgaacagttctagctatgatcatgaacatgtgttttcttcttagttatgtgagtttttgctatacgtgttttggggctattttgtcagatgcctacaaatttaggattgttttatcttcctgtcgaactgaccttgtcattattatgaactatttctcttcgcctctccttttcacttcttgccttctgtggattttgtctgatactaatccaggcacactgctgctgttttggtcagcgttttcataatgcatcttcttccctccttctactgtactggatttaaagcgcaccttatagagacatcatatactcgggactccttttctttctctagctgccagttctgtgtttcagttacagtgtttggccctcacatttaaggtgcgtgtgcgtacggcggattccgtgcccatctcatgtttttattccctttattcttcttttgctgctttctgatagtgatcaatttttttatttatatctcttgtattagagttttagtaatatcttttaatattattctcttgggtgttgccttagagatttcatacatgcccttgagttcattagcatttcctgaatgagccaatgaccctgagaaggtccctcccatctgccagttccctgccattgatgctgttgctctcgtccgcctcccttccacaggtaagcacgcaagacacaggtaccgtgtgccccaacggtgtcttgactcgctgttcctagacatcagtgtttgcttcactttacccatcccgatgctcttccttcctgcagcttcatgctccaatgagggctgattttcatttagctaaataacttttttttaagtatttctttgtatcatggttatgctttgactggccgtaagttctctcagcttttgtttgtctgaaaataaatttagttcgcctttattctgcacaggacagaattctaggtggatgatttttgccattcccagaactttaaagatgggctccactgtcttctggctcccatgtgttttgttaaaaattcagtgttcaggccgggtgctgtggctcacgcctgtaatcccagcactttgggaggccgaggcgagtggatcacgaggtcaggagatcgagaccatcctggctaacacggtgaaaccccgtctctactaaaaaatacaaaaaattagccgggcgtggtggctgtagtcgcagctactcaggaggctgaggcgggagaatggcgtgaacccaggagacggagcttgcagtgagccgagatcgcgccactgcactccagcctgggcgacagagcgagactccgtctcaaaaaaaaaaaaaaaagattcaatgttcattgttatttgttgctcctttgaaggtaatgggtcttttttctttgtcttaaaattgtttctccttatctttggttttcagcagtctgtgctgtgcctggatgtaattttctttttacgtatttttcttggaatatacagaactcaaatctgggagttagcatctttcatcagttttggaaaattcttagccattttttttttttttactattttttcccctgttctccctcttctccctgagacttcagttttgtgtgtgtgtgcacatgtgtgtatgcattcgtgcgtacgagtgtgtgcatgtgtgcgcccgtgtgtatgtgcatatgtgagtgtgtgtggctgtaacctgcacgtctcttctgtcatgtgttctatttttcattcctctctgtacatcaggctagatgcctcctgtctacgtggttttagatttacgaatcctgtcttctgttgtgtcccacagaaaaacccatgaggttttttaacattaaaaacagcagctttatgatagagaaaaaaacacaaacatagacgattgtaccattgcactcagaagaaacatcccaggccctgagcagcgtgtctttcctcggccgagtcaggcttcctggtgagcctcagggagtgcatggtctcagatgccatccttctcttctccagcatttccactcacctccgtgttcttggggagtgcgtggtgtcagatcccatcctgctcctctccagagtttccggtcacctccgtgttctcagggagtgcgtggtcttggatgccatcctgctcatctccagcatttcctctcacctccgtgttctcggggagtgcgtggtgtcagatcccatcctgctcatctccagcatttcctctcacctctgtgttctcggggagtgcgtggtgtcagatcccatcctgctcctctccagcatttcctctcacctccgtgttctcggggagtgcgtggtgtcagatcccatcctgctcctctccagagtttcctctcacctccgtgttctcggggagtgcgtggtctcagatcccatcctgctcctctccagagtttcctctcacctccgtgttctcagggagtgcgtggtcttggatgccatcctgctcatctccagcatttcctctcacctccgtgttctcggggagtgcgtggtgtcagatcccatcctgctcctctccagcatttcctctcacctccgagctctcggggagtgcgtggtctcagatcccatcctgctcctctccagagtttcctctcacctccgtgttctcgttctcatctctgccggaattccacatctgctcgtgcatgccatccaccttttccactagatccttttacatcatcattataatgatttttttttaataagtgttttctttcagttttaaatttcagatgttgtgtttttcaggtctaaggtgtctggtaattttttgtggatgccgattctctgttgaaattctccatcttttcatttcctttatatctcttttcttcttttttctataatatattacatttttctaataagtttttagtgagtgtccagcattgtataagttgacccttgaacaagagtttgaattataagggtccacttataagtggatttttaaaaaaatatatattgcaaaaatttttggaaatttgcaacaatttgaaaaactttgcagatgagccacatagcctagaaatatctg

SEQ ID NO: 147998 - DNA, 1738 bp, Homo sapiens
  Payload ID: 9290
  Gene Symbol: LRRC27
  Gene Name: leucine rich repeat containing 27
  Uniprot ID: Q9C0I9
  ENST ID: ENST00000625755
  CDS Start-End: 151-1302
ggcgtctccatggcgaccgcgttggctgggtggcctccattgtcgggctgctgctctcagcggcggggctcgccagcgcttcagtgggcggggacgcggcaggtgactccagaccaaggaggatgagctgctgtccctggaagagaacggatggagggaagcagctcctacgaagttccctctgtggctgctgctgatctggaggagggtgctggtcagactaggagcttgcctgccaccccctccaaagatgttcacaagggtgttggaggcatcatcttttcctcctcaccgattttagacttgagtgaaagtggtctgtgccgtttggaggaggtctttagaatccccagccttcaacaattgcatctgcaaaggaatgccctgtgtgtgattcctcaagatttctttcagttgcttccgaacctgacttggctggacctccggtacaatagaattaaagcgcttccttctgggattggagctcaccagcatttgaaaactttgcttttagaaagaaatcctatcaaaatgttacctgtggagctggggagcgtaaccacgctgaaagcactgaacctaagacactgccctctggaattccctcctcagctcgttgtgcagaagggattggtggctatccagcgcttcctgcggatgtgggcagtagaacactctctccccagaaatccaacttctcaagaggctccaccggttagagagatgaccctccgtgacctcccgagcccaggactggagttgtctggagaccacgcgtctaaccaaggagctgtgaacgctcaggacccagagggggctgtgatgaaagagaaggccagctttctcccacctgtggaaaagccagacctgagtgaactcaggaagtctgcggactcctcagagaactggcccagcgaggaggagatcaggcgcttttggaagctgaggcaggagattgttgagcacgtgaaggcagacgttctgggagatcagctcttgacgagggaattacctccaaatctcaaggcggccttgaacattgagaaagaactaccaaagccaagacacgttttcagaaggaagacagcctcctccaggagcatcttacccgacctcttgtcaccgtaccaaatggcgatccgagcaaaaagactggaagagagccgagcggcggcgctccgagagctccaggagaagcaggctctgatggagcagcagagacgtcctttcctcctcattttccctagagtattccaggccctgacacggtcatcagggaggttcattcttgtgttgctgtgactgccgccagtgccaccaccttgcgaggtgtgttggccgatggactcggtgtcctcagtgtcttctctgtcctccagctccactgaccacctggcttcacccctccctgggccccaggagtccggctggcatggaccacagccacagcacccccgtgcccctcacttggtggttggctttggccagcgggggcccccagcaggaggtcgaggaggaagggagagcgagggcctcgtctttactttcccggcttctttgtgagctgcctggagctggccgagtccagcctctccctccttctgggttccgacaatctctccttccctggtctgtcctgtgggcggctgcagcccggccctgactggcacagggctcttgcaccgcccctgtggctcacctgctccctccccaacatgaataaaccctcctgaagcca

SEQ ID NO: 147999 - DNA, 5971 bp, Homo sapiens
  Payload ID: 9291
  Gene Symbol: LRRC28
  Gene Name: leucine rich repeat containing 28
  Uniprot ID: Q86X40
  ENST ID: ENST00000301981
  CDS Start-End: 241-1344
cccgctccctcttccccagctccctctggcgcgggttccgctccacccccggagccccgcccccgacgcccggcgctccgccccgccctcgcctggctccctgccccgccccgcccgccgtcccccgcttggcttccagcgccgcttgcgctccggagcgctggctctgctggcgctgagaaatggaccaattttgacaagatatagtgctgcagcgtgcctgatgggatatattcagtcatggcgtccgaactttgtaagacgatctctgtggcaaggctagaaaagcacaagaatttgttcttaaattataggaatctgcaccattttccattggagttactgaaagatgagggactgcagtacttggagagactctatatgaaaaggaactccctgacatccttgccagaaaaccttgctcagaagcttccaaaccttgtggaactatacctgcactcaaataacatagttgtggttccggaagccattgggtctcttgtaaaactccaatgtctggatcttagtgacaatgccttagaaattgtttgcccagaaattggtcgtctgagagctttacgtcatcttcgattagctaataaccaactgcaattcctacctccagaggttggcgatttgaaggagctgcagacactagacatttctaccaatcgtttgctaactttacccgagaggcttcacatgtgcctttctctgcagtacctcactgtggaccgaaatcgtctatggtatgtgccgcgccatctctgccagctgcccagcctcaatgagctctccatggctggaaaccgtcttgcatttttgccacttgatttaggtcgatctcgagaactacagtatgtatacgtggataacaacattcacctgaaaggcttgccatcttatctgtacaataaagtcatcgggtgcagtggctgtggtgctcccattcaagtttccgaggtgaagctgctttccttttcatcagggcagcgaaccgttttcctcccagctgaggtgaaggccatagggacggagcatgatcacgtcctccctctgcaggaattggctatgagagggctgtatcatacctaccacagcttgctgaaagatttgaactttctgtctccaatctcattacccagaagtctcctagagctgctgcactgccctctggggcactgtcatcggtgtagtgagcctatgtttaccatcgtctaccccaagctctttcccttgagagagacgccaatggcagggctgcaccagtggaagacaactgttagttttgtggcttactgctgctccacccagtgtctgcagacttttgacctgctgagttgataaacactcaagaacctcaggagcgctgccagcttgacactggggaatccagccagtccagcacactcttccatcctgtcctgtccaatgcgggggcactgcagaactctctagaaatgtcatgattgagcttcagagctaaaatgccttcacccttcccccaagttggaatatatcctcccccaaattaaggacccatttgtcttctgtgtttttcctttttatgtgagtgtgtcttttacagaaaccatttagattgatgggcctccccaaatctaatttaaagcaagtttccggtccttggagaacagtgacttgatcatctagccagattcccttttgaacacacataccttcagtgatgcttcctctcctctcccctcccttgctttccccagagagttatttccctgagaccatgttctccacagtgtctccagtggaaacttgtcagtttttgaggagtttcagcaaaccccgtggcctcaatggtcttgagtagcagggtggggcgcctgagttggcagcaaagtgaggctcccatggaggctcagtgagggtcccagagcacacaccctctggaaagttccagccttgtttatacgttctacagtgtagcaacagacttttgtgagggattttaaaaacaaaaatgtagattgtaatgaaatacacttcctgttttttaaaagtgtttgcagaaaaatgatttttgaagtttttaaatttcctgataagattttttttatatgagaagaatttgaggaatatttgaagctttacaagatctgatttttttctttctcaatataaagtttccatacaatgagaaagggggagaaaacacacattgaaataagacctccgtgttcttttttgatgggtttatgattcagtttatactgactttgaaatatttttgtcacatgtgaaaggcttcagctacttccactactggtttttttttgttgttgttgagacggagtctcgctctgtcgcccaggctggagtgcagtggcgggatctcggctcactgcaagctccgcctcccgggttcacgccattctcctgcctcagcctcccaagtagctgggaccacaggcgcccgccaccacgcccggctaattttttgtatttttagtagagacggggtttcaccgtgttagccgggatggtctcgatctcctgacctcgtgatccgcacgcctcggcctcccaaagtgctgggattacaggcgtgagccaccgcgcccggcccactactggtttttaacaggatgattcaaagtacagcccgtgcacatttacttcgtcacctggtgcaccacactgtcttcatgttggccctcgtttcttgtatacttagcttactgcccagatgcaactgagaaaatacaggaaaagcaggtccaaattcagccttcgacttctgcaaaagtccataaacagaaagtctgtgagcctccaccctgccagaaagaactcttcatgaagaagtcacgtatttgctcttcctttcaaaggatggcattttaatgttgctttgctgccagatgttcatctgcttgctgtgaagtgattctttttttaaaatgttttttaatgatgtaagttttctaaaaggcagggctgaatggagaaccaagaatttgcttggtagaaaaattatttttttttaatttcagacttatcaaaaatttggttgagggaatttttattagctgccctgactttataatgctacgctcttaacagtgccaaaaatcctacatagttactgacaaatgtgtgatctttttacagtcacaacacctgctgcccggaaagcacaccgtccacgtagaatggagaaggcagaaagttaccgtgtgttcccactgtatctgcactgttcttacttcctcttgtcccttttcatatcttggtctattcagccttaacatttcaaaggcttatagtaaaataggaactgaagatctgtatcaaaatgtaacactttcatcctttggaataattgaagtttaacataacctctacatgtatataagttagctggtgaaaatgtggcatgaaacttcacaattgtgcttcaggcctaagtgactgctacctatgatttaagtgacagtaaatgtcttgctacatttttctatttcatcctctacaatcatatgtcatggaatggagctatgaaatgtgctaacttggtattcaggattctcattgtgataaggtgatacattagttttaccttgtttgaaattttacaaaaatgcttacaatccaggcattctttctctacctattatgaactacggtgtgttaaacaacagcagtgggctgggcagacaacctttgggcagtctcaaccttaatccttgggtacagcacctgaacttaattgatgagaagtggaacttaagtggtttccctggtgctgttcattatggaaattttatgctggatttatcgatgtcattcttaatcttttgatactataaaggagtcttaccaactggagaaaatttgcctacatgctatatatttgaattgtgtccaaagctttgcagaaaagcaaatctgaagttattatatatgttgttttcttgagcaacagttacactaggtagaaaagtattcacacaataatagtaatgcaaaaaaagtgagctacttggaaagtatcatctctgttcaggtaagtttacttcagtgaactcttgtgtggttagcgataagttttaaagtccaggatagcctcatgagcataggccttcctatgaagtagtgcaaagggggccgattttagtggattaccctatcagtgttcttcagtatgtccaattgttatcataccaaaaaccttaattacataacattgtgtggatgaaatgctgcatcttcagttaatacatgttttgagcacattcttaaaatacataataattaaatgatccctattcaaaagaaccctggcttgggtggaggatccactctggctaacggataagagtgatgaacttctttgttacctgacccttctcttctggaaaagtgaggtgtacattaaacatcttttggtcaccgtgcctcactaagacctttcacattccagcttgtccgactagtgtaatgtacctctcacttctgttttacgttgagcattacgaattaaaatctttacagtctagggggaaaaaaaggcttcaataccagttggcttatgaggctctgcatataattttctctaaaatatgtaactattttgtagtctgtggggactttcaaagccaatttttaaaattagtagtagtaaaggtttttccctttcctgaatgaaaaatcagaaattctaatctttgctataaagtacttaaacacaatacattgcctcagcataaataaaaacatttttattaagatgatttatgaacatggatttctaactggaccaacactaatgttgcaacctgataaaatttgagatgtaaattcatttcacagactcataaacacactctctttaagactcttctttaaatggatccttacattaccctgcctgttttattatgccttcatttttgtggttttcattcactcctgcttgcttctattgaggttctcctacatttcccagaaactcagtgaatatcttgccttttcttcaaacaaagggggtttttataaagtttgtatttttgaaactagctctatgtctatctaaaaatcaagtctcggcagtggctcatgcctataatcccagcactttgggaggccgaggagggcagatcatctgaggtcaggagtttgagaccagcctggccagcatggtgaaaccccatctctactaaaaatacaaaaaattagccaggcgtggtggcgcgcacctgcagtcccagctactcgggaggctgaggcaggagaattgcttgaacccggcaggaagaggttgcattgagctgagatcacgccattacactccagcctgggcaacagagcgagactccgtctcaaaaaaaaatcattcaagtttcactgtgcctacagtgaggagctacctccttgtgtcatcagctaatagatctgaaagtgatgccggtgtctctaggaaaggaattgatcatagccaagtgactgacattctctcggtcaggaaaagagcttgcttcacagcctttgaagtatgactgtatgtgtggtccccttgtactttggagacagaaggtactggcagcgagtgtggtggatgggcagaaggtgtagcattcggagattatttctgtatgtaattaagagactttcaagggttagccagacttttttccactcaagtgtggattatctttgctacctgtgttaaagaatatcaggttttgtttcttattgtgatttttgagtctaaatgatccaagatttttaaaatagatacataatgaaatccaggcctctgaaaaattatggcaacattcatttggagtgtggctaaaaactcatactttatccaatttggttgcctctctcagttactgcagtttatagaataattgagcttgaaccatgtgaatgctcagaatgtcaatggtggagtatttattcaagagaaatggctgaatctcgatacgaa

SEQ ID NO: 148000 - DNA, 752 bp, Homo sapiens
  Payload ID: 9291
  Gene Symbol: LRRC28
  Gene Name: leucine rich repeat containing 28
  ENST ID: ENST00000331450
  CDS Start-End: 277-558
ggtgagtagagctgtccgcctcgtcgggtgattcaagtggcgaggctctctgacccggccccccggcggggacgccccagacgtggtcctgccaaagcgtccgggtcgcggcgagtgggacagcggagccgtccgggcctcgggtggccacagctgccgggtcctcctcccactctgcggcccgcggcccctgggacccgagaaccctgataccggaaatggaccaattttgacaagatatagtgctgcagcgtgcctgatgggatatattcagtcatggcgtccgaactttgtaagacgatctctgtggcaaggctagaaaagcacaagaatttgttcttaaattataggaatctgcaccattttccattggagttactgaaagatgagggactgcagtacttggagagactctatatgaaaaggaactccctgacatccttgccagaaaaccttgctcagaagcttccaaaccttgtggaactgaagacaactgttagttttgtggcttactgctgctccacccagtgtctgcagacttttgacctgctgagttgataaacactcaagaacctcaggagcgctgccagcttgacactggggaatccagccagtccagcacactcttccatcctgtcctgtccaatgcgggggcactgcagaactctctagaaatgtcatgattgagcttcagagctaaaatgccttcacccttcccccaagttggaatatatcctcccccaaattaagga

SEQ ID NO: 148001 - DNA, 1235 bp, Homo sapiens
  Payload ID: 9291
  Gene Symbol: LRRC28
  Gene Name: leucine rich repeat containing 28
  Uniprot ID: Q86X40
  ENST ID: ENST00000447360
  CDS Start-End: 98-1036
gcttgcgctccggagcgctggctctgctggcgctgagaaatggaccaattttgacaagatatagtgctgcagcgtgcctgatgggatatattcagtcatggcgtccgaactttgtaagacgatctctgtggcaaggctagaaaagcacaagaatttgttcttaaattataggaatctgcaccattttccattggagttactgaaagatgagggactgcagtacttggagagactctatatgaaaaggaactccctgacatccttgccagaaaaccttgctcagaagcttccaaaccttgtggaactatacctgcactcaaataacatagttgtggttccggaagccattgggtctcttgtaaaactccaatgtctggatcttagtgacaatgccttagaaattgtttgcccagaaattggtcgtctgagagctttacgtcatcttcgattagctaataaccaactgcaattcctacctccagaggttggcgatttgaaggagctgcagacactagacatttctaccaatcgtttgctaactttacccgagaggcttcacatgtgcctttctctgcagtacctcactgtggaccgaaatcgtctatggtatgtgccgcgccatctctgccagctgcccagcctcaatgagctctccatggctggaaaccgtcttgcatttttgccacttgatttaggtcgatctcgagaactacagtatgtatacgtggataacaacattcacctgaaaggcttgccatcttatctgtacaataaagtcatcgggtgcagtggctgtggtgctcccattcaagtttccgaggtgaagctgctttccttttcatcagggcagcgaaccgttttcctcccagctgaggtgaaggccatagggacggagcatgatcacgtcctccctctgcaggaattggctatgagagggctgtatcatacctaccacagcttgctgaaaggaagacaactgttagttttgtggcttactgctgctccacccagtgtctgcagacttttgacctgctgagttgataaacactcaagaacctcaggagcgctgccagcttgacactggggaatccagccagtccagcacactcttccatcctgtcctgtccaatgcgggggcactgcagaactctctagaaatgtcatgattgagcttcagagctaaaatgccttcacccttcccccaagttggaatatatcctcccccaaattaagga

SEQ ID NO: 148002 - DNA, 574 bp, Homo sapiens
  Payload ID: 9291
  Gene Symbol: LRRC28
  Gene Name: leucine rich repeat containing 28
  ENST ID: ENST00000561253
  CDS Start-End: 117-341
ccgcttggcttccagcgccgcttgcgctccggagcgctggctctgctggcgctgagaaatggaccaattttgacaagatatagtgctgcagcgtgcctgatgggatatattcagtcatggcgtccgaactttgtaagacgatctctgtggcaaggctagaaaagcacaagaatttgttcttaaattataggaatctgcaccattttccattggagttactgaaagatgagggactgcagtacttggagagactctatatgaaaaggaactccctgacatccttgccagaaaaccttgctcagaagcttccaaaccttgtggaactgtggaacttgaattgagatacctgcactcaaataacatagttgtggttccggaagccattgggtctcttgtaaaactccaatgtctggatcttagtgacaatgccttagaaattgtttgcccagaaattggtcgtctgagagctttacgtcatcttcgattagctaataaccaactgcaattcctacctccagaggttggcgatttgaaggagctgcagacactagacatttctaccaatcgtttgcta

SEQ ID NO: 148003 - DNA, 744 bp, Homo sapiens
  Payload ID: 9291
  Gene Symbol: LRRC28
  Gene Name: leucine rich repeat containing 28
  ENST ID: ENST00000558861
  CDS Start-End: 235-744
tggctggctaactcgggcgaaacggcgtgtgttttgcctaagactctgccagtgtttgttaccacagctgagaaaatagccttttacaaatgcttttaatatgtagcttatagttctctaatctccagcgttaggaaattggaatgcgtattctactaaattgagtacggggagaaatggaccaattttgacaagatatagtgctgcagcgtgcctgatgggatatattcagtcatggcgtccgaactttgtaagacgatctctgtggcaaggctagaaaagcacaagaatttgttcttaaattataggaatctgcaccattttccattggagttactgaaagatgagggactgcagtacttggagagactctatatgaaaaggaactccctgacatccttgccagaaaaccttgctcagaagcttccaaaccttgtggaactatacctgcactcaaataacatagttgtggttccggaagccattgggtctcttgtaaaactccaatgtctggatcttagtgacaatgccttagaaattgtttgcccagaaattggtcgtctgagagctttacgtcatcttcgattagctaataaccaactgcaattcctacctccagaggttggcgatttgaaggagctgcagacactagacatttctaccaatcgtttgctaactttacccgagaggcttcacatgtgcctttctctgcagtacctcactgtggaccgaaatcgtctatgg

SEQ ID NO: 148004 - DNA, 967 bp, Homo sapiens
  Payload ID: 9291
  Gene Symbol: LRRC28
  Gene Name: leucine rich repeat containing 28
  ENST ID: ENST00000561276
  CDS Start-End: 66-967
cgctggctctgctggcgctgagaaatggaccaattttgacaagatatagtgctgcagcgtgcctgatgggatatattcagtcatggcgtccgaactttccagaaaaccttgctcagaagcttccaaaccttgtggaactatacctgcactcaaataacatagttgtggttccggaagccattgggtctcttgtaaaactccaatgtctggatcttagtgacaatgccttagaaattgtttgcccagaaattggtcgtctgagagctttacgtcatcttcgattagctaataaccaactgcaattcctacctccagaggttggcgatttgaaggagctgcagacactagacatttctaccaatcgtttgctaactttacccgagaggcttcacatgtgcctttctctgcagtacctcactgtggaccgaaatcgtctatggtatgtgccgcgccatctctgccagctgcccagcctcaatgagctctccatggctggaaaccgtcttgcatttttgccacttgatttaggtcgatctcgagaactacagtatgtatacgtggataacaacattcacctgaaaggcttgccatcttatctgtacaataaagtcatcgggtgcagtggctgtggtgctcccattcaagtttccgaggtgaagctgctttccttttcatcagggcagcgaaccgttttcctcccagctgaggtgaaggccatagggacggagcatgatcacgtcctccctctgcaggaattggctatgagagggctgtatcatacctaccacagcttgctgaaagatttgaactttctgtctccaatctcattacccagaagtctcctagagctgctgcactgccctctggggcactgtcatcggtgtagtgagcctatgtttaccatcgtctaccccaagctctttcccttgagagagacgccaatggcagggctgcaccagtggaagac

SEQ ID NO: 148005 - DNA, 793 bp, Homo sapiens
  Payload ID: 9291
  Gene Symbol: LRRC28
  Gene Name: leucine rich repeat containing 28
  ENST ID: ENST00000558471
  CDS Start-End: 140-322
tgccccgccccgcccgccgtcccccgcttggcttccagcgccgcttgcgctccggagcgctggctctgctggcgctgagaaatggaccaattttgacaagatatagtgctgcagcgtgcctgatgggatatattcagtcatggcgtccgaactttgtaagacgatctctgtggcaaggctagaaaagcacaagaatttgttcttaaattataggaatctgcaccattttccattggagttactgaaagatgagggactgcagtacttggagagactctatatgaaaaggaactccctgacatccttgaggttggcgatttgaaggagctgcagacactagacatttctaccaatcgtttgctaactttacccgagaggcttcacatgtgcctttctctgcagtacctcactgtggaccgaaatcgtctatggtatgtgccgcgccatctctgccagctgcccagcctcaatgagctctccatggctggaaaccgtcttgcatttttgccacttgatttaggtcgatctcgagaactacagtatgtatacgtggataacaacattcacctgaaaggcttgccatcttatctgtacaataaagtcatcgggtgcagtggctgtggtgctcccattcaagtttccgaggtgaagctgctttccttttcatcagggcagcgaaccgttttcctcccagctgaggtgaaggccatagggacggagcatgatcacgtcctccctctgcaggaattggctatgagagggctgtatcatacctaccacagcttgctgaaag

SEQ ID NO: 148006 - DNA, 581 bp, Homo sapiens
  Payload ID: 9291
  Gene Symbol: LRRC28
  Gene Name: leucine rich repeat containing 28
  ENST ID: ENST00000558879
  CDS Start-End: 241-423
cccgctccctcttccccagctccctctggcgcgggttccgctccacccccggagccccgcccccgacgcccggcgctccgccccgccctcgcctggctccctgccccgccccgcccgccgtcccccgcttggcttccagcgccgcttgcgctccggagcgctggctctgctggcgctgagaaatggaccaattttgacaagatatagtgctgcagcgtgcctgatgggatatattcagtcatggcgtccgaactttgtaagacgatctctgtggcaaggctagaaaagcacaagaatttgttcttaaattataggaatctgcaccattttccattggagttactgaaagatgagggactgcagtacttggagagactctatatgaaaaggaactccctgacatccttggaagacaactgttagttttgtggcttactgctgctccacccagtgtctgcagacttttgacctgctgagttgataaacactcaagaacctcaggagcgctgccagcttgacactggggaatccagccagtccagcacactcttccatcctgtcctgtccaatgcgggggcact

SEQ ID NO: 148007 - DNA, 1045 bp, Homo sapiens
  Payload ID: 9291
  Gene Symbol: LRRC28
  Gene Name: leucine rich repeat containing 28
  ENST ID: ENST00000559433
  CDS Start-End: 143-328
ccctgccccgccccgcccgccgtcccccgcttggcttccagcgccgcttgcgctccggagcgctggctctgctggcgctgagaaatggaccaattttgacaagatatagtgctgcagcgtgcctgatgggatatattcagtcatggcgtccgaactttgtaagacgatctctgtggcaaggctagaaaagcacaagaatttgttcttaaattataggaatctgcaccattttccattggagttactgaaagatgagggactgcagtacttggagagactctatatgaaaaggaactccctgacatccttgatacctgcactcaaataacatagttgtggttccggaagccattgggtctcttgtaaaactccaatgtctggatcttagtgacaatgccttagaaattgtttgcccagaaattggtcgtctgagagctttacgtcatcttcgattagctaataaccaactgcaattcctacctccagaggttggcgatttgaaggagctgcagacactagacatttctaccaatcgtttgctaactttacccgagaggcttcacatgtgcctttctctgcagtacctcactgtggaccgaaatcgtctatggtatgtgccgcgccatctctgccagctgcccagcctcaatgagctctccatggctggaaaccgtcttgcatttttgccacttgatttaggtcgatctcgagaactacagtatgtatacgtggataacaacattcacctgaaaggcttgccatcttatctgtacaataaagtcatcgggtgcagtggctgtggtgctcccattcaagtttccgaggtgaagctgctttccttttcatcagggcagcgaaccgttttcctcccagctgaggtgaaggccatagggacggagcatgatcacgtcctccctctgcaggaattggctatgagagggctgtatcatacctaccacagcttgctgaaagatttgaactttctgtctccaatctcattacccagaagtctcctagagctgctgcactgccctctggggcactg

SEQ ID NO: 148008 - DNA, 644 bp, Homo sapiens
  Payload ID: 9291
  Gene Symbol: LRRC28
  Gene Name: leucine rich repeat containing 28
  ENST ID: ENST00000558172
  CDS Start-End: 88-644
cggagcgctggctctgctggcgctgagaaatggaccaattttgacaagatatagtgctgcagcgtgcctgatgggatatattcagtcatggcgtccgaactttgtaagacgatctctgtggcaaggctagaaaagcacaagaatttgttcttaaattataggaatctgcaccattttccattggagttactgaaagatgagggactgcagtacttggagagactctatatgaaaaggaactccctgacatccttgtacctcactgtggaccgaaatcgtctatggtatgtgccgcgccatctctgccagctgcccagcctcaatgagctctccatggctggaaaccgtcttgcatttttgccacttgatttaggtcgatctcgagaactacagtatgtatacgtggataacaacattcacctgaaaggcttgccatcttatctgtacaataaagtcatcgggtgcagtggctgtggtgctcccattcaagtttccgaggtgaagctgctttccttttcatcagggcagcgaaccgttttcctcccagctgaggtgaaggccatagggacggagcatgatcacgtcctccctctgcaggaattggctatgagagggctgtatcatacctaccacagcttgctgaa

SEQ ID NO: 148009 - DNA, 703 bp, Homo sapiens
  Payload ID: 9291
  Gene Symbol: LRRC28
  Gene Name: leucine rich repeat containing 28
  ENST ID: ENST00000560236
  CDS Start-End: 1-114
tttcccttgagagagacgccaatggcagggctgcaccagtggaagacaactgttagttttgtggcttactgctgctccacccagtgtctgcagacttttgacctgctgagttgataaacactcaagaacctcaggagcgctgccagcttgacactggggaatccagccagtccagcacactcttccatcctgtcctgtccaatgcgggggcactgcagaactctctagaaatgtcatgattgagcttcagagctaaaatgccttcacccttcccccaagttggaatatatcctcccccaaattaaggacccatttgtcttctgtgtttttcctttttattcacaacacctgctgcccggaaagcacaccgtccacgtagaatggagaaggcagaaagttaccgtgtgttcccactgtatctgcactgttcttacttcctcttgtcccttttcatatcttggtctattcagccttaacatttcaaaggcttatagtaaaataggaactgaagatctgtatcaaaatgtaacactttcatcctttggaataattgaagtttaacataacctctacatgtatataagttagctggtgaaaatgtggcatgaaacttcacaattgtgcttcaggcctaagtgactgctacctatgatttaagtgacagtaaatgtcttgctacatttttctatttcatcctctacaa

SEQ ID NO: 148010 - DNA, 1468 bp, Homo sapiens
  Payload ID: 9292
  Gene Symbol: LRRC29
  Gene Name: leucine rich repeat containing 29
  Uniprot ID: Q8WV35
  ENST ID: ENST00000393992
  CDS Start-End: 426-1097
gttcctcctttgggccactctgtccctttagcttgggggaccgtcctccccttccctatcggccccagaagatagctgccctgtcatctccgcgagaacaggccctctgcccatccccttcccttgaagtggctgtctcctccccgctcagttctggaagatgtccgctccatctcatcgtcccgaaggatgctcacatatattctgagcttcctgcctctgtcagatcagaaagaggcctccctcgtgagttgggcttggtaccgtgctgcccagaatgcccttcgggagcaaccaggccttacctccctggacctcagtggctgctcagaactgactgatggggcgctcttggccgtgagccggggcctgcggcacctgcggcgcctgagcctggggaagctgcagcggctgacagatgcaggatgtacagctctgggtggcctgcaggagctgcagagcctcgacatggccgagggcgggaactggcccaggccctgggctgtatgcacggggctccatcccagctggcctccctcagcctggcccactgctcttcattgaagtcacgcccagagctggagcatcaggcctcaggtaccaaggacgcctgtccagagccacagggcccctccctgctcacgctgcgggccctgcaggagttggacctcacagcctgcagcaagctgactgatgccagtttagccaaggtgctccagtttctccagctgaggcagctgtcccttagcctgttgccagaactcacagacaacggcttggttgctgtggccaggggctgtcctagcctggagcacttggcgctgagtcactgcagccgactcagtgacaagggctgggcccaggcagccagctcctggccaaggctgcagcatctcaacctgtccagctgcagtcagctcatagagcagacactggatgctattgggcaggcgtgcaggcagctccgggtgttggatgtggccacgtgccctggcatcaacatggccgccgtcagacgcttccaagcccagctgccccaggtgtcctgtgtccagtcccgcttcgtgggaggggctgacctgaccctaacactctgaggccagaccctctaggactgggggtggggccaatccagggcagcccagagggaacatcctgccacaccgcctggcagtagcctctttccagctacacgtcgctgccacaggcccctggaaatgctacctacgtgttgccgccacaggctcctgctctctggccaagccctgggtgggaggccaggcccccagcgggcagggtctggtgctgggaggagcagagcctctgcctcttgcctgccctcctctcagacctaaggccgggctccacctactcctgtgggactctcccagcaccctgtgtgcactgagcttcagcagctgagcctaggtctgtgctgtaaatcctaagattaaacattccagatagt

SEQ ID NO: 148011 - DNA, 1410 bp, Homo sapiens
  Payload ID: 9292
  Gene Symbol: LRRC29
  Gene Name: leucine rich repeat containing 29
  Uniprot ID: Q8WV35
  ENST ID: ENST00000409509
  CDS Start-End: 273-944
ggcagggatgcgatggcggagtcgctgcccctggagatgctcacatatattctgagcttcctgcctctgtcagatcagaaagaggcctccctcgtgagttgggcttggtaccgtgctgcccagaatgcccttcgggagcaaccaggccttacctccctggacctcagtggctgctcagaactgactgatggggcgctcttggccgtgagccggggcctgcggcacctgcggcgcctgagcctggggaagctgcagcggctgacagatgcaggatgtacagctctgggtggcctgcaggagctgcagagcctcgacatggccgagggcgggaactggcccaggccctgggctgtatgcacggggctccatcccagctggcctccctcagcctggcccactgctcttcattgaagtcacgcccagagctggagcatcaggcctcaggtaccaaggacgcctgtccagagccacagggcccctccctgctcacgctgcgggccctgcaggagttggacctcacagcctgcagcaagctgactgatgccagtttagccaaggtgctccagtttctccagctgaggcagctgtcccttagcctgttgccagaactcacagacaacggcttggttgctgtggccaggggctgtcctagcctggagcacttggcgctgagtcactgcagccgactcagtgacaagggctgggcccaggcagccagctcctggccaaggctgcagcatctcaacctgtccagctgcagtcagctcatagagcagacactggatgctattgggcaggcgtgcaggcagctccgggtgttggatgtggccacgtgccctggcatcaacatggccgccgtcagacgcttccaagcccagctgccccaggtgtcctgtgtccagtcccgcttcgtgggaggggctgacctgaccctaacactctgaggccaggtcagtaaccagccctgcagcacagcctccttgactcccccagtctccaaccctggccttgacccgggttgctttttgcctccctctactgcagaccctctaggactgggggtggggccaatccagggcagcccagagggaacatcctgccacaccgcctggcagtagcctctttccagctacacgtcgctgccacaggcccctggaaatgctacctacgtgttgccgccacaggctcctgctctctggccaagccctgggtgggaggccaggcccccagcgggcagggtctggtgctgggaggagcagagcctctgcctcttgcctgccctcctctcagacctaaggccgggctccacctactcctgtgggactctcccagcaccctgtgtgcactgagcttcagcagctgagcctaggtctgtgctgtaaatcctaagattaaacattccagatagta

SEQ ID NO: 148012 - DNA, 1940 bp, Homo sapiens
  Payload ID: 9292
  Gene Symbol: LRRC29
  Gene Name: leucine rich repeat containing 29
  Uniprot ID: Q8WV35
  ENST ID: ENST00000409037
  CDS Start-End: 898-1569
cccaatgcccagcaccctctgaagccagagggctacccccaggcctgctgctgctccgtagacagatgtgcgatacaacatccccgtgtcctctgcctccctctcggccatcaagagcctgggcctcaggggcatctgctgcatcagcctgaccaacctggatggctctctggcttcacaccaggtgctacaatctgttgcttaccacctgggcccacacctgcagagcttgtccctgggtggaggcagccccacagaggcctcctctgtggccctgatcctgggctgcccagccctgtgtgtccttgacctcagtggctgcaatagcctcttcacctcgggcacactgctggctcagccagagatggcacagagcgtccagcaggctttgagcggcctccgtgagctcaacctggctggcctgcgagacctggctgacctcagcttcaaccagctcagcagctgtgcccccagcctggagcgcctctccttggcatactgccacctcaccttcgagctaggcccagcctgaggctccatcggcccccaagactcctctcccgcccagttctccttctgcaacctgctgcgattagtgcaagagcgggctggcaggctgcgtgccctggacctgagtggcactggcttgccccccgaggccctgcaggctctgggccaggtagctgggctgcagcttcaggagctgagcctgcacagctgccgggacctctccacagaggctgtggctaccctgtgcttccagcaaccaggccttacctccctggacctcagtggctgctcagaactgactgatggggcgctcttggccgtgagccggggcctgcggcacctgcggcgcctgagcctggggaagctgcagcggctgacagatgcaggatgtacagctctgggtggcctgcaggagctgcagagcctcgacatggccgagggcgggaactggcccaggccctgggctgtatgcacggggctccatcccagctggcctccctcagcctggcccactgctcttcattgaagtcacgcccagagctggagcatcaggcctcaggtaccaaggacgcctgtccagagccacagggcccctccctgctcacgctgcgggccctgcaggagttggacctcacagcctgcagcaagctgactgatgccagtttagccaaggtgctccagtttctccagctgaggcagctgtcccttagcctgttgccagaactcacagacaacggcttggttgctgtggccaggggctgtcctagcctggagcacttggcgctgagtcactgcagccgactcagtgacaagggctgggcccaggcagccagctcctggccaaggctgcagcatctcaacctgtccagctgcagtcagctcatagagcagacactggatgctattgggcaggcgtgcaggcagctccgggtgttggatgtggccacgtgccctggcatcaacatggccgccgtcagacgcttccaagcccagctgccccaggtgtcctgtgtccagtcccgcttcgtgggaggggctgacctgaccctaacactctgaggccagaccctctaggactgggggtggggccaatccagggcagcccagagggaacatcctgccacaccgcctggcagtagcctctttccagctacacgtcgctgccacaggcccctggaaatgctacctacgtgttgccgccacaggctcctgctctctggccaagccctgggtgggaggccaggcccccagcgggcagggtctggtgctgggaggagcagagcctctgcctcttgcctgccctcctctcagacctaaggccgggctccacctactcctgtgggactctcccagcaccctgtgtgcactgagcttcagcagctgagcctaggtctgtgctgtaaatcctaagattaaacattccagatagt

SEQ ID NO: 148013 - DNA, 785 bp, Homo sapiens
  Payload ID: 9292
  Gene Symbol: LRRC29
  Gene Name: leucine rich repeat containing 29
  ENST ID: ENST00000424285
  CDS Start-End: 290-785
ccagcctggcggaaacgacccgccctcccgatcccgggaccttctagctctggatgctcacatatattctgagcttcctgcctctgtcagatcagaaagaggcctccctcgtgagttgggcttggtaccgtgctgcccagaatgcccttcgggagcaaccaggccttacctccctggacctcagtggctgctcagaactgactgatggggcgctcttggccgtgagccggggcctgcggcacctgcggcgcctgagcctggggaagctgcagcggctgacagatgcaggatgtacagctctgggtggcctgcaggagctgcagagcctcgacatggccgagggcgggaactggcccaggccctgggctgtatgcacggggctccatcccagctggcctccctcagcctggcccactgctcttcattgaagtcacgcccagagctggagcatcaggcctcaggtaccaaggacgcctgtccagagccacagggcccctccctgctcacgctgcgggccctgcaggagttggacctcacagcctgcagcaagctgactgatgccagtttagccaaggtgctccagtttctccagctgaggcagctgtcccttagcctgttgccagaactcacagacaacggcttggttgctgtggccaggggctgtcctagcctggagcacttggcgctgagtcactgcagccgactcagtgacaagggctgggcccaggcagccagctcctggccaaggctgcagcatctcaacctgtccagctgcagtcagctca

SEQ ID NO: 148014 - DNA, 786 bp, Homo sapiens
  Payload ID: 9292
  Gene Symbol: LRRC29
  Gene Name: leucine rich repeat containing 29
  ENST ID: ENST00000433915
  CDS Start-End: 302-786
ggcggcagggatgcgatggcggagtcgctgcccctggagatgctcacatatattctgagcttcctgcctctgtcagatcagaaagaggcctccctcgtgagttgggcttggtaccgtgctgcccagaatgcccttcgggagaggctgtggctaccctgtgcttccagcaaccaggccttacctccctggacctcagtggctgctcagaactgactgatggggcgctcttggccgtgagccggggcctgcggcacctgcggcgcctgagcctggggaagctgcagcggctgacagatgcaggatgtacagctctgggtggcctgcaggagctgcagagcctcgacatggccgagggcgggaactggcccaggccctgggctgtatgcacggggctccatcccagctggcctccctcagcctggcccactgctcttcattgaaggtgctccagtttctccagctgaggcagctgtcccttagcctgttgccagaactcacagacaacggcttggttgctgtggccaggggctgtcctagcctggagcacttggcgctgagtcactgcagccgactcagtgacaagggctgggcccaggcagccagctcctggccaaggctgcagcatctcaacctgtccagctgcagtcagctcatagagcagacactggatgctattgggcaggcgtgcaggcagctccgggtgttggatgtggccacgtgccctggcatcaacatggccgccgtcagacgcttccaagcccagctgccccaggtgtcctgtgtcca

SEQ ID NO: 148015 - DNA, 941 bp, Homo sapiens
  Payload ID: 9292
  Gene Symbol: LRRC29
  Gene Name: leucine rich repeat containing 29
  ENST ID: ENST00000447579
  CDS Start-End: 396-941
gcttgggggaccgtcctccccttccctatcggccccagaagatagctgccctgtcatctccgcgagaacaggccctctgcccatccccttcccttgaagtggctgtctcctccccgctcagttctggaagatgtccgctccatctcatcgtcccgaaggatgctcacatatattctgagcttcctgcctctgtcagatcagaaagaggcctccctcgtgagttgggcttggtaccgtgctgcccagaatgcccttcgggagcaaccaggccttacctccctggacctcagtggctgctcagaactgactgatggggcgctcttggccgtgagccggggcctgcggcacctgcggcgcctgagcctggggaagctgcagcggctgacagatgcaggatgtacagctctgggtggcctgcaggagctgcagagcctcgacatggccgagggcgggaactggcccaggccctgggctgtatgcacggggctccatcccagctggcctccctcagcctggcccactgctcttcattgaaggatgcctcagtgctctccatgatcccagcactgggcctgagcctcagggtgctagacctgtcctcctgtgtggccctcaccaacaggaccctgcaggccatctgcacctacctcacccacctctcagtcctgcgcctggcgtggtgcagggagctctgtgactgggggcttcgggggctgggggagcctgtgcaggggacccaggtgtgggaccctcgaggtcttggaggacggggtggcccctgggatcagctgccctcctgcccctcccaagtctctgtaggagtatttaagggcaaactcaggaggaacctgagaagcaaaggcttcttcccacagtcacgcccagagctggagcatcaggcctcaggtaccaaggacgcctgtccagagccacagggcccc

SEQ ID NO: 148016 - DNA, 1303 bp, Homo sapiens
  Payload ID: 9292
  Gene Symbol: LRRC29
  Gene Name: leucine rich repeat containing 29
  Uniprot ID: Q8WV35
  ENST ID: ENST00000629962
  CDS Start-End: 261-932
atggcggagtcgctgcccctggagatgctcacatatattctgagcttcctgcctctgtcagatcagaaagaggcctccctcgtgagttgggcttggtaccgtgctgcccagaatgcccttcgggagcaaccaggccttacctccctggacctcagtggctgctcagaactgactgatggggcgctcttggccgtgagccggggcctgcggcacctgcggcgcctgagcctggggaagctgcagcggctgacagatgcaggatgtacagctctgggtggcctgcaggagctgcagagcctcgacatggccgagggcgggaactggcccaggccctgggctgtatgcacggggctccatcccagctggcctccctcagcctggcccactgctcttcattgaagtcacgcccagagctggagcatcaggcctcaggtaccaaggacgcctgtccagagccacagggcccctccctgctcacgctgcgggccctgcaggagttggacctcacagcctgcagcaagctgactgatgccagtttagccaaggtgctccagtttctccagctgaggcagctgtcccttagcctgttgccagaactcacagacaacggcttggttgctgtggccaggggctgtcctagcctggagcacttggcgctgagtcactgcagccgactcagtgacaagggctgggcccaggcagccagctcctggccaaggctgcagcatctcaacctgtccagctgcagtcagctcatagagcagacactggatgctattgggcaggcgtgcaggcagctccgggtgttggatgtggccacgtgccctggcatcaacatggccgccgtcagacgcttccaagcccagctgccccaggtgtcctgtgtccagtcccgcttcgtgggaggggctgacctgaccctaacactctgaggccagaccctctaggactgggggtggggccaatccagggcagcccagagggaacatcctgccacaccgcctggcagtagcctctttccagctacacgtcgctgccacaggcccctggaaatgctacctacgtgttgccgccacaggctcctgctctctggccaagccctgggtgggaggccaggcccccagcgggcagggtctggtgctgggaggagcagagcctctgcctcttgcctgccctcctctcagacctaaggccgggctccacctactcctgtgggactctcccagcaccctgtgtgcactgagcttcagcagctgagcctaggtctgtgctgtaaatcctaagattaaacattccagatagt

SEQ ID NO: 148017 - DNA, 5869 bp, Homo sapiens
  Payload ID: 9293
  Gene Symbol: LRRC3
  Gene Name: leucine rich repeat containing 3
  Uniprot ID: Q9BY71
  ENST ID: ENST00000291592
  CDS Start-End: 318-1091
ccccgcccctcgcccgcgcaggccggagtcgcggcctccccagctagtggtcgcgggcgcggtcgcaggggcagcggggtggccgccgcgccaggcgtggagctgggtctggcgggctccgagaggcccgggagcggcgcgcagagcagcctccggccgccgccgcgcagagctgccagagtggactgcactgcttctcccagcggggcaggatggcggtttcatgtctggttggataaggccttgcctgcggaaaccagctccatccccaggccctagcagaggctcgcgtgtccccgtccccaggtcaggtcaggatgggcaccgtgcgcccacctcgcccctcgctcctgctggtctccacccgggagtcttgtctcttcctcctcttctgcctgcacctgggcgccgcctgcccacagccctgccggtgccctgaccacgcaggggctgtggctgtcttctgcagcttgcggggccttcaggaggtccccgaggacatcccggccaacaccgtgctcctgaagctcgatgccaacaagatctcccacctcccggacggggccttccagcacctgcaccggctcagggagctggatctgtctcacaacgccatcgaggccatcggctccgccaccttcgcgggcctggccgggggcctgcggctgctggacctgtcttacaaccgcatccagaggatccccaaggacgccctgggcaaactcagcgccaagatacgcctgtcccacaaccccctgcactgcgagtgcgccctgcaggaggccctgtgggagctgaagctggaccccgactctgtggacgagatcgcctgccacacctcagtgcaggaggagtttgtggggaagcctctggttcaggctctggatgcgggtgccagcctctgcagcgtcccccacaggaccacagacgtggccatgctggtcaccatgttcggctggttcgccatggtgatcgcctacgtcgtgtactatgtgcgccacaaccaggaggatgcccggaggcacctggagtacctgaagtctctgcccagcgcccccgcctccaaggaccccatcggcccggggccctagcgcctgttccggcagacccccgccggtggctgctgtcacttttgtagtaggtggtgactgatgctgcttttgctcttccctgaggcaggtgtcacagccatgtgtgctccccactgttgcactcaggcacagcagcacctccaggctgggtggttttgccacacatccgtgtgacggatgaggaacctgaagcttagaggaacggaatgactgcccgtgacgataccatcaggaaattatcccagtggaacttcaacccgggctgtccatcgtgacattccgcctccttccaccatgccagcctctcccacacggggccctgcaggctgtggatatgcactcagaggactaagggggtgctctgcaagcgagagggttcaccagagggagcttgggtgcaggttcacccgctgaaggcgctgataagtcctgtgctgaggagctgacttgcccttgtttacttacaaagtgcattgtaggtaaacatgagccttgttccagtgttcgaagtacattggaacgtaagccctgtttccagagcaaagtaacagagaccaggtttttctagagagctaagtgggatgtgtagctcaaacaaactgtcctacccttttttattctcaaatgtttgttttgagtaaccgtagtgccaaaatttcagttcagtaatggggtgaacaatatggagagagacctgggaaaagtccagggtagcttgcccaggggaagacagcagccacatacctgggggcccgcctgcttcctgcccctctgggtgtgcctgatgcgggaggccctgccccagggcgatctcagctcactgcaacctttgcctcccaggctcaatcacttctgctgcctcagcctccctagtagctggaattacaggcatgagccaccacgcctggctaatttttgtatttttagtagagaccgggtttcaccatgttggccaggctggtctcgaactgttggcctcaagtgatccgcccgcctcagcctcccaaagtgctgggattacaggcgtcagccaccgcgcccggccctgtgccttgctttttctactcactaagatataaaacagctctttttccaaggcccggagtactggggattgatgtttcaaggccaatcaatgggatgcttcgttttctccagcaacaggaactctctcttttcacctttgctgccaggaatctcagagataatttagtgctcaatttactaaccttacttcacattcaggttagatgttacctccacctatatgatagtaattcctaattttattttttattgtcctttttatgagtgtttatattttaaagtactttgagtatttttggggggggtgtaaatgagtgatcagtgtacattgtgtgtggactgaagtgtaggtatgtagagatgcttcgccaaacagatgcttaaaaatgaatggaagttgagggtggtttctctttggaaagtatcaggtgacttggaaggtgagagcctgtccagggtgtgtgcactggttctgaggtaccccgtgtgtgcagtgtgagtcacgggggtgtctgtgttgtgaggtgcttggtaggctttgctctgcccacagtgcagacgcggggtgggtgaggggccaggcccagtgtatgagtggaggcagccccaggctccgcctgcttccctcacgccacgctgcctgagtgtcgccatgctcggaggacagagacctccacggaaactggcagcgccactcacccttccagtgagagctagaaccaagtgccagcccccgggggtgcacccgtgctggtgtggggccacgtggtccttgtggtccaggcagggccagcatgtggcggggtgtccagctccactgtttggaggaagtgggcgctgacacagcagagtgccctgggcccgtggggatttccttccagaggacacgtggctgaaagcataggataaggatgtataggtgaatgactggtgccatccctggctgtctgatagatgcaggtagggcaggtgaactgttgctggcctggccagcaggcctagggtcacatggtgattggcgtcctcctgccaccccttctccatgccagggtgcctgtggtgggtttgcccagcacgcatgaccccaggtcccaaggagagtgtgaactgaggcctgggtggtgaaggcagggcctctcctcagccctgtgtcctgtgggtgccagccagtcccatctcgcattttggggtgccctttccctgctgccaggggactcttcatttgtccttaccctagaatcagcccagacactggacatcacccagacgtggcccttcaggaggtgcacagggcaggggcaggcccgtccctccctgccccaatttgctgggctgcctcagcccagggtctggccttctccttggtgaaggtctgctgggcccctgtccacctcctgctgggaggaggagatggggagaggaccaggaggacaccggaggccctgtcccctgcactgtgagctcagtcaggtccatgagctgcccaccgtcctggccttactgtgccccctgccccaccaacataggtgaaagcacctcccctctaaggaagaccatagagaccccaacactgtgggaccccaaagctccttcatgctcactggagctcccaccgtgggtgcttgcaagtcctcagcgctcccggggtacagccctccccttcctgccctctaatgtcctcccctcccttgcccttccctccacttcctttctctgccgtcccctcctctcccatcttgtgacctctttactggcggggcctggagcccatgatggacacttgcggaaggaggggtggcggagcacccctgagatgacatcgctgcctgccccagagcaccccgcctctccctgtgactcagttctttgcagcccagatgtgagcatgtgcaccctgggacctgctgcccgttgggatgcccaggccaaatcagcccctctgcctccatgctgcactgattgcaagagtttcccacatctgcagaggccgtgggctcagccccacaccagccaggccaccagtgttgatagcggtgaggcggggacaaagggaatgtctcagttcacagtgtggacatggtggaggtctcggccttgcgagacaaggcagggggaggggataggaaattgggggtattctgtgactcctgggccaccggggagccagaatcttccagccagactggatgggcagggcttagcttcctgatgccgcccattcaccactttcaccccgggaacctacctgggcatcatgggaggcagagcctgaaccccaacccaaccctaactctaatgctaacccctaaaccatcccccaccctaacccaatcctcgccctaaccctaatgctaacccctgacccgacccaatcctaaccctgatgctaacccctgactcaactctcaccctaaccctgatgctaacccctgacccaatcctcaccctaaccctgatactaacccttaacctaacccaacccagccctaactccaactctaaagctaactcctaaccctaggagaggagcccaggccgggccctctccctgctggtttcctgttgggctttggagccccagatgcctgcccagaggcttccttgtgcggggtggggtccagcagtgggggatgggcccagagctggtatagccaccagcagagccatcctgatccacaggaccatccctggtggggtggggccccctggggcaggaaggccactgaggccagggagactcccaggcccactcacggcgcaggccccacaggagctggctggaggctatgggtgcggggcgtgggcctgccgggggttgcgtgacaggcagtggggagtgggttgtgctggcagctgtgggtgagtgaggaggctcctctcatgaagggccctggggaagtggaatctggccctgagagacccccggcctcctctgcaggggctgctggcaggaggggaaccggggaccacctcccgccacagagcctggggcccccagccttgcctacagggagggtagatgagagtgtaaactgcatatgaggttgggctaaacctggacatgtgtttcataaccaaagcagccaggaatctccggctctgcccagtgatcatctgggcaggacatggggacgagtgtccaggctgaagtcagggcccggccagcagagggccattttgtattgagctccacagctggtcacattctgtggaatgtgcagacgtgcacggcccatcagacagggtctggagtggggctgccgtcttgggcagctcctcccgggtgtctgcaaaatgcagaggtcaccagagccaaggcagcaaggcaaggagcccggcttctaaggaactctgagcaggtgtggtccatggctgggaggcagctggccccacagcacatagcacggagggcggcgcggagtcctggacgctcttggcaggtcccctcatggaggatgtgggggattggcttaggcctggtctggctggccttcctggaccgcagtggccaggagctgaaaaccgtgaccccagtctccctgcagctgttcttgatgggatttctgttcgccagtcagatgcatttgcacaggacttggatcctgaactgtgtaacctggagaggcaggtgtgagcgggccatgctgctggcccagcctgtgccggtgtctgtttctgttgtctctcggcccttctgtgagccctcagtaaagctcttcgtgcttcagtca

SEQ ID NO: 148018 - DNA, 923 bp, Homo sapiens
  Payload ID: 9294
  Gene Symbol: LRRC30
  Gene Name: leucine rich repeat containing 30
  Uniprot ID: A6NM36
  ENST ID: ENST00000383467
  CDS Start-End: 15-920
gaagggaaggtacaatgggggccaggcagtcaagggccagctccaaggataagggccccaagaggatgctgttcacggggaggagacagaagttttctccgtgggacgatgccctgctctcgggaagggacccgcggtccctgctgaagcggggcatgcaccacgtcagcttcagcctggtcacgagaggaatgacagacatccccgactttctgtggggcttgtccgaggtccagaaactcaatctgtctcacaaccagctccgggttctccctcccgaggtggggaaactgacccggatcgtggtcctgaacttgtgcgggaaccgcctgaagagcctgcccagagaagtgagcctcctacagtgcctcaaggtcctgtttgtcaacatgaactgcctgacagaggtgccggccgagctgagcttgtgccgaaagctggaggtcctgagcttgtcgcacaactgcctgtcccagctccctgcatgcttcgccgacctctctagactgaggaagctaaacctcagcaacaacttcttcgcgcacatccccatgtgtgtgttctccctgaaggaactgattttcttgcacgtgggctcgaatcgcctggaaaacatcgctgagagcatccagcacctggccagcctgcagatcttcatcgcagagggcaacaacatccactccttcccgaggtcgctttgcctggtcaccagcctggagctgctgaacctcaacaacaatgacatccagaccctcccgagcgaactccacctgctgtgtagactggtgaggatcgcctggaatcccatggacaaagggctccacatttcccacaaccctttatccaagcctctgccggagctggtggaggggggcctggagatgctcttcggctacctgaaggacaaaaaacacacctgacct

SEQ ID NO: 148019 - DNA, 2355 bp, Homo sapiens
  Payload ID: 9295
  Gene Symbol: LRRC31
  Gene Name: leucine rich repeat containing 31
  Uniprot ID: Q6UY01
  ENST ID: ENST00000264676
  CDS Start-End: 124-1614
tgtaggggaggatattttgattgaacacaggcttgacagaatcttcttttcttcttagaaatcctagaaaacagaaagcaacaggaagatgtcttattgggaactacccccatcaacttcaccatgagtcaaacaaggaagaaaacttcctcagaaggagaaactaagccccagacttcaactgtcaacaaatttctcaggggctccaatgctgaaagcagaaaagaggacaatgaccttaaaacaagtgattcccaacccagcgactggatacagaagacagccacctcagagactgctaagcctctcagttcagaaatggaatggagatccagtatggagaaaaatgagcatttcctgcagaagctgggcaaaaaggctgtcaacaagtgtctagatttgaataactgtggattaacaacagcggacatgaaagaaatgggagaagcatttgagatgattcctgaacttgaagagctaaatttgtcttggaacagtaaagtgggaggaaatttgcctctgatccttcagaagttccaaaaagggagcaagatacaaatgattgagcttgtggattgctccctcacgtcagaagatgggacatttctgggtcaactgctacctatgctgcaaagtctcgaagtacttgatctttccattaacagagacattgttggcagtctgaacagtattgctcagggattaaaaagcacctcaaatctgaaagtactgaagttacattcatgtggattatcacaaaagagtgtcaaaatattggatgctgcttttaggtatttgggtgagctgaggaaattagatctttcctgcaataaggatctaggtggaggttttgaagactcgccggctcagttggtcatgctaaagcatctacaagtcctagatcttcaccagtgctcactaacagcagatgacgtgatgtcactgacccaggtcattcctttactttcaaatcttcaagaattggatttatcagccaacaaaaagatgggcagttcttctgaaaacttactcagcaggctccgatttttaccagcattgaagtcattagttatcaacaactgtgctttggagagtgagacttttacagctcttgctgaagcctctgttcacctctctgctctggaagtattcaacctttcttggaacaagtgtgttggtggcaacttgaagctgcttctggaaacactaaagctttccatgtctcttcaagtgctgaggctgagcagctgttccctggtgacagaggatgtggctctcctggcatcggtcatacagacgggtcatctggccaaactgcaaaagctggacctgagctacaatgacagcatctgtgatgcggggtggaccatgttctgccaaaacgtgcggttcctcaaagagctaatcgagctggatattagccttcgaccatcaaattttcgagattgtggacaatggtttagacacttgttatatgctgtgaccaagcttcctcagatcactgagataggaatgaaaagatggattctcccagcttcacaggaggaagaactagaatgctttgaccaagataaaaaaagaagcattcactttgaccatggtgggtttcagtaaactgatttcccatgtcctactaagctacaaaccattctccaaaggaaaagaacatgaacgaattccagagtcatgaactgaatttcaacttctgggccatttaatgggacttatattacaagagctttgtaaatatatatatatattacatatatatatgtaatatacatatatacacatatatataatatacatatataatacacatatatatgtaaatatatatataatatctaatatgagcatgccattattctctgtctatgaaacaaaaatggcatttttcaatggatttgttttggatatataattagttcatttgctgtttagaagccttgccaaaagtgtttagattttggtactgcaactgctttcctcttgcccagaaatgttttgcctcttcttttcctacaagttaaatgttctaaatataaaggggtatgtgtgtgtgtgtgtaattctaatgtgaaaggcactagctgtctaatagtttcatgtatcattactattactatatgtatcttaatgtagtctatgtaggtttttatcagaaagtgtacctttctatggtttattattttatattctggtgccttttatctcagatataaaccatgaacagtaatgatagtcactgacatataaatcttagtaaaaagtgattaaaaatctaaaactcagtatgaaaaacatatcttgttagaataaattaaaaccttttattgtttaaaaaattgttaa

SEQ ID NO: 148020 - DNA, 2520 bp, Homo sapiens
  Payload ID: 9295
  Gene Symbol: LRRC31
  Gene Name: leucine rich repeat containing 31
  Uniprot ID: Q6UY01
  ENST ID: ENST00000316428
  CDS Start-End: 59-1717
agaaaacagaaagcaacaggaagatgtcttattgggaactacccccatcaacttcaccatgagtcaaacaaggaagaaaacttcctcagaaggagaaactaagccccagacttcaactgtcaacaaatttctcaggggctccaatgctgaaagcagaaaagaggacaatgaccttaaaacaagtgattcccaacccagcgactggatacagaagacagccacctcagagactgctaagcctctcagttcagaaatggaatggagatccagtatggagaaaaatgagcatttcctgcagaagctgggcaaaaaggctgtcaacaagtgtctagatttgaataactgtggattaacaacagcggacatgaaagaaatggttgccttgctgccttttctcccagacttggaagaactggatatctcctggaatggttttgtaggtggaaccctcctttccatcactcagcaaatgcatctggtcagcaagttaaaaatcttgaggctgggtagctgcagactcaccactgacgatgttcaagcactgggagaagcatttgagatgattcctgaacttgaagagctaaatttgtcttggaacagtaaagtgggaggaaatttgcctctgatccttcagaagttccaaaaagggagcaagatacaaatgattgagcttgtggattgctccctcacgtcagaagatgggacatttctgggtcaactgctacctatgctgcaaagtctcgaagtacttgatctttccattaacagagacattgttggcagtctgaacagtattgctcagggattaaaaagcacctcaaatctgaaagtactgaagttacattcatgtggattatcacaaaagagtgtcaaaatattggatgctgcttttaggtatttgggtgagctgaggaaattagatctttcctgcaataaggatctaggtggaggttttgaagactcgccggctcagttggtcatgctaaagcatctacaagtcctagatcttcaccagtgctcactaacagcagatgacgtgatgtcactgacccaggtcattcctttactttcaaatcttcaagaattggatttatcagccaacaaaaagatgggcagttcttctgaaaacttactcagcaggctccgatttttaccagcattgaagtcattagttatcaacaactgtgctttggagagtgagacttttacagctcttgctgaagcctctgttcacctctctgctctggaagtattcaacctttcttggaacaagtgtgttggtggcaacttgaagctgcttctggaaacactaaagctttccatgtctcttcaagtgctgaggctgagcagctgttccctggtgacagaggatgtggctctcctggcatcggtcatacagacgggtcatctggccaaactgcaaaagctggacctgagctacaatgacagcatctgtgatgcggggtggaccatgttctgccaaaacgtgcggttcctcaaagagctaatcgagctggatattagccttcgaccatcaaattttcgagattgtggacaatggtttagacacttgttatatgctgtgaccaagcttcctcagatcactgagataggaatgaaaagatggattctcccagcttcacaggaggaagaactagaatgctttgaccaagataaaaaaagaagcattcactttgaccatggtgggtttcagtaaactgatttcccatgtcctactaagctacaaaccattctccaaaggaaaagaacatgaacgaattccagagtcatgaactgaatttcaacttctgggccatttaatgggacttatattacaagagctttgtaaatatatatatatattacatatatatatgtaatatacatatatacacatatatataatatacatatataatacacatatatatgtaaatatatatataatatctaatatgagcatgccattattctctgtctatgaaacaaaaatggcatttttcaatggatttgttttggatatataattagttcatttgctgtttagaagccttgccaaaagtgtttagattttggtactgcaactgctttcctcttgcccagaaatgttttgcctcttcttttcctacaagttaaatgttctaaatataaaggggtatgtgtgtgtgtgtgtaattctaatgtgaaaggcactagctgtctaatagtttcatgtatcattactattactatatgtatcttaatgtagtctatgtaggtttttatcagaaagtgtacctttctatggtttattattttatattctggtgccttttatctcagatataaaccatgaacagtaatgatagtcactgacatataaatcttagtaaaaagtgattaaaaatctaaaactcagtatgaaaaacatatcttgttagaataaattaaaaccttttattgtttaaaaaattgttaacatattgcctccaggcatttctttgaaatggaatttgcttcataaaactaatttaattcgtt

SEQ ID NO: 148021 - DNA, 1714 bp, Homo sapiens
  Payload ID: 9295
  Gene Symbol: LRRC31
  Gene Name: leucine rich repeat containing 31
  Uniprot ID: Q6UY01
  ENST ID: ENST00000523069
  CDS Start-End: 27-1358
tgggaactacccccatcaacttcaccatgagtcaaacaaggaagaaaacttcctcagaaggagaaactaagccccagacttcaactgtcaacaaatttctcaggggctccaatgctgaaagcagaaaagaggacaatgaccttaaaacaagtgattcccaacccagcgactggatacagaagacagccacctcagagactgctaagcctctcagttcagaaatggaatggagatccagtatggagaaaaatgagcatttcctgcagaagctgggcaaaaaggctgtcaacaagtgtctagatttgaataactgtggattaacaacagcggacatgaaagaaatggttgccttgctgccttttctcccagacttggaagaactggatatctcctggaatggttttgtaggtggaaccctcctttccatcactcagcaaatgcatctggtcagcaagttaaaaatcttgaggctgggtagctgcagactcaccactgacgatgttcaagcactgggagaagcatttgagatgattcctgaacttgaagagctaaatttgtcttggaacagtaaagtgggaggaaatttgcctctgatccttcagaagttccaaaaagggagcaagatacaaatgattgagcttgtggattgctccctcacgtcagaagatgggacatttctgggtcaactgctacctatgctgcaaagtctcgaagtacttgatctttccattaacagagacattgttggcagtctgaacagtattgctcagggattaaaaagcacctcaaatctgaaagtactgaagttacattcatgtggattatcacaaaagagtgtcaaaatattggatgctgcttttaggtatttgggtgagctgaggaaattagatctttcctgcaataaggatctaggtggaggttttgaagactcgccggctcagttggtcatgctaaagcatctacaagtcctagatcttcaccagtgctcactaacagcagatgacgtgatgtcactgacccaggtcattcctttactttcaaatcttcaagaattggatttatcagccaacaaaaagatgggcagttcttctgaaaacttactcagcaggctccgatttttaccagcattgaagtcattagttatcaacaactgtgctttggagagtgagacttttacagctcttgctgaagcctctgttcacctctctgctctggaagtattcaacctttcttggaacaagtgtgttggtggcaacttgaagctgcttctggaaacactaaagctttccatgtctcttcaagtgctgaggctgagcagctgttccctggtgacagaggatgtggctctcctggagtgattctgttttccagcatcggtcatacagacgggtcatctggccaaactgcaaaagctggacctgagctacaatgacagcatctgtgatgcggggtggaccatgttctgccaaaacgtgcggttcctcaaagagctaatcgagctggatattagccttcgaccatcaaattttcgagattgtggacaatggtttagacacttgttatatgctgtgaccaagcttcctcagatcactgagataggaatgaaaagatggattctcccagcttcacaggaggaagaactagaatgctttgaccaagataaaaaaagaagcattcactttgaccatggtgggtttcagtaaactgatttccc

SEQ ID NO: 148022 - DNA, 4207 bp, Homo sapiens
  Payload ID: 9296
  Gene Symbol: LRRC32
  Gene Name: leucine rich repeat containing 32
  Uniprot ID: Q14392
  ENST ID: ENST00000260061
  CDS Start-End: 139-2127
ggtggggcagctgagcggcctgctcctcctcgggccgtgaccccggggtctggcgcggggtgggacccgggggcgggtttgcgcaaaatgtgccgagactgcccgggagaggagctgcggccgcgctgagccagagccatgagaccccagatcctgctgctcctggccctgctgaccctaggcctggctgcacaacaccaagacaaagtgccctgtaagatggtggacaagaaggtctcgtgccaggttctgggcctgctccaggtcccctcggtgctcccgccagacactgagacccttgatctatctgggaaccagctgcggagtatcctggcctcacccctgggcttctacacagcacttcgtcacctggacctgagcaccaatgagatcagcttcctccagccaggagccttccaggccctgacccacctggagcacctcagcctggctcacaaccggctggcgatggccactgcgctgagtgctggtggcctgggccccctgccacgcgtgacctccctggacctgtctgggaacagcctgtacagcggcctgctggagcggctgctgggggaggcacccagcctgcataccctctcactggcggagaacagtctgactcgcctcacccgccacaccttccgggacatgcctgcgctggagcagcttgacctgcatagcaacgtgctgatggacatcgaggatggcgccttcgagggtctgccccgcctgacccatctcaacctctccaggaattccctcacctgcatctccgacttcagcctccagcagctgcgggtgctagacctgagctgcaacagcatcgaggcctttcagacggcctcccagccccaggctgagttccagctcacctggcttgacctgcgggagaacaaactgctccatttccccgacctggccgcgctcccgagactcatctacctgaacttgtccaacaacctcatccggctccccacagggccaccccaggacagcaagggcatccacgcaccttccgagggctggtcagccctgcccctctcagcccccagcgggaatgccagcggccgccccctttcccagctcttgaatctggatttgagctacaatgagattgagctcatccccgacagctttcttgagcacctgacctccctgtgcttcctgaacctcagcagaaactgcttgcggacctttgaggcccggcgcttaggctccctgccctgcctgatgctccttgacttaagccacaatgccctggagacactggaactgggcgccagagccctggggtctctgcggacgctgctcctacagggcaatgccctgcgggacctgcccccatacacctttgccaatctggccagcctgcagcggctcaacctgcaggggaaccgagtcagcccctgtggggggccagatgagcctggcccctccggctgtgtggccttctccggcatcacctccctccgcagcctgagcctggtggataatgagatagagctgctcagggcaggggccttcctccacaccccactgactgagctggacctttcttccaatcctgggctggaggtggccacgggggccttgggaggcctggaggcctccttggaggtcctggcactgcagggcaacgggctgatggtcctgcaggtggacctgccctgcttcatctgcctcaagcggctcaatcttgccgagaaccgcctgagccaccttcccgcctggacacaggctgtgtcactggaggtgctggacctgcgaaacaacagcttcagcctcctgccaggcagtgccatgggtggcctggagaccagcctccggcgcctctacctgcaggggaatccactcagctgctgcggcaatggctggctggcagcccagctgcaccagggccgtgtggacgtggacgccacccaggacctgatctgccgcttcagctcccaggaggaggtgtccctgagccacgtgcgtcccgaggactgtgagaaggggggactgaagaacatcaacctcatcatcatcctcaccttcatactggtctctgccatcctcctcaccacgctggccgcctgctgctgcgtccgccggcagaagtttaaccaacagtataaagcctaaagaagccgggagacactctaggtcagtgggggagcctgaggtacagagaagagtgaggactgactcaaggtcacacagtgatccgggatcccagaactctggtctccaaattacagcccaggacacctttctctgccgcctgctgcatcagtgggtgacccccttcccgggctgcactttgggtccagctgtggaagccagaagttgggcggtttcagggacagccgagaataatgttgacctgtcagatcaacaaatcttcactgagcatgtattttgtgccacaccctgctctgggcactgggaatgctgggaaatgagatacattcccgccctcaagaatctcccagtctggtaggagagagtgctgcagagccacgtggccgccacgcagtgtgcttagggcctgaggtgtgaaagcccagggctccagagctcggcaggccccgctggtttggtgcggtgagtcctgccccggctgtgccagggtgagggagggccaagcccaggaggatttgtctgagacatttccaagcagactgtttgtcacgtcttctgagaatgactttcagtctctctgaaaatgaaaagcttaggaccagaagagagaattggagctgtacgagtgtgtctcggatctggtgttgttaggtgggccacggcggctccagcagggtctggttaaggggtccagcccagcactggaccattccgtctcctgctctggacttgccctctcccttcctggcactctcatgttgcataccctgaccccagtgctgctctaagcaccgtccctgcccagccccacttctccatcgcagccccaccttggctgctgagccaggagctaaaaccttagatatctggttctgttttgcacccagcttggcagatgtggatttgaatccaagccttgtgtctgcccctatgtgacagctctatattttatccccgttttataaaagaggaaactgaagttctgaaaatctccttccagggccccagctaactaatgccataggtgagattcaaaccttcatccttctgtctccagggcctgatctttaccactgcaggggctgcaggccgttaagtggacaggaagtggccccacatagcccgagcagggtctggaagcatcctgtgctgtgcacacctgctctctcctctctcccaggcaggcagctgcaggcgctctcctccttctctgcctgtttccctcctcccttcctttccaccctggtgtgggttctcctgttctctctgtgctcttgcattctctcattcccttttcctctattgagcagagcctggagtttgagactatggaatccaacctccccattgcacagatggggaaactgaggcttaggaagagaatgaaacttgtggagagcttatacagagcctctgggggaaaaaagagcccttatttgtggggtgagattgggggttggaccagagtgatgtcctctctcagctatcacatcacaagataatgctggctccaaacttcctttctgtgcctcatcatgcaaggatcttttttccctcttacaaaaacaggtaaaaagcctcacccagatgacccccatccctcataccatggagtcatgagctgtctgggaagaatggacgtgctgggaccaactcaagaccttgttttgctgtcttcatcatcttacctgtgcttggcccacagtctggctcatgatgtgggctcagtaatgtgcgagaaagtgaaaatgccactctctccaccccattttacagaggagaacaccaaggcccagaggaagttaagggagagtcaatgggcagagccagggctaggccctggtggtgtgtggagcacccaggcagacccagtcctggttgggatcacacccacgggtgctactgcacgtaacactcctccttaggcctggaggccaaggtgtgggtccccacgcctgatctttgaaaacactacacagggctgctgtcacttcccagggcccaggcctcagcccaggcctcgggaccaactctttgtataacctacctgaatgtattaaaaactaattttggagaagca

SEQ ID NO: 148023 - DNA, 4311 bp, Homo sapiens
  Payload ID: 9296
  Gene Symbol: LRRC32
  Gene Name: leucine rich repeat containing 32
  Uniprot ID: Q14392
  ENST ID: ENST00000407242
  CDS Start-End: 244-2232
gtccgcagcagctctcccaggaccccactctgccagtaagtcagctgaggccgagaggagggagagaggacctcagaggccagactgtgagctagtctgccctgctcctgcgtgtgaggggtcgttggcagggcttagggaaggagaccttgatttggtatagtgggaacatttgctttggagacagatgaactggattctgatcgtgaccctgctattttctccttgtgtgactttggagccatgagaccccagatcctgctgctcctggccctgctgaccctaggcctggctgcacaacaccaagacaaagtgccctgtaagatggtggacaagaaggtctcgtgccaggttctgggcctgctccaggtcccctcggtgctcccgccagacactgagacccttgatctatctgggaaccagctgcggagtatcctggcctcacccctgggcttctacacagcacttcgtcacctggacctgagcaccaatgagatcagcttcctccagccaggagccttccaggccctgacccacctggagcacctcagcctggctcacaaccggctggcgatggccactgcgctgagtgctggtggcctgggccccctgccacgcgtgacctccctggacctgtctgggaacagcctgtacagcggcctgctggagcggctgctgggggaggcacccagcctgcataccctctcactggcggagaacagtctgactcgcctcacccgccacaccttccgggacatgcctgcgctggagcagcttgacctgcatagcaacgtgctgatggacatcgaggatggcgccttcgagggtctgccccgcctgacccatctcaacctctccaggaattccctcacctgcatctccgacttcagcctccagcagctgcgggtgctagacctgagctgcaacagcatcgaggcctttcagacggcctcccagccccaggctgagttccagctcacctggcttgacctgcgggagaacaaactgctccatttccccgacctggccgcgctcccgagactcatctacctgaacttgtccaacaacctcatccggctccccacagggccaccccaggacagcaagggcatccacgcaccttccgagggctggtcagccctgcccctctcagcccccagcgggaatgccagcggccgccccctttcccagctcttgaatctggatttgagctacaatgagattgagctcatccccgacagctttcttgagcacctgacctccctgtgcttcctgaacctcagcagaaactgcttgcggacctttgaggcccggcgcttaggctccctgccctgcctgatgctccttgacttaagccacaatgccctggagacactggaactgggcgccagagccctggggtctctgcggacgctgctcctacagggcaatgccctgcgggacctgcccccatacacctttgccaatctggccagcctgcagcggctcaacctgcaggggaaccgagtcagcccctgtggggggccagatgagcctggcccctccggctgtgtggccttctccggcatcacctccctccgcagcctgagcctggtggataatgagatagagctgctcagggcaggggccttcctccacaccccactgactgagctggacctttcttccaatcctgggctggaggtggccacgggggccttgggaggcctggaggcctccttggaggtcctggcactgcagggcaacgggctgatggtcctgcaggtggacctgccctgcttcatctgcctcaagcggctcaatcttgccgagaaccgcctgagccaccttcccgcctggacacaggctgtgtcactggaggtgctggacctgcgaaacaacagcttcagcctcctgccaggcagtgccatgggtggcctggagaccagcctccggcgcctctacctgcaggggaatccactcagctgctgcggcaatggctggctggcagcccagctgcaccagggccgtgtggacgtggacgccacccaggacctgatctgccgcttcagctcccaggaggaggtgtccctgagccacgtgcgtcccgaggactgtgagaaggggggactgaagaacatcaacctcatcatcatcctcaccttcatactggtctctgccatcctcctcaccacgctggccgcctgctgctgcgtccgccggcagaagtttaaccaacagtataaagcctaaagaagccgggagacactctaggtcagtgggggagcctgaggtacagagaagagtgaggactgactcaaggtcacacagtgatccgggatcccagaactctggtctccaaattacagcccaggacacctttctctgccgcctgctgcatcagtgggtgacccccttcccgggctgcactttgggtccagctgtggaagccagaagttgggcggtttcagggacagccgagaataatgttgacctgtcagatcaacaaatcttcactgagcatgtattttgtgccacaccctgctctgggcactgggaatgctgggaaatgagatacattcccgccctcaagaatctcccagtctggtaggagagagtgctgcagagccacgtggccgccacgcagtgtgcttagggcctgaggtgtgaaagcccagggctccagagctcggcaggccccgctggtttggtgcggtgagtcctgccccggctgtgccagggtgagggagggccaagcccaggaggatttgtctgagacatttccaagcagactgtttgtcacgtcttctgagaatgactttcagtctctctgaaaatgaaaagcttaggaccagaagagagaattggagctgtacgagtgtgtctcggatctggtgttgttaggtgggccacggcggctccagcagggtctggttaaggggtccagcccagcactggaccattccgtctcctgctctggacttgccctctcccttcctggcactctcatgttgcataccctgaccccagtgctgctctaagcaccgtccctgcccagccccacttctccatcgcagccccaccttggctgctgagccaggagctaaaaccttagatatctggttctgttttgcacccagcttggcagatgtggatttgaatccaagccttgtgtctgcccctatgtgacagctctatattttatccccgttttataaaagaggaaactgaagttctgaaaatctccttccagggccccagctaactaatgccataggtgagattcaaaccttcatccttctgtctccagggcctgatctttaccactgcaggggctgcaggccgttaagtggacaggaagtggccccacatagcccgagcagggtctggaagcatcctgtgctgtgcacacctgctctctcctctctcccaggcaggcagctgcaggcgctctcctccttctctgcctgtttccctcctcccttcctttccaccctggtgtgggttctcctgttctctctgtgctcttgcattctctcattcccttttcctctattgagcagagcctggagtttgagactatggaatccaacctccccattgcacagatggggaaactgaggcttaggaagagaatgaaacttgtggagagcttatacagagcctctgggggaaaaaagagcccttatttgtggggtgagattgggggttggaccagagtgatgtcctctctcagctatcacatcacaagataatgctggctccaaacttcctttctgtgcctcatcatgcaaggatcttttttccctcttacaaaaacaggtaaaaagcctcacccagatgacccccatccctcataccatggagtcatgagctgtctgggaagaatggacgtgctgggaccaactcaagaccttgttttgctgtcttcatcatcttacctgtgcttggcccacagtctggctcatgatgtgggctcagtaatgtgcgagaaagtgaaaatgccactctctccaccccattttacagaggagaacaccaaggcccagaggaagttaagggagagtcaatgggcagagccagggctaggccctggtggtgtgtggagcacccaggcagacccagtcctggttgggatcacacccacgggtgctactgcacgtaacactcctccttaggcctggaggccaaggtgtgggtccccacgcctgatctttgaaaacactacacagggctgctgtcacttcccagggcccaggcctcagcccaggcctcgggaccaactctttgtataacctacctgaatgtattaaaaactaattttggagaagc

SEQ ID NO: 148024 - DNA, 2656 bp, Homo sapiens
  Payload ID: 9296
  Gene Symbol: LRRC32
  Gene Name: leucine rich repeat containing 32
  Uniprot ID: Q14392
  ENST ID: ENST00000404995
  CDS Start-End: 139-2127
ggtggggcagctgagcggcctgctcctcctcgggccgtgaccccggggtctggcgcggggtgggacccgggggcgggtttgcgcaaaatgtgccgagactgcccgggagaggagctgcggccgcgctgagccagagccatgagaccccagatcctgctgctcctggccctgctgaccctaggcctggctgcacaacaccaagacaaagtgccctgtaagatggtggacaagaaggtctcgtgccaggttctgggcctgctccaggtcccctcggtgctcccgccagacactgagacccttgatctatctgggaaccagctgcggagtatcctggcctcacccctgggcttctacacagcacttcgtcacctggacctgagcaccaatgagatcagcttcctccagccaggagccttccaggccctgacccacctggagcacctcagcctggctcacaaccggctggcgatggccactgcgctgagtgctggtggcctgggccccctgccacgcgtgacctccctggacctgtctgggaacagcctgtacagcggcctgctggagcggctgctgggggaggcacccagcctgcataccctctcactggcggagaacagtctgactcgcctcacccgccacaccttccgggacatgcctgcgctggagcagcttgacctgcatagcaacgtgctgatggacatcgaggatggcgccttcgagggtctgccccgcctgacccatctcaacctctccaggaattccctcacctgcatctccgacttcagcctccagcagctgcgggtgctagacctgagctgcaacagcatcgaggcctttcagacggcctcccagccccaggctgagttccagctcacctggcttgacctgcgggagaacaaactgctccatttccccgacctggccgcgctcccgagactcatctacctgaacttgtccaacaacctcatccggctccccacagggccaccccaggacagcaagggcatccacgcaccttccgagggctggtcagccctgcccctctcagcccccagcgggaatgccagcggccgccccctttcccagctcttgaatctggatttgagctacaatgagattgagctcatccccgacagctttcttgagcacctgacctccctgtgcttcctgaacctcagcagaaactgcttgcggacctttgaggcccggcgcttaggctccctgccctgcctgatgctccttgacttaagccacaatgccctggagacactggaactgggcgccagagccctggggtctctgcggacgctgctcctacagggcaatgccctgcgggacctgcccccatacacctttgccaatctggccagcctgcagcggctcaacctgcaggggaaccgagtcagcccctgtggggggccagatgagcctggcccctccggctgtgtggccttctccggcatcacctccctccgcagcctgagcctggtggataatgagatagagctgctcagggcaggggccttcctccacaccccactgactgagctggacctttcttccaatcctgggctggaggtggccacgggggccttgggaggcctggaggcctccttggaggtcctggcactgcagggcaacgggctgatggtcctgcaggtggacctgccctgcttcatctgcctcaagcggctcaatcttgccgagaaccgcctgagccaccttcccgcctggacacaggctgtgtcactggaggtgctggacctgcgaaacaacagcttcagcctcctgccaggcagtgccatgggtggcctggagaccagcctccggcgcctctacctgcaggggaatccactcagctgctgcggcaatggctggctggcagcccagctgcaccagggccgtgtggacgtggacgccacccaggacctgatctgccgcttcagctcccaggaggaggtgtccctgagccacgtgcgtcccgaggactgtgagaaggggggactgaagaacatcaacctcatcatcatcctcaccttcatactggtctctgccatcctcctcaccacgctggccgcctgctgctgcgtccgccggcagaagtttaaccaacagtataaagcctaaagaagccgggagacactctaggtaaaaagcctcacccagatgacccccatccctcataccatggagtcatgagctgtctgggaagaatggacgtgctgggaccaactcaagaccttgttttgctgtcttcatcatcttacctgtgcttggcccacagtctggctcatgatgtgggctcagtaatgtgcgagaaagtgaaaatgccactctctccaccccattttacagaggagaacaccaaggcccagaggaagttaagggagagtcaatgggcagagccagggctaggccctggtggtgtgtggagcacccaggcagacccagtcctggttgggatcacacccacgggtgctactgcacgtaacactcctccttaggcctggaggccaaggtgtgggtccccacgcctgatctttgaaaacactacacagggctgctgtcacttcccagggcccaggcctcagcccaggcctcgggaccaactctttgtataacctacctgaatgtattaaaaactaattttggagaa

SEQ ID NO: 148025 - DNA, 801 bp, Homo sapiens
  Payload ID: 9296
  Gene Symbol: LRRC32
  Gene Name: leucine rich repeat containing 32
  ENST ID: ENST00000421973
  CDS Start-End: 244-801
gtccgcagcagctctcccaggaccccactctgccagtaagtcagctgaggccgagaggagggagagaggacctcagaggccagactgtgagctagtctgccctgctcctgcgtgtgaggggtcgttggcagggcttagggaaggagaccttgatttggtatagtgggaacatttgctttggagacagatgaactggattctgatcgtgaccctgctattttctccttgtgtgactttggagccatgagaccccagatcctgctgctcctggccctgctgaccctaggcctggctgcacaacaccaagacaaagtgccctgtaagatggtggacaagaaggtctcgtgccaggttctgggcctgctccaggtcccctcggtgctcccgccagacactgagacccttgatctatctgggaaccagctgcggagtatcctggcctcacccctgggcttctacacagcacttcgtcacctggacctgagcaccaatgagatcagcttcctccagccaggagccttccaggccctgacccacctggagcacctcagcctggctcacaaccggctggcgatggccactgcgctgagtgctggtggcctgggccccctgccacgcgtgacctccctggacctgtctgggaacagcctgtacagcggcctgctggagcggctgctgggggaggcacccagcctgcataccctctcactggcggagaacagtctgactcgcctcacccgccacaccttccgggacatgcctgcgctggagcagcttgacctgcatagcaacgtgctgatg

SEQ ID NO: 148026 - DNA, 1718 bp, Homo sapiens
  Payload ID: 9297
  Gene Symbol: LRRC34
  Gene Name: leucine rich repeat containing 34
  Uniprot ID: Q8IZ02
  ENST ID: ENST00000446859
  CDS Start-End: 117-1511
agtgaggcctcagggcccgggcaggcacagccagcgggactcgaagcaggctggcgccgaggctcgtgtagccgcctcacagctgcaggcggactgtaagtgcgcgcgcggtcgccatggcagcgcagccgccgcggccagtgggtgagaggagcatggggagctcccgggaggccgcccgtgcgccggccaggtccccggcttgggcctccactcaggccagtactccgggcgcggccctggcggtccagcgcgaatctccagaatctggtctccagaaacattattctaatctgtgtatggaaaaatcccagaaaattaatccttttatattgcatatactccaagaagtggatgaagaaattaaaaaggggctagcagcaggaatcacattaaacattgctggtaacaatcgcttagtgccagtagaaagagttacaggtgaagatttttggattctttccaaaattttaaagaattgtctgtatattaatggtttggatgttggatataaccttctatgtgatgttggtgcatactatgctgcgaaactgcttcagaaacaacttaatctcatttacttaaacctcatgtttaatgatattgggcccgaaggtggagaattgattgctaaagtgctacataagaatcggactctgaaatacctaagaatgactggaaacaaaattgaaaataaaggtggaatgttttttgctgcaatgctgcaaattaattcatcattagagaaattagatctgggtgactgtgatctgggaatgcaaagtgtgatagcatttgctacagtactaactcaaaaccaagcaattaaggcaataaacctaaaccgacctatactgtacagtgaacaggaagagtctacagtccatgtaggccgcatgttgaaagaaaatcactgtcttgttgcactacacatgtgtaagcatgatataaaaaacagtggtatacaacagttatgtgatgcactgtatctgaacagtagcctgcgctaccttgatgtcagctgcaacaaaataactcatgatggaatggtgtatttggctgatgtactgaaaagcaacactaccctggaagtaatagatctttcctttaacagaatagaaaatgcaggcgcaaactatctcagtgaaactcttacttcacacaacaggagtcttaaagcgttgtcagtagtcagcaacaacatagagggagaaggacttgttgcactttcacaatcaatgaaaacaaatctcactttctctcatatctacatttggggaaacaaatttgatgaggctacgtgtatagcatattcagacttaattcaaatgggttgtctaaaaccagacaatacagatgtggagccatttgtggtagatggacgtgtatatcttgcagaagtctccaatggccttaaaaagcattattattggacatcaacttatggagaatcttatgaccactcatctaatgcaggttttgctcttgttccagtaggtcaacagccatgaaaaagtagctgtaaaataattttcatacacttgtcttattgtttcacagagattaatattctatagcctattttcttttataaattaaaacaagttacttttttcaaatgtgtaaaagataatgactgtattaaactttgtataactgtctattgtgaaaaactgagtagggtaattttttaaaagaaattttacaatatagagact

SEQ ID NO: 148027 - DNA, 1899 bp, Homo sapiens
  Payload ID: 9297
  Gene Symbol: LRRC34
  Gene Name: leucine rich repeat containing 34
  Uniprot ID: Q8IZ02
  ENST ID: ENST00000522526
  CDS Start-End: 439-1737
agatgtcacctccttcaggaagccctccctggtggccccgccctttgggagcacaaaaccctttatgctcccaaagcccaacgcctttatcatgtgctgatgctactctgcttcttcgctggcccggcaggccggtgcacactttgtaggagcgggctttgtcataatcttctttgtagccccagccctagctcagcagcggagcccctcaaacctcgggaactcctccctgcaaaggagccaggacgccctccctcaggctgcctttaaccagggcagggtgacaaaggacctccacagagtaggcggtcactgccttagcagtgaggcctcagggcccgggcaggcacagccagcgggactcgaagcaggctggcgccgaggctcgtgtagccgcctcacagctgcaggcggactgtaagtgcgcgcgcggtcgccatggcagcgcagccgccgcggccagtgggtgagaggagcatggggagctcccgggaggccgcccgtgcgccggccaggtccccggcttgggcctccactcaggccagtactccgggcgcggccctggcggtccagcgcgaatctccagaatctggtctccagaaacattattctaatctgtgtatggaaaaatcccagaaaattaatccttttatattgcatatactccaagaagtggatgaagaaattaaaaaggggctagcagcaggaatcacattaaacattgctggtaacaatcgcttagtgccagtagaaagagttacaggtgaagatttttggattctttccaaaattttaaagaattgtctgtatattaatggtttggatgttggatataaccttctatgtgatgttggtgcatactatgctgcgaaactgcttcagaaacaacttaatctcatttacttaaacctcatgtttaatgatattgggcccgaaggtggagaattgattgctaaagtgctacataagaatcggactctgaaatacctaagaatgactggaaacaaaattgaaaataaaggtggaatgttttttgctgcaatgctgcaaattaattcatcattagagaaattagatctgggtgactgtgatctggaagagtctacagtccatgtaggccgcatgttgaaagaaaatcactgtcttgttgcactacacatgtgtaagcatgatataaaaaacagtggtatacaacagttatgtgatgcactgtatctgaacagtagcctgcgctaccttgatgtcagctgcaacaaaataactcatgatggaatggtgtatttggctgatgtactgaaaagcaacactaccctggaagtaatagatctttcctttaacagaatagaaaatgcaggcgcaaactatctcagtgaaactcttacttcacacaacaggagtcttaaagcgttgtcagtagtcagcaacaacatagagggagaaggacttgttgcactttcacaatcaatgaaaacaaatctcactttctctcatatctacatttggggaaacaaatttgatgaggctacgtgtatagcatattcagacttaattcaaatgggttgtctaaaaccagacaatacagatgtggagccatttgtggtagatggacgtgtatatcttgcagaagtctccaatggccttaaaaagcattattattggacatcaacttatggagaatcttatgaccactcatctaatgcaggttttgctcttgttccagtaggtcaacagccatgaaaaagtagctgtaaaataattttcatacacttgtcttattgtttcacagagattaatattctatagcctattttcttttataaattaaaacaagttacttttttcaaatgtgtaaaagataatgactgtattaaactttgtataactgtctattgtgaaaaa

SEQ ID NO: 148028 - DNA, 1781 bp, Homo sapiens
  Payload ID: 9297
  Gene Symbol: LRRC34
  Gene Name: leucine rich repeat containing 34
  ENST ID: ENST00000522830
  CDS Start-End: 408-1619
aaaaccctttatgctcccaaagcccaacgcctttatcatgtgctgatgctactctgcttcttcgctggcccggcaggccggtgcacactttgtaggagcgggctttgtcataatcttctttgtagccccagccctagctcagcagcggagcccctcaaacctcgggaactcctccctgcaaaggagccaggacgccctccctcaggctgcctttaaccagggcagggtgacaaaggacctccacagagtaggcggtcactgccttagcagtgaggcctcagggcccgggcaggcacagccagcgggactcgaagcaggctggcgccgaggctcgtgtagccgcctcacagctgcaggcggactaatctccagaatctggtctccagaaacattattctaatctgtgtatggaaaaatcccagaaaattaatccttttatattgcatatactccaagaagtggatgaagaaattaaaaaggggctagcagcaggaatcacattaaacattgctggtaacaatcgcttagtgccagtagaaagagttacaggtgaagatttttggattctttccaaaattttaaagaattgtctgtatattaatggtttggatgttggatataaccttctatgtgatgttggtgcatactatgctgcgaaactgcttcagaaacaacttaatctcatttacttaaacctcatgtttaatgatattgggcccgaaggtggagaattgattgctaaagtgctacataagaatcggactctgaaatacctaagaatgactggaaacaaaattgaaaataaaggtggaatgttttttgctgcaatgctgcaaattaattcatcattagagaaattagatctgggtgactgtgatctgggaatgcaaagtgtgatagcatttgctacagtactaactcaaaaccaagcaattaaggcaataaacctaaaccgacctatactgtacagtgaacaggaagagtctacagtccatgtaggccgcatgttgaaagaaaatcactgtcttgttgcactacacatgtgtaagcatgatataaaaaacagtggtatacaacagttatgtgatgcactgtatctgaacagtagcctgcgctaccttgatgtcagctgcaacaaaataactcatgatggaatggtgtatttggctgatgtactgaaaagcaacactaccctggaagtaatagatctttcctttaacagaatagaaaatgcaggcgcaaactatctcagtgaaactcttacttcacacaacaggagtcttaaagcgttgtcagtagtcagcaacaacatagagggagaaggacttgttgcactttcacaatcaatgaaaacaaatctcactttctctcatatctacatttggggaaacaaatttgatgaggctacgtgtatagcatattcagacttaattcaaatgggttgtctaaaaccagacaatacagatgtggagccatttgtggtagatggacgtgtatatcttgcagaagtctccaatggccttaaaaagcattattattggacatcaacttatggagaatcttatgaccactcatctaatgcaggttttgctcttgttccagtaggtcaacagccatgaaaaagtagctgtaaaataattttcatacacttgtcttattgtttcacagagattaatattctatagcctattttcttttataaattaaaacaagttacttttttcaaatgtgtaaaagataatgactgtattaaactttgtataactgtctattgtgaaaaa

SEQ ID NO: 148029 - DNA, 467 bp, Homo sapiens
  Payload ID: 9297
  Gene Symbol: LRRC34
  Gene Name: leucine rich repeat containing 34
  ENST ID: ENST00000528597
  CDS Start-End: 1-171
gaagagtctacagtccatgtaggccgcatgttgaaagaaaatcactgtcttgttgcactacacatgtgtaagcatgatataaaaaacagtggtatacaacagttatgtgatgcactgtatctgaacagtagcctgcgctaccttgatgtcagctggcatattcagacttaattcaaatgggttgtctaaaaccagacaatacagatgtggagccatttgtggtagatggacgtgtatatcttgcagaagtctccaatggccttaaaaagcattattattggacatcaacttatggagaatcttatgaccactcatctaatgcaggttttgctcttgttccagtaggtcaacagccatgaaaaagtagctgtaaaataattttcatacacttgtcttattgtttcacagagattaatattctatagcctattttcttttataaattaaaacaagttacttttttcaaa

SEQ ID NO: 148030 - DNA, 2395 bp, Homo sapiens
  Payload ID: 9298
  Gene Symbol: LRRC36
  Gene Name: leucine rich repeat containing 36
  Uniprot ID: Q1X8D7
  ENST ID: ENST00000329956
  CDS Start-End: 20-2284
aggtgagcggcgggcggggatggcggagcaatgggagctggacgaggaaggcattcgccgcctgggggcgctgacgctggagcagccggaactggtggagtctctttcattgcagggatcttatgctggcaaaatccattccattggtgatgccttcagaaattttaaaaatctccgatccttagatttatcaaggaatttgatcactagccttaagggaatccagtatttatgttcactccaagacctgaatttatattataacaacattccttcattagtggaagtgtcccgtctacaaccgttacccttcctcaaagaactggatttgagacttaatcctgttgtaaggaaagatacagattataggctctttgctgtatatacactacaaactctggagaaattagatgaccgaactgtacgtgaaggtgagagaaaagctgccaagctgcattttagtcagttgggcaacagtgaaaattttcttttagaggtggaaaaaagctctagggagaagacaatgaaaaactgtgtaacaggtgagagctctgcatcaaaagtcagtgctaatgttgacagcaggattgaaatggactcaaacaaaggactttttattcccttccccaaccgggaaataaaggattccctaagtacttctgcaactcagggcaatggtacacgtgatcagaaattagacaccttcccactggggacacagacacaggaagtagcaagaagggagatgccaagtgacaatcaccaggaagatgagttcagacactactcgcctcgtcagtccacagtccgatccccagagaagatgactagagaagggtaccaagtatcttttttggacaataagtcttcaggttcttctccagaaaaggaattgataccaaaacctgatacttttcatcttacccatgatgcctcattgagtaaatgcctggatgtgggtgattctagccagatccatccctatcagttaccttcagatgttggtctggaaaattatgacagttgttattctcaaactctatccctgcatggaagtcttggtaaaaggcctcagagaagcaagaactatcaagagtatagcataaagccttcaaatgacataaagaccaccgcttcacattcctgtggagacttattaacttctctgtcaaaccctgactccagcactggaaggcttttgaagcttagttcagatctgtatgccacaacccatttcaacagtgaccctgctgtacttgtcaatgtagagcaacaattatctaccagcctggatgatttaacaccagcacatggttctgtcccaaacaacgctgtcctgggaaacaggacaactcctctgcggacactgctgttgtctcctgggacttcagaacacagaaagatttttaccaagaggtcactaagcccatcgaagagaggattcaaatggaaggacaatatccttgccaacctgaatctaaagcatggtttccaagatgctacaggcagcgagcctctctctagtgacctgggtagtttgcacggtttggctggaaaccacagtccccccatctctgccagaaccccccatgtggccactgtcctcagacagctcctggagcttgtggataagcactggaatggctccggctccctcctcctcaacaagaagtttctcggtcctgcccgagatttgcttctgtctttggtagtcccggctccttctcagccgaggtgttgctcacatcctgaagacacgatgaaagcattctgcaggagggagcttgaactgaaggaggctgcgcagctggtccctaatgacatggaaagtttgaagcaaaaactggtcagagtgctggaggaaaacctcattttgtcagaaaaaattcaacagttggaggaaggtgctgccatctcaattgtgagtgggcaacagtcacatacttatgatgatcttctgcacaaaaaccaacagctgaccatgcaggtggcttgcctgaaccaggagcttgcccagctgaaaaagctggagaagacagttgccattctccatgaaagtcagagatccctggtggtaactaatgagtatctgctgcagcagctgaataaggagccaaaaggttattccgggaaagcgctcctgcctcctgagaagggtcatcatctggggagatcatcgccctttgggaaaagcacgttgtcttcctcctcaccagtggcacatgagactggtcagtatctaatacagagcgtcttggatgctgccccagagcctggcttatagagctagcatggaactcacaccacagcttccctggtccacagaggctctcaccgccattgccaccagtatggtggtatgtactcacaaagattaagaaagaaatgtattctg

SEQ ID NO: 148031 - DNA, 1765 bp, Homo sapiens
  Payload ID: 9298
  Gene Symbol: LRRC36
  Gene Name: leucine rich repeat containing 36
  Uniprot ID: Q1X8D7
  ENST ID: ENST00000435835
  CDS Start-End: 65-1654
tttttcctctgcgaatatggttttctgattaactactagttatgtctatgccaaaaaaagaaacatgctcagaccacggtttttgcctccagatgaccgaactgtacgtgaaggtgagagaaaagctgccaagctgcattttagtcagttgggcaacagtgaaaattttcttttagaggtggaaaaaagctctagggagaagacaatgaaaaactgtgtaacaggtgagagctctgcatcaaaagtcagtgctaatgttgacagcaggattgaaatggactcaaacaaaggactttttattcccttccccaaccgggaaataaaggattccctaagtacttctgcaactcagggcaatggtacacgtgatcagaaattagacaccttcccactggggacacagacacaggaagtagcaagaagggagatgccaagtgacaatcaccaggaagatgagttcagacactactcgcctcgtcagtccacagtccgatccccagagaagatgactagagaagggtaccaagtatcttttttggacaataagtcttcaggttcttctccagaaaaggaattgataccaaaacctgatacttttcatcttacccatgatgcctcattgagtaaatgcctggatgtgggtgattctagccagatccatccctatcagttaccttcagatgttggtctggaaaattatgacagttgttattctcaaactctatccctgcatggaagtcttggtaaaaggcctcagagaagcaagaactatcaagagtatagcataaagccttcaaatgacataaagaccaccgcttcacattcctgtggagacttattaacttctctgtcaaaccctgactccagcactggaaggcttttgaagcttagttcagatctgtatgccacaacccatttcaacagtgaccctgctgtacttgtcaatgtagagcaacaattatctaccagcctggatgatttaacaccagcacatggttctgtcccaaacaacgctgtcctgggaaacaggacaactcctctgcggacactgctgttgtctcctgggacttcagaacacagaaagatttttaccaagaggtcactaagcccatcgaagagaggattcaaatggaaggacaatatccttgccaacctgaatctaaagcatggtttccaagatgctacaggcagcgaggaaagtttgaagcaaaaactggtcagagtgctggaggaaaacctcattttgtcagaaaaaattcaacagttggaggaaggtgctgccatctcaattgtgagtgggcaacagtcacatacttatgatgatcttctgcacaaaaaccaacagctgaccatgcaggtggcttgcctgaaccaggagcttgcccagctgaaaaagctggagaagacagttgccattctccatgaaagtcagagatccctggtggtaactaatgagtatctgctgcagcagctgaataaggagccaaaaggttattccgggaaagcgctcctgcctcctgagaagggtcatcatctggggagatcatcgccctttgggaaaagcacgttgtcttcctcctcaccagtggcacatgagactggtcagtatctaatacagagcgtcttggatgctgccccagagcctggcttatagagctagcatggaactcacaccacagcttccctggtccacagaggctctcaccgccattgccaccagtatggtggtatgtactcacaaagattaagaaagaaatgtattctg

SEQ ID NO: 148032 - DNA, 572 bp, Homo sapiens
  Payload ID: 9298
  Gene Symbol: LRRC36
  Gene Name: leucine rich repeat containing 36
  ENST ID: ENST00000569552
  CDS Start-End: 92-160
aacacaccaagatgagactggtcctaatttttcctctgcgaatatggttttctgattaactactagttatgtctatgccaaaaaaagaaacatgctcagaccacggtttttgcctccagatgaccgaactgtacgtgaagctctagggagaagacaatgaaaaactgtgtaacaggtgagagctctgcatcaaaagtcagtgctaatgttgacagcaggattgaaatggagttcagacactactcgcctcgtcagtccacagtccgatccccagagaagatgactagagaagggtaccaagtatcttttttggacaataagtcttcaggttcttctccagaaaaggaattgataccaaaacctgatacttttcatcttacccatgatgcctcattgagtaaatgcctggatgtgggtgattctagccagatccatccctatcagttaccttcagatgttggtctggaaaattatgacagttgttattctcaaactctatccctgcatggaagtcttggtaaaaggcctcagagaagcaagaactatcaagagtatagcataaagccttcaaa

SEQ ID NO: 148033 - DNA, 589 bp, Homo sapiens
  Payload ID: 9298
  Gene Symbol: LRRC36
  Gene Name: leucine rich repeat containing 36
  ENST ID: ENST00000570075
  CDS Start-End: 20-136
aggtgagcggcgggcggggatggcggagcaatgggagctggacgaggaaggcattcgccgcctgggggcgctgacgctggagcagccggggaatccagtatttatgttcactccaagacctgaatttatattataacaacattccttcattagtggaagtgtcccgtctacaaccgttacccttcctcaaagaactggatttgagacttaatcctgttgtaaggaaagatacagattataggctctttgctgtatatacactacaaactctggagaaattagatgaccgaactgtacgtgaaggtgagagaaaagctgccaagctgcattttagtcagttgggcaacagtgaaaattttcttttagaggtggaaaaaagctctagggagaagacaatgaaaaactgtgtaacaggtgagagctctgcatcaaaagtcagtgctaatgttgacagcaggattgaaatggactcaaacaaaggactttttattcccttccccaaccgggaaataaaggattccctaagtacttctgcaactcagggcaatggtacacgtgatcagaaattagacaccttcccactggggac

SEQ ID NO: 148034 - DNA, 1387 bp, Homo sapiens
  Payload ID: 9298
  Gene Symbol: LRRC36
  Gene Name: leucine rich repeat containing 36
  ENST ID: ENST00000568010
  CDS Start-End: 100-492
ctgtctctaacacaccaagatgagactggtcctaatttttcctctgcgaatatggttttctgattaactactagttatgtctatgccaaaaaaagaaacatgctcagaccacggtttttgcctccagatgaccgaactgtacgtgaaggtgagagaaaagctgccaagctgcattttagtcagttgggcaacagtgaaaattttcttttagaggtggaaaaaagctctagggagaagacaatgaaaaactgtgtaacaggtgagagctctgcatcaaaagtcagtgctaatgttgacagcaggattgaaatggactcaaacaaaggactttttattcccttccccaaccgggaaataaaggattccctaagtacttctgcaactcagggcaatggtacacgtgatcagaaattagacaccttcccactggggacacagatctgtatgccacaacccatttcaacagtgaccctgctgtacttgtcaatgtagagcaacaattatctaccagcctggatgatttaacaccagcacatggttctgtcccaaacaacgctgtcctgggaaacaggacaactcctctgcggacactgctgttgtctcctgggacttcagaacacagaaagatttttaccaagaggtcactaagcccatcgaagagaggattcaaatggaaggacaatatccttgccaacctgaatctaaagcatggtttccaagatgctacaggcagcgagtgacctgggtagtttgcacggtttggctggaaaccacagtccccccatctctgccagaaccccccatgtggccactgtcctcagacagctcctggagcttgtggataagcactggaatggctccggctccctcctcctcaacaagaagtttctcggaaagtttgaagcaaaaactggtcagagtgctggaggaaaacctcattttgtcagaaaaaattcaacagttggaggaaggtgctgccatctcaattgtgagtgggcaacagtcacatacttatgatgatcttctgcacaaaaaccaacagctgaccatgcaggtggcttgcctgaaccaggagcttgcccagctgaaaaagctggagaagacagttgccattctccatgaaagtcagagatccctggtggtaactaatgagtatctgctgcagcagctgaataaggagccaaaaggttattccgggaaagcgctcctgcctcctgagaagggtcatcatctggggagatcatcgccctttgggaaaagcacgttgtcttcctcctcaccagtggcacatgagactggtcagtatctaatacagagcgtcttggatgctgccccagagcctggcttatagagctagcatggaactcacaccacagcttccctggtc

SEQ ID NO: 148035 - DNA, 2104 bp, Homo sapiens
  Payload ID: 9298
  Gene Symbol: LRRC36
  Gene Name: leucine rich repeat containing 36
  Uniprot ID: Q1X8D7
  ENST ID: ENST00000563189
  CDS Start-End: 92-1993
aacacaccaagatgagactggtcctaatttttcctctgcgaatatggttttctgattaactactagttatgtctatgccaaaaaaagaaacatgctcagaccacggtttttgcctccagatgaccgaactgtacgtgaaggtgagagaaaagctgccaagctgcattttagtcagttgggcaacagtgaaaattttcttttagaggtggaaaaaagctctagggagaagacaatgaaaaactgtgtaacaggtgagagctctgcatcaaaagtcagtgctaatgttgacagcaggattgaaatggactcaaacaaaggactttttattcccttccccaaccgggaaataaaggattccctaagtacttctgcaactcagggcaatggtacacgtgatcagaaattagacaccttcccactggggacacagacacaggaagtagcaagaagggagatgccaagtgacaatcaccaggaagatgagttcagacactactcgcctcgtcagtccacagtccgatccccagagaagatgactagagaagggtaccaagtatcttttttggacaataagtcttcaggttcttctccagaaaaggaattgataccaaaacctgatacttttcatcttacccatgatgcctcattgagtaaatgcctggatgtgggtgattctagccagatccatccctatcagttaccttcagatgttggtctggaaaattatgacagttgttattctcaaactctatccctgcatggaagtcttggtaaaaggcctcagagaagcaagaactatcaagagtatagcataaagccttcaaatgacataaagaccaccgcttcacattcctgtggagacttattaacttctctgtcaaaccctgactccagcactggaaggcttttgaagcttagttcagatctgtatgccacaacccatttcaacagtgaccctgctgtacttgtcaatgtagagcaacaattatctaccagcctggatgatttaacaccagcacatggttctgtcccaaacaacgctgtcctgggaaacaggacaactcctctgcggacactgctgttgtctcctgggacttcagaacacagaaagatttttaccaagaggtcactaagcccatcgaagagaggattcaaatggaaggacaatatccttgccaacctgaatctaaagcatggtttccaagatgctacaggcagcgagcctctctctagtgacctgggtagtttgcacggtttggctggaaaccacagtccccccatctctgccagaaccccccatgtggccactgtcctcagacagctcctggagcttgtggataagcactggaatggctccggctccctcctcctcaacaagaagtttctcggtcctgcccgagatttgcttctgtctttggtagtcccggctccttctcagccgaggtgttgctcacatcctgaagacacgatgaaagcattctgcaggagggagcttgaactgaaggaggctgcgcagctggtccctaatgacatggaaagtttgaagcaaaaactggtcagagtgctggaggaaaacctcattttgtcagaaaaaattcaacagttggaggaaggtgctgccatctcaattgtgagtgggcaacagtcacatacttatgatgatcttctgcacaaaaaccaacagctgaccatgcaggtggcttgcctgaaccaggagcttgcccagctgaaaaagctggagaagacagttgccattctccatgaaagtcagagatccctggtggtaactaatgagtatctgctgcagcagctgaataaggagccaaaaggttattccgggaaagcgctcctgcctcctgagaagggtcatcatctggggagatcatcgccctttgggaaaagcacgttgtcttcctcctcaccagtggcacatgagactggtcagtatctaatacagagcgtcttggatgctgccccagagcctggcttatagagctagcatggaactcacaccacagcttccctggtccacagaggctctcaccgccattgccaccagtatggtggtatgtactcacaaagattaagaaagaaatgtattctg

SEQ ID NO: 148036 - DNA, 1539 bp, Homo sapiens
  Payload ID: 9298
  Gene Symbol: LRRC36
  Gene Name: leucine rich repeat containing 36
  ENST ID: ENST00000567211
  CDS Start-End: 118-186
atagcattattttgtgacctgtctctaacacaccaagatgagactggtcctaatttttcctctgcgaatatggttttctgattaactactagttatgtctatgccaaaaaaagaaacatgctcagaccacggtttttgcctccagatgaccgaactgtacgtgaagctctagggagaagacaatgaaaaactgtgtaacaggtgagagctctgcatcaaaagtcagtgctaatgttgacagcaggattgaaatggactcaaacaaaggactttttattcccttccccaaccgggaaataaaggattccctaagtacttctgcaactcagggcaatggtacacgtgatcagaaattagacaccttcccactggggacacagatctgtatgccacaacccatttcaacagtgaccctgctgtacttgtcaatgtagagcaacaattatctaccagcctggatgatttaacaccagcacatggttctgtcccaaacaacgctgtcctgggaaacaggacaactcctctgcggacactgctgttgtctcctgggacttcagaacacagaaagatttttaccaagaggtcactaagcccatcgaagagaggattcaaatggaaggacaatatccttgccaacctgaatctaaagcatggtttccaagatgctacaggcagcgaggcaagtgttggcttgtttgtgtttgtgcgagaaacaggtcaggttcgagaccagaatgagggttctgttgggaatggaggtggttctgaccaacagggctagaaattcaaagagattttcagaggctggtggctaatactgccaagctaacacctgttgagccttctgcccttgggaaagtcattcccccactgctgccattttctcacctatatcacagggagaactgtccctgatctacttccggctgaagattgaactctgtagcatctatgtttacagtctcatcatatttacacatttgcttcggccacacatgaaatagttcttataaaagcattgcttcaggctgggcacagtggcgcatgcctgtaatcccagcactttgggaggctgagtgggtggatcacctcaggtcaggagttcaagaccagccaggccaacatggcgaaaccccatctctactgaaaatacaaaaattagctgggtgtggtggcgcacgcctgtagtgccagctactctactcgggaggctgaggcaggagactcacttgaacccaggaggtggaggttgcagtgagccgagatcacgccactgcactccagcctgggtgacagagtgactcagtttcgtaaaaaataatagtaataaaagcattgctttgcttttctgtctagaagttaaaaggatttaaaatttttttccaatgtagaagcaaacagaagatgaattagattatccaagggatttttagttcagagaatgatttaaaaatcaagaaccattcccacataaacaatatacatgtaattcattttataaaatatcctagtggccaggcacggtggcttacatctgta

SEQ ID NO: 148037 - DNA, 2028 bp, Homo sapiens
  Payload ID: 9298
  Gene Symbol: LRRC36
  Gene Name: leucine rich repeat containing 36
  ENST ID: ENST00000567723
  CDS Start-End: 92-472
aacacaccaagatgagactggtcctaatttttcctctgcgaatatggttttctgattaactactagttatgtctatgccaaaaaaagaaacatgctcagaccacggtttttgcctccagatgaccgaactgtacgtgaaggtgagagaaaagctgccaagctgcattttagtcagttgggcaacagtgaaaattttcttttagaggtggaaaaaagctctagggagaagacaatgaaaaactgtgtaacaggtgagagctctgcatcaaaagtcagtgctaatgttgacagcaggattgaaatggaaagagtcttgctctgtcgcccagactggagtgctgtggcgcgatctcggctcactgcaacctctacctcctgggttcaagcagttctcctgcctcagcctagcgagcagctgggattacagactcaaacaaaggactttttattcccttccccaaccgggaaataaaggattccctaagtacttctgcaactcagggcaatggtacacgtgatcagaaattagacaccttcccactggggacacagagttcagacactactcgcctcgtcagtccacagtccgatccccagagaagatgactagagaagggtaccaagtatcttttttggacaataagtcttcaggttcttctccagaaaaggaattgataccaaaacctgatacttttcatcttacccatgatgcctcattgagtaaatgcctggatgtgggtgattctagccagatccatccctatcagttaccttcagatgttggtctggaaaattatgacagttgttattctcaaactctatccctgcatggaagtcttggtaaaaggcctcagagaagcaagaactatcaagagtatagcataaagccttcaaatgacataaagaccaccgcttcacattcctgtggagacttattaacttctctgtcaaaccctgactccagcactggaaggcttttgaagcttagttcagatctgtatgccacaacccatttcaacagtgaccctgctgtacttgtcaatgtagagcaacaattatctaccagcctggatgatttaacaccagcacatggttctgtcccaaacaacgctgtcctgggaaacaggacaactcctctgcggacactgctgttgtctcctgggacttcagaacacagaaagatttttaccaagaggtcactaagcccatcgaagagaggattcaaatggaaggacaatatccttgccaacctgaatctaaagcatggtttccaagatgctacaggcagcgagcctctctctagtgacctgggtagtttgcacggtttggctggaaaccacagtccccccatctctgccagaaccccccatgtggccactgtcctcagacagctcctggagcttgtggataagcactggaatggctccggctccctcctcctcaacaagaagtttctcggaaagtttgaagcaaaaactggtcagagtgctggaggaaaacctcattttgtcagaaaaaattcaacagttggaggaaggtgctgccatctcaattgtgagtgggcaacagtcacatacttatgatgatcttctgcacaaaaaccaacagctgaccatgcaggtggcttgcctgaaccaggagcttgcccagctgaaaaagctggagaagacagttgccattctccatgaaagtcagagatccctggtggtaactaatgagtatctgctgcagcagctgaataaggagccaaaaggttattccgggaaagcgctcctgcctcctgagaagggtcatcatctggggagatcatcgccctttgggaaaagcacgttgtcttcctcctcaccagtggcacatgagactggtcagtatctaatacagagcgtcttggatgctgccccagagcctggcttatagagctagcatggaactcacaccacagcttccctggtccacagaggctctcaccgccattgccaccagtatggtggtatgtactcacaaagattaagaaagaaatgtattctg

SEQ ID NO: 148038 - DNA, 1148 bp, Homo sapiens
  Payload ID: 9298
  Gene Symbol: LRRC36
  Gene Name: leucine rich repeat containing 36
  ENST ID: ENST00000567823
  CDS Start-End: 80-304
tgagactggtcctaatttttcctctgcgaatatggttttctgattaactactagttatgtctatgccaaaaaaagaaacatgctcagaccacggtttttgcctccagatgaccgaactgtacgtgaaggtgagagaaaagctgccaagctgcattttagtcagttgggcaacagtgaaaattttcttttagaggtggaaaaaagctctagggagaagacaatgaaaaactgtgtaacaggtgagagctctgcatcaaaagtcagtgctaatgttgacagcaggattgaaatggcctctctctagtgacctgggtagtttgcacggtttggctggaaaccacagtccccccatctctgccagaaccccccatgtggccactgtcctcagacagctcctggagcttgtggataagcactggaatggctccggctccctcctcctcaacaagaagtttctcggtcctgcccgagatttgcttctgtctttggtagtcccggctccttctcagccgaggtgttgctcacatcctgaagacacgatgaaagcattctgcaggagggagcttgaactgaaggaggctgcgcagctggtccctaatgacatggaaagtttgaagcaaaaactggtcagagtgctggaggaaaacctcattttgtcagaaaaaattcaacagttggaggaaggtgctgccatctcaattgtgagtgggcaacagtcacatacttatgatgatcttctgcacaaaaaccaacagctgaccatgcaggtggcttgcctgaaccaggagcttgcccagctgaaaaagctggagaagacagttgccattctccatgaaagtcagagatccctggtggtaactaatgagtatctgctgcagcagctgaataaggagccaaaaggttattccgggaaagcgctcctgcctcctgagaagggtcatcatctggggagatcatcgccctttgggaaaagcacgttgtcttcctcctcaccagtggcacatgagactggtcagtatctaatacagagcgtcttggatgctgccccagagcctggcttatagagctagcatggaactcacaccacagcttccctggtccacagaggctctcaccgccattgccaccagtatggtggtatgtactca

SEQ ID NO: 148039 - DNA, 210 bp, Homo sapiens
  Payload ID: 9298
  Gene Symbol: LRRC36
  Gene Name: leucine rich repeat containing 36
  ENST ID: ENST00000561948
  CDS Start-End: 18-210
gtgagcggcgggcggggatggcggagcaatgggagctggacgaggaaggcattcgccgcctgggggcgctgacgctggagcagccggactcaaacaaaggactttttattcccttccccaaccgggaaataaaggattccctaagtacttctgcaactcagggcaatggtacacgtgatcagaaattagacaccttcccactggggacac

SEQ ID NO: 148040 - DNA, 562 bp, Homo sapiens
  Payload ID: 9298
  Gene Symbol: LRRC36
  Gene Name: leucine rich repeat containing 36
  ENST ID: ENST00000561821
  CDS Start-End: 79-147
gagactggtcctaatttttcctctgcgaatatggttttctgattaactactagttatgtctatgccaaaaaaagaaacatgctcagaccacggtttttgcctccagatgaccgaactgtacgtgaagctctagggagaagacaatgaaaaactgtgtaacaggtgagagctctgcatcaaaagtcagtgctaatgttgacagcaggattgaaatggactcaaacaaaggactttttattcccttccccaaccgggaaataaaggattccctaagtacttctgcaactcagggcaatggtacacgtgatcagaaattagacaccttcccactggggacacagacacaggaagtagcaagaagggagatgccaagtgacaatcaccaggaagatgagttcagacactactcgcctcgtcagtccacagtccgatccccagagaagatgactagagaagggtaccaagtatcttttttggacaataagtcttcaggttcttctccagaaaaggaattgataccaaaacctgatacttttcatcttacccatgatgcctcattgag

SEQ ID NO: 148041 - DNA, 747 bp, Homo sapiens
  Payload ID: 9298
  Gene Symbol: LRRC36
  Gene Name: leucine rich repeat containing 36
  ENST ID: ENST00000569499
  CDS Start-End: 498-747
aggtgagcggcgggcggggatggcggagcaatgggagctggacgaggaaggcattcgccgcctgggggcgctgacgctggagcagccggggatcttatgctggcaaaatccattccattggtgatgccttcagaaattttaaaaatctccgatccttagatttatcaaggaatttgatcactagccttaagggaatccagtatttatgttcactccaagacctgaatttatattataacaacattccttcattagtggaagtgtcccgtctacaaccgttacccttcctcaaagaactggatttgagacttaatcctgttgtaaggaaagatacagattataggctctttgctgtatatacactacaaactctggagaaattagatgaccgaactgtacgtgaaggtgagagaaaagctgccaagctgcattttagtcagttgggcaacagtgaaaattttcttttagaggtggaaaaaagctctagggagaagacaatgaaaaactgtgtaacaggtgagagctctgcatcaaaagtcagtgctaatgttgacagcaggattgaaatggactcaaacaaaggactttttattcccttccccaaccgggaaataaaggattccctaagtacttctgcaactcagggcaatggtacacgtgatcagaaattagacaccttcccactggggacacagacacaggaagtagcaagaagggagatgccaagtgacaatcaccaggaagatg

SEQ ID NO: 148042 - DNA, 596 bp, Homo sapiens
  Payload ID: 9298
  Gene Symbol: LRRC36
  Gene Name: leucine rich repeat containing 36
  ENST ID: ENST00000568804
  CDS Start-End: 508-596
agaagctgtggaaagaaaactgaagtggaaggcggggaacctgagatagaggcgagggaaccacagagaagcgaactggtggagtctctttcattgcagggatcttatgctggcaaaatccattccattggtgatgccttcagaaattttaaaaatctccgatccttagatttatcaaggaatttgatcactagccttaagggaatccagtatttatgttcactccaagacctgaatttatattataacaacattccttcattagtggaagtgtcccgtctacaaccgttacccttcctcaaagaactggatttgagacttaatcctgttgtaaggaaagatacagattataggctctttgctgtatatacactacaaactctggagaaattagatgaccgaactgtacgtgaaggtgagagaaaagctgccaagctgcattttagtcagttgggcaacagtgaaaattttcttttagaggtggaaaaaagctctagggagaagacaatgaaaaactgtgtaacaggtgagagctctgcatcaaaagtcagtgctaatgttgacagcaggattgaaatggactcaaacaaaggact

SEQ ID NO: 148043 - DNA, 1888 bp, Homo sapiens
  Payload ID: 9298
  Gene Symbol: LRRC36
  Gene Name: leucine rich repeat containing 36
  ENST ID: ENST00000565019
  CDS Start-End: 1-826
ggacgaggaaggcattcgccgcctgggggcgctgacgctggagcagccggagacaggttcttgctatgttgcccaggctggacttgaacttctggactcaagcaatcctgtctcagcctccccagtaactgagactacagaactggtggagtctctttcattgcagggatcttatgctggcaaaatccattccattggtgatgccttcagaaattttaaaaatctccgatccttagatttatcaaggaatttgatcactagccttaagggaatccagtatttatgttcactccaagacctgaatttatattataacaacattccttcattagtggaagtgtcccgtctacaaccgttacccttcctcaaagaactggatttgagacttaatcctgttgtaaggaaagatacagattataggctctttgctgtatatacactacaaactctggagaaattagatgaccgaactgtacgtgaaggtgagagaaaagctgccaagctgcattttagtcagttgggcaacagtgaaaattttcttttagaggtggaaaaaagctctagggagaagacaatgaaaaactgtgtaacaggtgagagctctgcatcaaaagtcagtgctaatgttgacagcaggattgaaatggactcaaacaaaggactttttattcccttccccaaccgggaaataaaggattccctaagtacttctgcaactcagggcaatggtacacgtgatcagaaattagacaccttcccactggggacacagatctgtatgccacaacccatttcaacagtgaccctgctgtacttgtcaatgtagagcaacaattatctaccagcctggatgatttaacaccagcacatggttctgtcccaaacaacgctgtcctgggaaacaggacaactcctctgcggacactgctgttgtctcctgggacttcagaacacagaaagatttttaccaagaggtcactaagcccatcgaagagaggattcaaatggaaggacaatatccttgccaacctgaatctaaagcatggtttccaagatgctacaggcagcgagaaccccccatgtggccactgtcctcagacagctcctggagcttgtggataagcactggaatggctccggctccctcctcctcaacaagaagtttctcggtcctgcccgagatttgcttctgtctttggtagtcccggctccttctcagccgaggtgttgctcacatcctgaagacacgatgaaagcattctgcaggagggagcttgaactgaaggaggctgcgcagctggtccctaatgacatggaaagtttgaagcaaaaactggtcagagtgctggaggaaaacctcattttgtcagaaaaaattcaacagttggaggaaggtgctgccatctcaattgtgagtgggcaacagtcacatacttatgatgatcttctgcacaaaaaccaacagctgaccatgcaggtggcttgcctgaaccaggagcttgcccagctgaaaaagctggagaagacagttgccattctccatgaaagtcagagatccctggtggtaactaatgagtatctgctgcagcagctgaataaggagccaaaaggttattccgggaaagcgctcctgcctcctgagaagggtcatcatctggggagatcatcgccctttgggaaaagcacgttgtcttcctcctcaccagtggcacatgagactggtcagtatctaatacagagcgtcttggatgctgccccagagcctggcttatagagctagcatggaactcacaccacagcttccctggtccacagaggctctcaccgccattgccaccagtatggtggtatgtactcacaaagattaagaaagaaatgtattctgatt

SEQ ID NO: 148044 - DNA, 5177 bp, Homo sapiens
  Payload ID: 9299
  Gene Symbol: LRRC37A2
  Gene Name: leucine rich repeat containing 37, member A2
  Uniprot ID: A6NM11
  ENST ID: ENST00000333412
  CDS Start-End: 4-5106
agaatgtcttctgctcagtgcccggcactagtgtgtgtcatgtcccggctgcgtttctggggcccatggcccctccttatgtggcaactattgtggctactagttaaggaggctcagcctctggagtgggtcaaggacccgctccagctcacctctaatcccctggggccgcctgactcctggtcttcccactcctcccatttcccacgggaatctccccatgcgcctactctcccagcagacccgtgggactttgatcacctggggccctctgcttcctcagagatgccagccccaccccaggaatcgactgaaaatttggttccattcctggacacctgggattcagctggagagcagcccctggagccagagcagttcttggcttcacagcaggatttaaaggacaagctgagtccacaggaaagactccctgtttcgcccaagaagctgaagaaagatccagctcagcgttggagccttgctgagattattggaattacacgccaattatccacacctcagagtcagaaacagactttgcagaatgaatattccagtacagatacaccgtatcccggtagcctgcctccagaactccgggtgaagtcagatgagcctccagggccctctgagcaagttggaccttctcaattccatctagagcccgaaactcaaaatccagagacccttgaagacatccagtcctcttcactccagcaagaagccccagcacagcttccacagctccttgaggaagaaccttcttcaatgcagcaggaggccccagctctgcctccagagtcctctatggagagtctaactctaccgaatcatgaggtgtcagttcaacctccaggtgaggatcaagcttattatcacttgcccaacattacagttaaacctgcagatgtggaggttaccataacttcagagcctaccaatgagacagaatcttcccaagcccagcaggagaccccaattcagtttccagaggaggtggaaccttctgcaacccaacaggaggccccaattgagcctccagttcctcctatggagcatgaactttccatcagtgagcagcagcagccagttcagccttctgagtctcctagggaggtcgaatcttctccgacccagcaggagaccccaggtcagcctccagaacatcatgaagtcacagtttcacctccaggtcaccatcaaactcatcatttagcttcacccagtgtctctgtgaagcctccagacgtgcagctcaccatagcagcagagcctagtgcagaggtgggaacttctctagtccaccaggaggctacaactcggctctcagggtcaggtaatgatgtagaacctcccgccatccagcacgggggcccacctctgcttccagagtcatcagaagaagctggacctttagcagttcaacaggagacttcatttcaatctccggaacctattaataatgagaacccctctccaacccagcaggaggctgcagctgagcatccacagaccgctgaggagggtgagtcttccctaacccatcaggaggccccagctcagactccagagttccctaatgtagttgtagctcaacctccagagcattcacacctgactcaagccacagttcaacctttggatctggggtttaccatcactccagaatccaagacagaggttgaactttctccaaccatgaaggagaccccaactcagcctcctaagaaagttgtaccccaacttcgagtatatcaaggggtaacaaatccaacaccaggtcaggatcaagctcagcatccagtgtcacccagcgttacagttcaacttttggacctgggacttaccatcactccagaacctactacggaggttggacattctacacccccgaagaggactatagtttctccaaagcatcctgaggtgacacttccacatccagaccaggttcagactcagcattcacacctgactcgagccacagttcaacctttggacctggggtttaccatcactccaaaatccatgacagaggttgaaccttctacagccctgatgactacagctcctcctccaggacaccctgaggtgacacttccaccttcagacaagggtcaggctcagcattcacacctgactcaagccaccgttcaacctctggacctggagcttaccataactacaaaacctactacagaggttaaaccatctccaaccacggaggagacctcaactcagcctccagacctgggacttgccatcattccagaacccactacagagactagacattctacagccctggagaagactacagctcctcgtccagaccgggttcagactctgcatcgaagcctgactgaagtcacaggtccacctactgaactagaacctgctcaggattcactggtgcagtctgaaagttacacccaaaataaggctttaactgcaccagaggaacacaaggcctccacaagcaccaacatatgtgagctctgtacctgcggagatgagatgttgtcatgtattgatctcaacccagagcagaggctccgccaagtgcctgtgccagagcccaacacccacaatggcaccttcaccatcttaaatttccaaggaaactatatttcttacattgatggaaatgtatggaaagcatacagttggaccgagaaactaattctcagagaaaataacttgactgaattacacaaggattcatttgaaggcctgctatccctccagtatttagatttatcctgcaataaaatacagtctattgaaagacatacatttgaaccactaccatttttgaagtttataaatcttagttgcaatgtaattacagaactcagctttggaacatttcaggcctggcacggaatgcagtttttacataagttaattctcaatcacaatcctctgacaactgttgaagatccgtatctctttaaattgccagcattaaaatatctagacatgggaacaacgctagtcccacttacaacacttaagaacattctcatgatgactgttgaactggaaaaactgatcttacctagccatatggcctgctgcctctgccaatttaaaaacagcattgaggctgtctgcaagacagtcaagctgcattgcaacagtgcatgtctgacaaacaccacacattgtcctgaagaagcatcggtagggaatccagaaggagcgttcatgaaggtgttacaagcccggaagaactacacaagcactgagctgattgttgagccagaggagccctcagacagcagtggcatcaacttgtcaggctttgggagtgagcagctagacaccaatgacgagagtgattttatcagtacactaagttacatcttgccttatttctcagcggtaaacctagatgtgaaatcactgttactaccgttcattaaactgccaaccacaggaaacagcctggcaaagattcaaactgtaggccaaaaccggcagagagtgaagagagtcctcatgggcccaaggagcatccagaaaaggcacttcaaagaggtaggaaggcagagcatcaggagggaacagggtgcccaggcatctgtggagaacgctgccgaagaaaaaaggctcgggagtccagccccaagggaggtggaacagccccacacacagcaggggcctgagaagttagcgggaaacgccgtctacaccaagccttccttcacccaagagcataaggcagcagtctctgtgctgaaacccttctccaagggcgcgccttctacctccagccctgcaaaagccctaccacaggtgagagacagatggaaagacttaacccacgctatttccattttagaaagtgcaaaggctagagttacaaatacgaagacgtctaaaccaatcgtacatgccagaaaaaaataccgctttcacaaaactcgctcccacgtgacccacagaacacccaaagtcaaaaagagtccaaaggtcagaaagaaaagttatctgagtagactgatgctcgcaaacaggcttccattctctgcagcgaagagcctcataaattccccttcacaaggggctttttcatccttaggagacctgagtcctcaagaaaacccttttctggaagtatctgctccttcagaacattttatagaaaacaataatacaaaacacacaactgcaagaaatgcctttgaagaaaatgattttatggaaaacactaacatgccagaaggaaccatctctgaaaacacaaactacaatcatcctcatgaggcagattccgctgggactgcattcaacttagggccaactgttaaacaaactgagacaaaatgggaatacaacaacgtgggcactgacctgtcccccgagcccaaaagcttcaattacccattgctctcgtccccaggtgatcagtttgaaattcagctaacccagcagctacagtcccttatccccaacaacaatgtgagaaggctcattgctcatgttatccggaccttgaagatggactgctctggggcccatgtgcaagtgacctgtgccaagctcatctccaggacaggccacctgatgaagcttctcagtgggcagcaggaagtaaaggcatccaagatagaatgggatacggaccaatggaagattgagaactacattaatgagagcacagaagcccagagtgaacagaaagagaagtcgcttgagctcaaaaaagaagttccaggatatggctatactgacaaactcatcttggcattaattgttactggaatactaacgattttgattatacttttctgcctcattgtgatatgttgtcaccgaaggtcattacaagaagatgaagaaggattctcaaggggcattttcagatttctgccatggaggggatgctcttcgcgaagggagagtcaggatggactttcctcatttggacagccgctctggtttaaagatatgtacaaacctctcagtgccacaagaataaataatcatgcatggaagctgcacaagaagtcatctaatgaggacaagatcctcaacagggaccctggggacagcgaagccccaacggaggaggaggagagtgaagccctgccataggaggagaacacagcccacctcaggcctcctgcaaaaatacatagaataaacaacaacagttactaaatgaa

SEQ ID NO: 148045 - DNA, 5669 bp, Homo sapiens
  Payload ID: 9299
  Gene Symbol: LRRC37A2
  Gene Name: leucine rich repeat containing 37, member A2
  Uniprot ID: A6NM11
  ENST ID: ENST00000576629
  CDS Start-End: 496-5598
gctgaagtgcaatgttgtgatctcggctcactgcaacctctgcctcccaggttcaagcgattctcctgctttggcctcctgagtagctgggattgcaggtcagttgctctccctggaaggaagagtgttctcggatttcaccttaaaggaggaaggctgccagaactgaactagcacttctgaatatcctgaggcgaggtccggtgacttccttgggaagctctgccgcgcccccaccccaccctaccccaccctaccccaccacagcaggcgctggagtcctgggaccaccagggtctgaggcccaaatccttcctcactaaggggaggagaggggtgttccggcagggcaggatgggaaggcgtgcttgggcgggattgtgacataagagtgccctggtgacatggagcagatctgtgacataaataaaggtgtcataaagacagggcggggctcacgcttagaaggggcacgagcgtctcggagctgccagaatgtcttctgctcagtgcccggcactagtgtgtgtcatgtcccggctgcgtttctggggcccatggcccctccttatgtggcaactattgtggctactagttaaggaggctcagcctctggagtgggtcaaggacccgctccagctcacctctaatcccctggggccgcctgactcctggtcttcccactcctcccatttcccacgggaatctccccatgcgcctactctcccagcagacccgtgggactttgatcacctggggccctctgcttcctcagagatgccagccccaccccaggaatcgactgaaaatttggttccattcctggacacctgggattcagctggagagcagcccctggagccagagcagttcttggcttcacagcaggatttaaaggacaagctgagtccacaggaaagactccctgtttcgcccaagaagctgaagaaagatccagctcagcgttggagccttgctgagattattggaattacacgccaattatccacacctcagagtcagaaacagactttgcagaatgaatattccagtacagatacaccgtatcccggtagcctgcctccagaactccgggtgaagtcagatgagcctccagggccctctgagcaagttggaccttctcaattccatctagagcccgaaactcaaaatccagagacccttgaagacatccagtcctcttcactccagcaagaagccccagcacagcttccacagctccttgaggaagaaccttcttcaatgcagcaggaggccccagctctgcctccagagtcctctatggagagtctaactctaccgaatcatgaggtgtcagttcaacctccaggtgaggatcaagcttattatcacttgcccaacattacagttaaacctgcagatgtggaggttaccataacttcagagcctaccaatgagacagaatcttcccaagcccagcaggagaccccaattcagtttccagaggaggtggaaccttctgcaacccaacaggaggccccaattgagcctccagttcctcctatggagcatgaactttccatcagtgagcagcagcagccagttcagccttctgagtctcctagggaggtcgaatcttctccgacccagcaggagaccccaggtcagcctccagaacatcatgaagtcacagtttcacctccaggtcaccatcaaactcatcatttagcttcacccagtgtctctgtgaagcctccagacgtgcagctcaccatagcagcagagcctagtgcagaggtgggaacttctctagtccaccaggaggctacaactcggctctcagggtcaggtaatgatgtagaacctcccgccatccagcacgggggcccacctctgcttccagagtcatcagaagaagctggacctttagcagttcaacaggagacttcatttcaatctccggaacctattaataatgagaacccctctccaacccagcaggaggctgcagctgagcatccacagaccgctgaggagggtgagtcttccctaacccatcaggaggccccagctcagactccagagttccctaatgtagttgtagctcaacctccagagcattcacacctgactcaagccacagttcaacctttggatctggggtttaccatcactccagaatccaagacagaggttgaactttctccaaccatgaaggagaccccaactcagcctcctaagaaagttgtaccccaacttcgagtatatcaaggggtaacaaatccaacaccaggtcaggatcaagctcagcatccagtgtcacccagcgttacagttcaacttttggacctgggacttaccatcactccagaacctactacggaggttggacattctacacccccgaagaggactatagtttctccaaagcatcctgaggtgacacttccacatccagaccaggttcagactcagcattcacacctgactcgagccacagttcaacctttggacctggggtttaccatcactccaaaatccatgacagaggttgaaccttctacagccctgatgactacagctcctcctccaggacaccctgaggtgacacttccaccttcagacaagggtcaggctcagcattcacacctgactcaagccaccgttcaacctctggacctggagcttaccataactacaaaacctactacagaggttaaaccatctccaaccacggaggagacctcaactcagcctccagacctgggacttgccatcattccagaacccactacagagactagacattctacagccctggagaagactacagctcctcgtccagaccgggttcagactctgcatcgaagcctgactgaagtcacaggtccacctactgaactagaacctgctcaggattcactggtgcagtctgaaagttacacccaaaataaggctttaactgcaccagaggaacacaaggcctccacaagcaccaacatatgtgagctctgtacctgcggagatgagatgttgtcatgtattgatctcaacccagagcagaggctccgccaagtgcctgtgccagagcccaacacccacaatggcaccttcaccatcttaaatttccaaggaaactatatttcttacattgatggaaatgtatggaaagcatacagttggaccgagaaactaattctcagagaaaataacttgactgaattacacaaggattcatttgaaggcctgctatccctccagtatttagatttatcctgcaataaaatacagtctattgaaagacatacatttgaaccactaccatttttgaagtttataaatcttagttgcaatgtaattacagaactcagctttggaacatttcaggcctggcacggaatgcagtttttacataagttaattctcaatcacaatcctctgacaactgttgaagatccgtatctctttaaattgccagcattaaaatatctagacatgggaacaacgctagtcccacttacaacacttaagaacattctcatgatgactgttgaactggaaaaactgatcttacctagccatatggcctgctgcctctgccaatttaaaaacagcattgaggctgtctgcaagacagtcaagctgcattgcaacagtgcatgtctgacaaacaccacacattgtcctgaagaagcatcggtagggaatccagaaggagcgttcatgaaggtgttacaagcccggaagaactacacaagcactgagctgattgttgagccagaggagccctcagacagcagtggcatcaacttgtcaggctttgggagtgagcagctagacaccaatgacgagagtgattttatcagtacactaagttacatcttgccttatttctcagcggtaaacctagatgtgaaatcactgttactaccgttcattaaactgccaaccacaggaaacagcctggcaaagattcaaactgtaggccaaaaccggcagagagtgaagagagtcctcatgggcccaaggagcatccagaaaaggcacttcaaagaggtaggaaggcagagcatcaggagggaacagggtgcccaggcatctgtggagaacgctgccgaagaaaaaaggctcgggagtccagccccaagggaggtggaacagccccacacacagcaggggcctgagaagttagcgggaaacgccgtctacaccaagccttccttcacccaagagcataaggcagcagtctctgtgctgaaacccttctccaagggcgcgccttctacctccagccctgcaaaagccctaccacaggtgagagacagatggaaagacttaacccacgctatttccattttagaaagtgcaaaggctagagttacaaatacgaagacgtctaaaccaatcgtacatgccagaaaaaaataccgctttcacaaaactcgctcccacgtgacccacagaacacccaaagtcaaaaagagtccaaaggtcagaaagaaaagttatctgagtagactgatgctcgcaaacaggcttccattctctgcagcgaagagcctcataaattccccttcacaaggggctttttcatccttaggagacctgagtcctcaagaaaacccttttctggaagtatctgctccttcagaacattttatagaaaacaataatacaaaacacacaactgcaagaaatgcctttgaagaaaatgattttatggaaaacactaacatgccagaaggaaccatctctgaaaacacaaactacaatcatcctcatgaggcagattccgctgggactgcattcaacttagggccaactgttaaacaaactgagacaaaatgggaatacaacaacgtgggcactgacctgtcccccgagcccaaaagcttcaattacccattgctctcgtccccaggtgatcagtttgaaattcagctaacccagcagctacagtcccttatccccaacaacaatgtgagaaggctcattgctcatgttatccggaccttgaagatggactgctctggggcccatgtgcaagtgacctgtgccaagctcatctccaggacaggccacctgatgaagcttctcagtgggcagcaggaagtaaaggcatccaagatagaatgggatacggaccaatggaagattgagaactacattaatgagagcacagaagcccagagtgaacagaaagagaagtcgcttgagctcaaaaaagaagttccaggatatggctatactgacaaactcatcttggcattaattgttactggaatactaacgattttgattatacttttctgcctcattgtgatatgttgtcaccgaaggtcattacaagaagatgaagaaggattctcaaggggcattttcagatttctgccatggaggggatgctcttcgcgaagggagagtcaggatggactttcctcatttggacagccgctctggtttaaagatatgtacaaacctctcagtgccacaagaataaataatcatgcatggaagctgcacaagaagtcatctaatgaggacaagatcctcaacagggaccctggggacagcgaagccccaacggaggaggaggagagtgaagccctgccataggaggagaacacagcccacctcaggcctcctgcaaaaatacatagaataaacaacaacagttactaaatgaa

SEQ ID NO: 148046 - DNA, 5175 bp, Homo sapiens
  Payload ID: 9299
  Gene Symbol: LRRC37A2
  Gene Name: leucine rich repeat containing 37, member A2
  ENST ID: ENST00000614665
  CDS Start-End: 4-5106
agaatgacttccgctcagtgcccggcactagcgtgtgtcatgtccccgctgcgtttctggggcccatggcccctccttatgtggcaactattgtggctactagtcaaggaggctcagcctctggagtgggtcaaggacccgctccagctgacctctaaccccctggggccgcctgagccctggtcttcccactcctcccatttcccacgggaatctccccatgcgcctactctcccagcagacccgtgggactttgatcacctggggccctctgcttcctcagagatgccagccccaccccaggaatcgactgaaaatttggttccattcctggacacctgggattcagctggagagctgcccctggagccagagcagttcttggcttcacagcaggatttaaaggacaagctgagtccacaggaaaggctccctgtttcgcccaagaagctgaagaaagatccagctcagcgttggagccttgctgagattattggaattatacgccaattatccacacctcagagtcagaaacagactttgcagaatgaatattccagtacagatacaccgtatcccggtagcctgcctccagaactccgggtgaagtcagatgagcctccagggccctctgagcaagttggaccttctcaattccatctagagcccgaaactcaaaatccagagacccttgaagacatccagtcctcttcactccagcaagaagccccagcacagcttccacagctccttgaggaagaaccttcttcaatgcagcaggaggccccagctctgcctccagagtcctctatggagagtctaactctaccgaatcatgaggtgtcagttcaacctccaggtgaggatcaagcttattatcacttgcccaacattacagttaaacctgcagatgtggaggttaccataacttcagagcctaccaatgagacagaatcttcccaagcccagcaggagaccccaattcagtttccagaggaggtggaaccttctgcaacccaacaggaggccccaattgagcctccagttcctcctatggagcatgaactttccatcagtgagcagcagcagccagttcagccttctgagtctcctagggaggtcgaatcttctccgacccagcaggagaccccaggtcagcctccagaacatcatgaagtcacagtttcacctccaggtcaccatcaaactcatcatttagcttcacccagtgtctctgtgaagcctccagacgtgcagctcaccatagcagcagagcctagtgcagaggtgggaacttctctagtccaccaggaggctacaactcggctctcagggtcaggtaatgatgtagaacctcccgccatccagcacgggggcccacctctgcttccagagtcatcagaagaagctggacctttagcagttcaacaggagacttcatttcaatctccggaacctattaataatgagaacccctctccaacccagcaggaggctgcagctgagcatccacagaccgctgaggagggtgagtcttccctaacccatcaggaggccccagctcagactccagagttccctaatgtagttgtagctcaacctccagagcattcacacctgactcaagccacagttcaacctttggatctggggtttaccatcactccagaatccaagacagaggttgaactttctccaaccatgaaggagaccccaactcagcctcctaagaaagttgtaccccaacttcgagtatatcaaggggtaacaaatccaacaccaggtcaggatcaagctcagcatccagtgtcacccagcgttacagttcaacttttggacctgggacttaccatcactccagaacctactacggaggttggacattctacacccccgaagaggactatagtttctccaaagcatcctgaggtgacacttccacatccagaccaggttcagactcagcattcacacctgactcgagccacagttcaacctttggacctggggtttaccatcactccaaaatccatgacagaggttgaaccttctacagccctgatgactacagctcctcctccaggacaccctgaggtgacacttccaccttcagacaagggtcaggctcagcattcacacctgactcaagccaccgttcaacctctggacctggagcttaccataactacaaaacctactacagaggttaaaccatctccaaccacggaggagacctcaactcagcctccagacctgggacttgccatcattccagaacccactacagagactggacattctacagccctggagaagactacagctcctcgtccagaccgggttcagactctgcatcgaagcctgactgaagtcacaggtccacctactgaactagaacctgctcaggattcactggtgcagtctgaaagttacacccaaaataaggctttaactgcaccagaggaacacaaggcctccacaagcaccaacatatgtgagctctgtacctgcggagatgagatgttgtcatgtattgatctcaacccagagcagaggctccgccaagtgcctgtgccagagcccaacacccacaatggcaccttcaccatcttaaatttccaaggaaactatatttcttacattgatggaaatgtatggaaagcatacagttggaccgagaaactaattctcagagaaaataacttgactgaattacacaaggattcatttgaaggcctgctatccctccagtatttagatttatcctgcaataaaatacagtctattgaaagacatacatttgaaccactaccatttttgaagtttataaatcttagttgcaatgtaattacagaactcagctttggaacatttcaggcctggcacggaatgcagtttttacataagttaattctcaatcacaatcctctgacaactgttgaagatccgtatctctttaaattgccagcattaaaatatctagacatgggaacaacgctagtcccacttacaacacttaagaacattctcatgatgactgttgaactggaaaaactgatcttacctagccatatggcctgctgcctctgccaatttaaaaacagcattgaggctgtctgcaagacagtcaagctgcattgcaacagtgcatgtctgacaaacaccacacattgtcctgaagaagcatcggtagggaatccagaaggagcgttcatgaaggtgttacaagcccggaagaactacacaagcactgagctgattgttgagccagaggagccctcagacagcagtggcatcaacttgtcaggctttgggagtgagcagctagacaccaatgacgagagtgattttatcagtacactacgttacatcttgccttatttctcagcggtaaacctagatgtgaaatcactgttactaccgttaattaaactgccaaccacaggaaacagcctggcaaagattcaaactgtaggccaaaaccggcagagagtgaagagagtcctcatgggcccaaggagcatccagaaaaggcacttcaaagaggtaggaaggcagagcatcaggagggaacagggtgcccaggcatctgtggagaacgctgccgaagaaaaaaggctcgggagtccagccccaagggaggtggaacagccccacacacagcaggggcctgagaagttagcgggaaacgccgtctacaccaagccttccttcacccaagagcataaggcagcagtctctgtgctgaaacccttctccaagggcgcgccttctacctccagccctgcaaaagccctaccacaggtgagagacagatggaaagacttaacccacgctatttccactttagaaagtgcaaaggctagagttacaaatacgaagacgtctaaaccaatcgtacatgccagaaaaaaataccgctttcacaaaactcgctcccacgtgacccacagaacacccaaagtcaaaaagagtccaaaggtcagaaagaaaagttatctgagtagactgatgctcgcaaacaggcttccattctctgcagcgaagagcctcataaattccccttcacaaggggctttttcatccttaggagacctgagtcctcaagaaaacccttttctggaagtatctgctccttcagaacattttatagaaaagaataatacaaaacacacaactgcaagaaatgcctttgaagaaaatgattttatggaaaacactaacatgccagaaggaaccatctctgaaaacacaaactacaatcatcctcctgaggcagattccgctgggactgcattcaacttagggccaactgttaaacaaactgagacaaaatgggaatacaacaacgtgggcactgacctgtcccccgagcccaaaagcttcaattacccattgctctcgtccccaggtgatcagtttgaaattcagctaacccagcagctacagtcccttatccccaacaacaatgtgagaaggctcattgctcatgttatccggaccttgaagatggactgctctgggacccatgtgcaagtgacctgtgccaagctcatctccaggacaggccacctgatgaagcttctcagtgggcagcaggaagtaaaggcatccaagatagaatgggatacggaccaatggaagattgagaactacattaatgagagcacagaagcccagagtgaacagaaagagaagtcgcttgagctcaaaaaagaagttccaggatatggctatactgacaaactcatcttggcattaattgttactggaatactaacgattttgattatacttttctgcctcattgtgatatgttgtcaccgaaggtcattacaagaagatgaagaaggattctcaaggggcattttcagatttctgccacggaggggatgctcttcgcgaagggagagtcaggatggactttcctcatttggacagccgctctggtttaaagatatgtacaaacctctcagtgccacaagaataaataatcatgcatggaagctgcacaagaagtcatctaatgaggacaagatcctcaacagggaccctggggacagcgaagccccaacggaggaggaggagagtgaagccctgccataggaggagaacacagcccacctcaggcctcctgcaaaaatacatagaataaacaacaacagttactaaata

SEQ ID NO: 148047 - DNA, 5177 bp, Homo sapiens
  Payload ID: 9299
  Gene Symbol: LRRC37A2
  Gene Name: leucine rich repeat containing 37, member A2
  ENST ID: ENST00000611862
  CDS Start-End: 4-5106
agaatgacttccgctcagtgcccggcactagcgtgtgtcatgtccccgctgcgtttctggggcccatggcccctccttatgtggcaactattgtggctactagtcaaggaggctcagcctctggagtgggtcaaggacccgctccagctgacctctaaccccctggggccgcctgagccctggtcttcccactcctcccatttcccacgggaatctccccatgcgcctactctcccagcagacccgtgggactttgatcacctggggccctctgcttcctcagagatgccagccccaccccaggaatcgactgaaaatttggttccattcctggacacctgggattcagctggagagctgcccctggagccagagcagttcttggcttcacagcaggatttaaaggacaagctgagtccacaggaaaggctccctgtttcgcccaagaagctgaagaaagatccagctcagcgttggagccttgctgagattattggaattatacgccaattatccacacctcagagtcagaaacagactttgcagaatgaatattccagtacagatacaccgtatcccggtagcctgcctccagaactccgggtgaagtcagatgagcctccagggccctctgagcaagttggaccttctcaattccatctagagcccgaaactcaaaatccagagacccttgaagacatccagtcctcttcactccagcaagaagccccagcacagcttccacagctccttgaggaagaaccttcttcaatgcagcaggaggccccagctctgcctccagagtcctctatggagagtctaactctaccgaatcatgaggtgtcagttcaacctccaggtgaggatcaagcttattatcacttgcccaacattacagttaaacctgcagatgtggaggttaccataacttcagaggctaccaatgagacagaatcttcccaagctcagcaggagaccccaattcagtttccagaggaggtggaaccttctgcaacccaacaggaggccccaattgagcctccagttcctcctatggagcatgaactttccatcagtgagcagcagcagccagttcagccttctgagacttctagggaggtcgaatcttctccgacccagcaggagaccccaggtcagcctccagaacatcatgaagtcacagtttcacctccaggtgaccatcaaactcatcatttagattcacccagtgtctctgtgaagcctccagacgtgcagctcaccatagcagcagagcctagtgcagaggtgggaacttctctagtccagcaggaggctacaactcggctctcagggtcaggtaatgatatagaacctcccgccatccagcacgggggcccacctctgctttcagagtcatcagaagaagctggacctttagcagttcaacaggagacttcatttcaatctccggaacctattaataatgagaacccctctccaacccagcaggaggctgcagctgagcatccacagaccgctgaggagggtgagtcttccctaacccatcaggaggccccagctcagactccagagttccctaatgtagttgtagctcaacctccagagcattcacacctgactcaagccacagttcaacctttggatctggggtttaccatcactccagaatccatgacagaggttgaactttctccaaccatgaaggagaccccaactcagcctcctaagaaagttgtaccccaacttcgagtatatcaaggggtaacaaatccaacaccaggtcaggatcaagctcagcatccagtgtcacccagcgttacagttcaacttttggacctgggacttaccatcactccagaacccactacggaggttggacattctacacccccgaagaggactatagtttctccaaagcatcctgaggtgacacttccacatccagaccaggttcagactcagcattcacacctgactcgagccacagttcaacctttggacctggggtttaccatcactccaaaatccatgacagaggttgaaccttctacagccctgatgactacagctcctcctccaggacaccctgaggtgacacttccaccttcagacaagggtcaggctcagcattcacacctgactcaagccaccgttcaacctctggacctggagcttaccataactacaaaacctactacagaggttaaaccgtctccaaccacggaggagacctcaactcagcctccagacctgggacttgccatcattccagaacccactacagagactggacattctacagccctggagaagactacagctcctcgtccagaccgggttcagactctgcatcgaagcctgactgaagtcacaggtccacctactgaactagaacctgctcaggattcactggtgcagtctgaaagttacacccaaaataaggctttaactgcaccagaggaacacaaggcctccacaagcaccaacatatgtgagctctgtacctgcggagatgagatgttgtcatgtattgatctcaacccagagcagaggctccgccaagtgcctgtgccagagcccaacacccacaatggcaccttcaccatcttaaatttccaaggaaactatatttcttacattgatggaaatgtatggaaagcatacagttggaccgagaaactaattctcagagaaaataacttgactgaattacacaaggattcatttgaaggcctgctatccctccagtatttagatttatcctgcaataaaatacagtctattgaaagacatacatttgaaccactaccatttttgaagtttataaatcttagttgcaatgtaattacagaactcagctttggaacatttcaggcctggcacggaatgcagtttttacataagttaattctcaatcacaatcctctgacaactgttgaagatccgtatctctttaaattgccagcattaaaatatctagacatgggaacaacgctagtcccacttacaacacttaagaacattctcatgatgactgttgaactggaaaaactgatcttacctagccatatggcctgctgcctctgccaatttaaaaacagcattgaggctgtctgcaagacagtcaagctgcattgcaacagtgcatgtctgacaaacaccacacattgtcctgaagaagcatcggtagggaatccagaaggagcgttcatgaaggtgttacaagcccggaagaactacacaagcactgagctgattgttgagccagaggagccctcagacagcagtggcatcaacttgtcaggctttgggagtgagcagctagacaccaatgacgagagtgattttatcagtacactaagttacatcttgccttatttctcagcggtaaacctagatgtgaaatcactgttactaccgttaattaaactgccaaccacaggaaacagcctggcaaagattcaaactgtaggccaaaaccggcagagagtgaagagagtcctcatgggcccaaggagcatccagaaaaggcacttcaaagaggtaggaaggcagagcatcaggagggaacagggtgcccaggcatctgtggagaacgctgccgaagaaaaaaggctcgggagtccagccccaagggaggtggaacagccccacacacagcaggggcctgagaagttagcgggaaacgccgtctacaccaagccttccttcacccaagagcataaggcagcagtctctgtgctgaaacccttctccaagggcgcgccttctacctccagccctgcaaaagccctaccacaggtgagagacagatggaaagacttaacccacgctatttccattttagaaagtgcaaaggctagagttacaaatacgaagacgtctaaaccaatcgtacatgccagaaaaaaataccgctttcacaaaactcgctcccacgtgacccacagaacacccaaagtcaaaaagagtccaaaggtcagaaagaaaagttatctgagtagactgatgctcgcaaacaggcttccattctctgcagcgaagagcctcataaattccccttcacaaggggctttttcatccttaggagacctgagtcctcaagaaaacccttttctggaagtatctgctccttcagaacattttatagaaaagaataatacaaaacacacaactgcaagaaatgcctttgaagaaaatgattttatggaaaacactaacatgccagaaggaaccatctctgaaaacacaaactacaatcatcctcctgaggcagattccgctgggactgcattcaacttagggccaactgttaaacaaactgagacaaaatgggaatacaacaacgtgggcactgacctgtcccccgagcccaaaagcttcaattacccattgctctcgtccccaggtgatcagtttgaaattcagctaacccagcagctacagtcccttatccccaacaacaatgtgagaaggctcattgctcatgttatccggaccttgaagatggactgctctggggcccatgtgcaagtgacctgtgccaagctcatctccaggacaggccacctgatgaagcttctcagtgggcagcaggaagtaaaggcatccgagatagaatgggatacggaccaatggaagattgagaactacattaatgagagcacagaagcccagagtgaacagaaagagaagtcgcttgagctcaaaaaagaagttccaggatatggctatactgacaaactcatcttggcattaattgttactggaatactaacgattttgattatacttttctgcctcattgtgatatgttgtcaccgaaggtcattacaagaagatgaagaaggattctcaaggggcattttcagatttctgccacggaggggatgctcttcgcgaagggagagtcaggatggactttcctcatttggacagccgctctggtttaaagatatgtacaaacctctcagtgccacaagaataaataatcatgcatggaagctgcacaagaagtcatctaatgaggacaagatcctcaacagggaccctggggacagcgaagccccaacggaggaggaggagagtgaagccctgccataggaggagaacacagcccacctcaggcctcctgcaaaaatacatagaataaacaacaacagttactaaatgaa

SEQ ID NO: 148048 - DNA, 3853 bp, Homo sapiens
  Payload ID: 9299
  Gene Symbol: LRRC37A2
  Gene Name: leucine rich repeat containing 37, member A2
  ENST ID: ENST00000629060
  CDS Start-End: 1568-3784
gaaaactataatgcctttcaaatatggcttattgcttggatctcaatatctcccacgtatcttgggtggaatattttgctgaagatctttctgtcaatcatttacaatcatgtgctgcaaaatgaagtttgggtcaacagtagaccacatatatgatggtggttccgtaagcgtataatggagctatccctatataggtataccatttttatctttttttttttttttttttgagatggagtctcactctgttgtccaggctggagtgcagtggtatgatcccagctcattgcaacctccacctcccaggttcaagtgattctcctacctcagcctcctgagtagctgggattatagacacgcgtcaccacactcagctaatttttgtatttttagtagagatggggtttcatcatgttggccaggctggtcttgaactcctgagctcaagtgatccacccaccttggcgtcccaaagtgctgggattacaggcatgagccactgtgcccaggccccatttttatcttttacacagtattttaactatatattttccatgtttacatacacaaatacctgccattctgtgacagttgcctttagtattcagtacagtaacatacagtacaggtttgtagcctaggagtcctaagccataccgtgtaccctaggtatggtggctacaccacctaggtttgtgtaagtatacgctatgatgttagcacaatggtgaaatcacctagtgacccatttctcaagctcctcacgtgggaagcaatgcatgactgcatatgaaagctcttaaatagggattgtttctaaattaatctcaaaacagtcattatttactatttatggaattttttttaaaaaaaggagcaaaagtatcatttcagtgggaacttaacttggggctacagtgttttatttaacttttaccccaaagttgcaaagtgttttgaaatttttccctgtaaaataattattttaattcaatttaaataaaacccaccaaggagacttcaagctttaagaagtctagcttcctgtgaaatgtgagaggaagtcagcactcatttcagaaatctgattataacaatagctccatccctaaatgaggtgaatcttggaatctcttccattttattttattttatttttttgagatggagtttctctcttgttgcccaggctgaagtgcaatgttgtgatctcggctcactgcaacctctgcctcccaggttcaagggattctcctgctttggcctcctgagtagctgggattgcagaaatttccaaggaaactatatttcttacattgatggaaatgtatggaaagcatacagttggaccgagaaactaattctcagagaaaataacttgactgaattacacaaggattcatttgaaggcctgctatccctccagtatttagatttatcctgcaataaaatacagtctattgaaagacatacatttgaaccactaccatttttgaagtttataaatcttagttgcaatgtaattacagaactcagctttggaacatttcaggcctggcacggaatgcagtttttacataagttaattctcaatcacaatcctctgacaactgttgaagatccgtatctctttaaattgccagcattaaaatatctagacatgggaacaacgctagtcccacttacaacacttaagaacattctcatgatgactgttgaactggaaaaactgatcttacctagccatatggcctgctgcctctgccaatttaaaaacagcattgaggctgtctgcaagacagtcaagctgcattgcaacagtgcatgtctgacaaacaccacacattgtcctgaagaagcatcggtagggaatccagaaggagcgttcatgaaggtgttacaagcccggaagaactacacaagcactgagctgattgttgagccagaggagccctcagacagcagtggcatcaacttgtcaggctttgggagtgagcagctagacaccaatgacgagagtgattttatcagtacactacgttacatcttgccttatttctcagcggtaaacctagatgtgaaatcactgttactaccgttaattaaactgccaaccacaggaaacagcctggcaaagattcaaactgtaggccaaaaccggcagagagtgaagagagtcctcatgggcccaaggagcatccagaaaaggcacttcaaagaggtaggaaggcagagcatcaggagggaacagggtgcccaggcatctgtggagaacgctgccgaagaaaaaaggctcgggagtccagccccaagggaggtggaacagccccacacacagcaggggcctgagaagttagcgggaaacgccgtctacaccaagccttccttcacccaagagcataaggcagcagtctctgtgctgaaacccttctccaagggcgcgccttctacctccagccctgcaaaagccctaccacaggtgagagacagatggaaagacttaacccacgctatttccactttagaaagtgcaaaggctagagttacaaatacgaagacgtctaaaccaatcgtacatgccagaaaaaaataccgctttcacaaaactcgctcccacgtgacccacagaacacccaaagtcaaaaagagtccaaaggtcagaaagaaaagttatctgagtagactgatgctcgcaaacaggcttccattctctgcagcgaagagcctcataaattccccttcacaaggggctttttcatccttaggagacctgagtcctcaagaaaacccttttctggaagtatctgctccttcagaacattttatagaaaagaataatacaaaacacacaactgcaagaaatgcctttgaagaaaatgattttatggaaaacactaacatgccagaaggaaccatctctgaaaacacaaactacaatcatcctcctgaggcagattccgctgggactgcattcaacttagggccaactgttaaacaaactgagacaaaatgggaatacaacaacgtgggcactgacctgtcccccgagcccaaaagcttcaattacccattgctctcgtccccaggtgatcagtttgaaattcagctaacccagcagctacagtcccttatccccaacaacaatgtgagaaggctcattgctcatgttatccggaccttgaagatggactgctctgggacccatgtgcaagtgacctgtgccaagctcatctccaggacaggccacctgatgaagcttctcagtgggcagcaggaagtaaaggcatccaagatagaatgggatacggaccaatggaagattgagaactacattaatgagagcacagaagcccagagtgaacagaaagagaagtcgcttgagctcaaaaaagaagttccaggatatggctatactgacaaactcatcttggcattaattgttactggaatactaacgattttgattatacttttctgcctcattgtgatatgttgtcaccgaaggtcattacaagaagatgaagaaggattctcaaggggcattttcagatttctgccacggaggggatgctcttcgcgaagggagagtcaggatggactttcctcatttggacagccgctctggtttaaagatatgtacaaacctctcagtgccacaagaataaataatcatgcatggaagctgcacaagaagtcatctaatgaggacaagatcctcaacagggaccctggggacagcgaagccccaacggaggaggaggagagtgaagccctgccataggaggagaacacagcccacctcaggcctcctgcaaaaatacatagaataaacaacaacagttactaaata

SEQ ID NO: 148049 - DNA, 4997 bp, Homo sapiens
  Payload ID: 9299
  Gene Symbol: LRRC37A2
  Gene Name: leucine rich repeat containing 37, member A2
  ENST ID: ENST00000629709
  CDS Start-End: 36-4943
cttacaaggggcacgagcgtctcggagctgccagaatgacttccgctcagtgcccggcactagcgtgtgtcatgtccccgctgcgtttctggggcccatggcccctccttatgtggcaactattgtggctactagtcaaggaggctcagcctctggagtgggtcaaggacccgctccagctgacctctaaccccctggggccgcctgagccctggtcttcccactcctcccatttcccacgggaatctccccatgcgcctactctcccagcagacccgtgggactttgatcacctggggccctctgcttcctcagagatgccagccccaccccaggaatcgactgaaaatttggttccattcctggacacctgggattcagctggagagctgcccctggagccagagcagttcttggcttcacagcaggatttaaaggacaagctgagtccacaggaaaggctccctgtttcgcccaagaagctgaagaaagatccagctcagcgttggagccttgctgagattattggaattatacgccaattatccacacctcagagtcagaaacagactttgcagaatgaatattccagtacagatacaccgtatcccggtagcctgcctccagaactccgggtgaagtcagatgagcctccagggccctctgagcaagttggaccttctcaattccatctagagcccgaaactcaaaatccagagacccttgaagacatccagtcctcttcactccagcaagaagccccagcacagcttccacagctccttgaggaagaaccttcttcaatgcagcaggaggccccagctctgcctccagagtcctctatggagagtctaactctaccgaatcatgaggtgtcagttcaacctccaggtgaggatcaagcttattatcacttgcccaacattacagttaaacctgcagatgtggaggttaccataacttcagagcctaccaatgagacagaatcttcccaagcccagcaggagaccccaattcagtttccagaggaggtggaaccttctgcaacccaacaggaggccccaattgagcctccagttcctcctatggagcatgaactttccatcagtgagcagcagcagccagttcagccttctgagtctcctagggaggtcgaatcttctccgacccagcaggagaccccaggtcagcctccagaacatcatgaagtcacagtttcacctccaggtcaccatcaaactcatcatttagcttcacccagtgtctctgtgaagcctccagacgtgcagctcaccatagcagcagagcctagtgcagaggtgggaacttctctagtccaccaggaggctacaactcggctctcagggtcaggtaatgatgtagaacctcccgccatccagcacgggggcccacctctgcttccagagtcatcagaagaagctggacctttagcagttcaacaggagacttcatttcaatctccggaacctattaataatgagaacccctctccaacccagcaggaggctgcagctgagcatccacagaccgctgaggagggtgagtcttccctaacccatcaggaggccccagctcagactccagagttccctaatgtagttgtagctcaacctccagagcattcacacctgactcaagccacagttcaacctttggatctggggtttaccatcactccagaatccaagacagaggttgaactttctccaaccatgaaggagaccccaactcagcctcctaagaaagttgtaccccaacttcgagtatatcaaggggtaacaaatccaacaccaggtcaggatcaagctcagcatccagtgtcacccagcgttacagttcaacttttggacctgggacttaccatcactccagaacctactacggaggttggacattctacacccccgaagaggactatagtttctccaaagcatcctgaggtgacacttccacatccagaccaggttcagactcagcattcacacctgactcgagccacagttcaacctttggacctggggtttaccatcactccaaaatccatgacagaggttgaaccttctacagccctgatgactacagctcctcctccaggacaccctgaggtgacacttccaccttcagacaagggtcaggctcagcattcacacctgactcaagccaccgttcaacctctggacctggagcttaccataactacaaaacctactacagaggttaaaccatctccaaccacggaggagacctcaactcagcctccagacctgggacttgccatcattccagaacccactacagagactggacattctacagccctggagaagactacagctcctcgtccagaccgggttcagactctgcatcgaagcctgactgaagtcacaggtccacctactgaactagaacctgctcaggattcactggtgcagtctgaaagttacacccaaaataaggctttaactgcaccagaggaacacaaggcctccacaagcaccaacatatgtgagctctgtacctgcggagatgagatgttgtcatgtattgatctcaacccagagcagaggctccgccaagtgcctgtgccagagcccaacacccacaatggcaccttcaccatcttaaatttccaaggaaactatatttcttacattgatggaaatgtatggaaagcatacagttggaccgagaaactaattctcagagaaaataacttgactgaattacacaaggattcatttgaaggcctgctatccctccagtatttagatttatcctgcaataaaatacagtctattgaaagacatacatttgaaccactaccatttttgaagtttataaatcttagttgcaatgtaattacagaactcagctttggaacatttcaggcctggcacggaatgcagtttttacataagttaattctcaatcacaatcctctgacaactgttgaagatccgtatctctttaaattgccagcattaaaatatctagacatgggaacaacgctagtcccacttacaacacttaagaacattctcatgatgactgttgaactggaaaaactgatcttacctagccatatggcctgctgcctctgccaatttaaaaacagcattgaggctgtctgcaagacagtcaagctgcattgcaacagtgcatgtctgacaaacaccacacattgtcctgaagaagcatcggtagggaatccagaaggagcgttcatgaaggtgttacaagcccggaagaactacacaagcactgagctgattgttgagccagaggagccctcagacagcagtggcatcaacttgtcaggctttgggagtgagcagctagacaccaatgacgagagtgattttatcagtacactacgttacatcttgccttatttctcagcggtaaacctagatgtgaaatcactgttactaccgttaattaaactgccaaccacaggaaacagcctggcaaagattcaaactgtaggccaaaaccggcagagagtgaagagagtcctcatgggcccaaggagcatccagaaaaggcacttcaaagaggtaggaaggcagagcatcaggagggaacagggtgcccaggcatctgtggagaacgctgccgaagaaaaaaggctcgggagtccagccccaagggaggtggaacagccccacacacagcaggggcctgagaagttagcgggaaacgccgtctacaccaagccttccttcacccaagagcataaggcagcagtctctgtgctgaaacccttctccaagggcgcgccttctacctccagccctgcaaaagccctaccacaggtgagagacagatggaaagacttaacccacgctatttccactttagaaagtgcaaaggctagagttacaaatacgaagacgtctaaaccaatcgtacatgccagaaaaaaataccgctttcacaaaactcgctcccacgtgacccacagaacacccaaagtcaaaaagagtccaaaggtcagaaagaaaagttatctgagtagactgatgctcgcaaacaggcttccattctctgcagcgaagagcctcataaattccccttcacaaggggctttttcatccttaggagacctgagtcctcaagaaaacccttttctggaagtatctgctccttcagaacattttatagaaaagaataatacaaaacacacaactgcaagaaatgcctttgaagaaaatgattttatggaaaacactaacatgccagaaggaaccatctctgaaaacacaaactacaatcatcctcctgaggcagattccgctgggactgcattcaacttagggccaactgttaaacaaactgagacaaaatgggaatacaacaacgtgggcactgacctgtcccccgagcccaaaagcttcaattacccattgctctcgtccccaggtgatcagtttgaaattcagctaacccagcagctacagtcccttatccccaacaacaatgtgagaaggctcattgctcatgttatccggaccttgaagatggactgctctgggacccatgtgcaagtgacctgtgccaagctcatctccaggacaggccacctgatgaagcttctcagtgggcagcaggaagtaaaggcatccaagatagaatgggatacggaccaatggaagattgagaactacattaatgagagcacagaagcccagagtgaacagaaagagaagtcgcttgagctcaaaaaagaagttccaggatatggctatactgacaaactcatcttggcattaattgttactggaatactaacgattttgattatacttttctgcctcattgtgatatgttgtcaccgaaggtcattacaagaagatgaagaaggattctcaagggacagcgaagccccaacggaggaggaggagagtgaagccctgccataggaggagaacacagcccacctcaggcctcctgcaaaaatacatagaataaacaac

SEQ ID NO: 148050 - DNA, 5105 bp, Homo sapiens
  Payload ID: 9299
  Gene Symbol: LRRC37A2
  Gene Name: leucine rich repeat containing 37, member A2
  ENST ID: ENST00000633100
  CDS Start-End: 4-5034
agaatgacttccgctcagtgcccggcactagcgtgtgtcatgtccccgctgcgtttctggggcccatggcccctccttatgtggcaactattgtggctactagtcaaggaggctcagcctctggagtgggtcaaggacccgctccagctgacctctaaccccctggggccgcctgagccctggtcttcccactcctcccatttcccacgggaatctccccatgcgcctactctcccagcagacccgtgggactttgatcacctggggccctctgcttcctcagagatgccagccccaccccaggaatcgactgaaaatttggttccattcctggacacctgggattcagctggagagctgcccctggagccagagcagttcttggcttcacagcaggatttaaaggacaagctgagtccacaggaaaggctccctgtttcgcccaagaagctgaagaaagatccagctcagcgttggagccttgctgagattattggaattatacgccaattatccacacctcagagtcagaaacagactttgcagaatgaatattccagtacagatacaccgtatcccggtagcctgcctccagaactccgggtgaagtcagatgagcctccagggccctctgagcaagttggaccttctcaattccatctagagcccgaaactcaaaatccagagacccttgaagacatccagtcctcttcactccagcaagaagccccagcacagcttccacagctccttgaggaagaaccttcttcaatgcagcaggaggccccagctctgcctccagagtcctctatggagagtctaactctaccgaatcatgaggtgtcagttcaacctccaggtgaggatcaagcttattatcacttgcccaacattacagttaaacctgcagatgtggaggttaccataacttcagaggctaccaatgagacagaatcttcccaagctcagcaggagaccccaattcagtttccagaggaggtggaaccttctgcaacccaacaggaggccccaattgagcctccagttcctcctatggagcatgaactttccatcagtgagcagcagcagccagttcagccttctgagacttctagggaggtcgaatcttctccgacccagcaggagaccccaggtcagcctccagaacatcatgaagtcacagtttcacctccaggtgaccatcaaactcatcatttagattcacccagtgtctctgtgaagcctccagacgtgcagctcaccatagcagcagagcctagtgcagaggtgggaacttctctagtccagcaggaggctacaactcggctctcagggtcaggtaatgatatagaacctcccgccatccagcacgggggcccacctctgctttcagagtcatcagaagaagctggacctttagcagttcaacaggagacttcatttcaatctccggaacctattaataatgagaacccctctccaacccagcaggaggctgcagctgagcatccacagaccgctgaggagggtgagtcttccctaacccatcaggaggccccagctcagactccagagttccctaatgtagttgtagctcaacctccagagcattcacacctgactcaagccacagttcaacctttggatctggggtttaccatcactccagaatccatgacagaggttgaactttctccaaccatgaaggagaccccaactcagcctcctaagaaagttgtaccccaacttcgagtatatcaaggggtaacaaatccaacaccaggtcaggatcaagctcagcatccagtgtcacccagcgttacagttcaacttttggacctgggacttaccatcactccagaacccactacggaggttggacattctacacccccgaagaggactatagtttctccaaagcatcctgaggtgacacttccacatccagaccaggttcagactcagcattcacacctgactcgagccacagttcaacctttggacctggggtttaccatcactccaaaatccatgacagaggttgaaccttctacagccctgatgactacagctcctcctccaggacaccctgaggtgacacttccaccttcagacaagggtcaggctcagcattcacacctgactcaagccaccgttcaacctctggacctggagcttaccataactacaaaacctactacagaggttaaaccgtctccaaccacggaggagacctcaactcagcctccagacctgggacttgccatcattccagaacccactacagagactggacattctacagccctggagaagactacagctcctcgtccagaccgggttcagactctgcatcgaagcctgactgaagtcacaggtccacctactgaactagaacctgctcaggattcactggtgcagtctgaaagttacacccaaaataaggctttaactgcaccagaggaacacaaggcctccacaagcaccaacatatgtgagctctgtacctgcggagatgagatgttgtcatgtattgatctcaacccagagcagaggctccgccaagtgcctgtgccagagcccaacacccacaatggcaccttcaccatcttaattctcagagaaaataacttgactgaattacacaaggattcatttgaaggcctgctatccctccagtatttagatttatcctgcaataaaatacagtctattgaaagacatacatttgaaccactaccatttttgaagtttataaatcttagttgcaatgtaattacagaactcagctttggaacatttcaggcctggcacggaatgcagtttttacataagttaattctcaatcacaatcctctgacaactgttgaagatccgtatctctttaaattgccagcattaaaatatctagacatgggaacaacgctagtcccacttacaacacttaagaacattctcatgatgactgttgaactggaaaaactgatcttacctagccatatggcctgctgcctctgccaatttaaaaacagcattgaggctgtctgcaagacagtcaagctgcattgcaacagtgcatgtctgacaaacaccacacattgtcctgaagaagcatcggtagggaatccagaaggagcgttcatgaaggtgttacaagcccggaagaactacacaagcactgagctgattgttgagccagaggagccctcagacagcagtggcatcaacttgtcaggctttgggagtgagcagctagacaccaatgacgagagtgattttatcagtacactaagttacatcttgccttatttctcagcggtaaacctagatgtgaaatcactgttactaccgttaattaaactgccaaccacaggaaacagcctggcaaagattcaaactgtaggccaaaaccggcagagagtgaagagagtcctcatgggcccaaggagcatccagaaaaggcacttcaaagaggtaggaaggcagagcatcaggagggaacagggtgcccaggcatctgtggagaacgctgccgaagaaaaaaggctcgggagtccagccccaagggaggtggaacagccccacacacagcaggggcctgagaagttagcgggaaacgccgtctacaccaagccttccttcacccaagagcataaggcagcagtctctgtgctgaaacccttctccaagggcgcgccttctacctccagccctgcaaaagccctaccacaggtgagagacagatggaaagacttaacccacgctatttccattttagaaagtgcaaaggctagagttacaaatacgaagacgtctaaaccaatcgtacatgccagaaaaaaataccgctttcacaaaactcgctcccacgtgacccacagaacacccaaagtcaaaaagagtccaaaggtcagaaagaaaagttatctgagtagactgatgctcgcaaacaggcttccattctctgcagcgaagagcctcataaattccccttcacaaggggctttttcatccttaggagacctgagtcctcaagaaaacccttttctggaagtatctgctccttcagaacattttatagaaaagaataatacaaaacacacaactgcaagaaatgcctttgaagaaaatgattttatggaaaacactaacatgccagaaggaaccatctctgaaaacacaaactacaatcatcctcctgaggcagattccgctgggactgcattcaacttagggccaactgttaaacaaactgagacaaaatgggaatacaacaacgtgggcactgacctgtcccccgagcccaaaagcttcaattacccattgctctcgtccccaggtgatcagtttgaaattcagctaacccagcagctacagtcccttatccccaacaacaatgtgagaaggctcattgctcatgttatccggaccttgaagatggactgctctggggcccatgtgcaagtgacctgtgccaagctcatctccaggacaggccacctgatgaagcttctcagtgggcagcaggaagtaaaggcatccgagatagaatgggatacggaccaatggaagattgagaactacattaatgagagcacagaagcccagagtgaacagaaagagaagtcgcttgagctcaaaaaagaagttccaggatatggctatactgacaaactcatcttggcattaattgttactggaatactaacgattttgattatacttttctgcctcattgtgatatgttgtcaccgaaggtcattacaagaagatgaagaaggattctcaaggggcattttcagatttctgccacggaggggatgctcttcgcgaagggagagtcaggatggactttcctcatttggacagccgctctggtttaaagatatgtacaaacctctcagtgccacaagaataaataatcatgcatggaagctgcacaagaagtcatctaatgaggacaagatcctcaacagggaccctggggacagcgaagccccaacggaggaggaggagagtgaagccctgccataggaggagaacacagcccacctcaggcctcctgcaaaaatacatagaataaacaacaacagttactaaatgaa

SEQ ID NO: 148051 - DNA, 3783 bp, Homo sapiens
  Payload ID: 9299
  Gene Symbol: LRRC37A2
  Gene Name: leucine rich repeat containing 37, member A2
  ENST ID: ENST00000631492
  CDS Start-End: 1498-3714
gaaaactataatgcctttcaaatatggcttattgcttggatctcaatatctcccacgtatcttgggtggaatattttgctgaagatctttctgtcaatcatttacaatcatgtgctgcaaaatgaagtttgcgtcaacagtagaccacatatatgatggtggttccgtaagcgtataatggagctatccctatataggtataccatttttatctttttttttttttttttttttgagatggagtctcactctgttgtccaggctggagtgcagtggtatgatcccagctcattgcaacctccacctcccaggttcaagtgattctcctacctcagcctcctgagtagctgggattatagacacgcgtcaccacactcagctaatttttgtatttttagtagagatggggtttcatcatgttggccaggctggtcttgaactcctgagctcaagtgatccacccaccttggcgtcccaaagtgctgggattacaggcatgagccactgtgcccaggccccatttttatcttttacacagtattttaactatatattttccatgtttacatacacaaatacctgccattctgtgacagttgcctttagtattcagtacagtaacatacagtacaggtttgtagcctaggagtcctaagccataccgtgtaccctaggtatggtggctacaccacctaggtttgtgtaagtatacgctatgatattagcacaatggtgaaataacctagtgacccatttctcaagctcctcacgtggcaagcaatgcatgactgcatatgaaagctcttaaatagggattgtttctaaattaatctcaaaacagtcattatttactatttatggaattttttttaaaaaaaggagcaaaagtatcatttcagtgggaacttaacttggggctacagtgttttatttaacttttaccccaaagttgcaaagtgttttgaaatttttccctgtaaaataattattttaattcaatttaaataaaacccaccaaggagacttcaagctttaagaagtctagcttcctgtgaaatgtgagaggaagtcagcactcatttcagaaatctgattataataatagctccatccctaaatgaggtgaatcttggaatctcttccattttattttattttatttttttgagatggagtttctctcttgttgcccaggctgaagtgcaatgttgtgatctcggctcactgcaacctctgcctcccaggttcaagcgattctcctgctttggcctcctgagtagctgggattgcagaattctcagagaaaataacttgactgaattacacaaggattcatttgaaggcctgctatccctccagtatttagatttatcctgcaataaaatacagtctattgaaagacatacatttgaaccactaccatttttgaagtttataaatcttagttgcaatgtaattacagaactcagctttggaacatttcaggcctggcacggaatgcagtttttacataagttaattctcaatcacaatcctctgacaactgttgaagatccgtatctctttaaattgccagcattaaaatatctagacatgggaacaacgctagtcccacttacaacacttaagaacattctcatgatgactgttgaactggaaaaactgatcttacctagccatatggcctgctgcctctgccaatttaaaaacagcattgaggctgtctgcaagacagtcaagctgcattgcaacagtgcatgtctgacaaacaccacacattgtcctgaagaagcatcggtagggaatccagaaggagcgttcatgaaggtgttacaagcccggaagaactacacaagcactgagctgattgttgagccagaggagccctcagacagcagtggcatcaacttgtcaggctttgggagtgagcagctagacaccaatgacgagagtgattttatcagtacactaagttacatcttgccttatttctcagcggtaaacctagatgtgaaatcactgttactaccgttaattaaactgccaaccacaggaaacagcctggcaaagattcaaactgtaggccaaaaccggcagagagtgaagagagtcctcatgggcccaaggagcatccagaaaaggcacttcaaagaggtaggaaggcagagcatcaggagggaacagggtgcccaggcatctgtggagaacgctgccgaagaaaaaaggctcgggagtccagccccaagggaggtggaacagccccacacacagcaggggcctgagaagttagcgggaaacgccgtctacaccaagccttccttcacccaagagcataaggcagcagtctctgtgctgaaacccttctccaagggcgcgccttctacctccagccctgcaaaagccctaccacaggtgagagacagatggaaagacttaacccacgctatttccattttagaaagtgcaaaggctagagttacaaatacgaagacgtctaaaccaatcgtacatgccagaaaaaaataccgctttcacaaaactcgctcccacgtgacccacagaacacccaaagtcaaaaagagtccaaaggtcagaaagaaaagttatctgagtagactgatgctcgcaaacaggcttccattctctgcagcgaagagcctcataaattccccttcacaaggggctttttcatccttaggagacctgagtcctcaagaaaacccttttctggaagtatctgctccttcagaacattttatagaaaagaataatacaaaacacacaactgcaagaaatgcctttgaagaaaatgattttatggaaaacactaacatgccagaaggaaccatctctgaaaacacaaactacaatcatcctcctgaggcagattccgctgggactgcattcaacttagggccaactgttaaacaaactgagacaaaatgggaatacaacaacgtgggcactgacctgtcccccgagcccaaaagcttcaattacccattgctctcgtccccaggtgatcagtttgaaattcagctaacccagcagctacagtcccttatccccaacaacaatgtgagaaggctcattgctcatgttatccggaccttgaagatggactgctctggggcccatgtgcaagtgacctgtgccaagctcatctccaggacaggccacctgatgaagcttctcagtgggcagcaggaagtaaaggcatccgagatagaatgggatacggaccaatggaagattgagaactacattaatgagagcacagaagcccagagtgaacagaaagagaagtcgcttgagctcaaaaaagaagttccaggatatggctatactgacaaactcatcttggcattaattgttactggaatactaacgattttgattatacttttctgcctcattgtgatatgttgtcaccgaaggtcattacaagaagatgaagaaggattctcaaggggcattttcagatttctgccacggaggggatgctcttcgcgaagggagagtcaggatggactttcctcatttggacagccgctctggtttaaagatatgtacaaacctctcagtgccacaagaataaataatcatgcatggaagctgcacaagaagtcatctaatgaggacaagatcctcaacagggaccctggggacagcgaagccccaacggaggaggaggagagtgaagccctgccataggaggagaacacagcccacctcaggcctcctgcaaaaatacatagaataaacaacaacagttactaaatg

SEQ ID NO: 148052 - DNA, 4925 bp, Homo sapiens
  Payload ID: 9299
  Gene Symbol: LRRC37A2
  Gene Name: leucine rich repeat containing 37, member A2
  ENST ID: ENST00000632864
  CDS Start-End: 36-4871
cttacaaggggcacgagcgtctcggagctgccagaatgacttccgctcagtgcccggcactagcgtgtgtcatgtccccgctgcgtttctggggcccatggcccctccttatgtggcaactattgtggctactagtcaaggaggctcagcctctggagtgggtcaaggacccgctccagctgacctctaaccccctggggccgcctgagccctggtcttcccactcctcccatttcccacgggaatctccccatgcgcctactctcccagcagacccgtgggactttgatcacctggggccctctgcttcctcagagatgccagccccaccccaggaatcgactgaaaatttggttccattcctggacacctgggattcagctggagagctgcccctggagccagagcagttcttggcttcacagcaggatttaaaggacaagctgagtccacaggaaaggctccctgtttcgcccaagaagctgaagaaagatccagctcagcgttggagccttgctgagattattggaattatacgccaattatccacacctcagagtcagaaacagactttgcagaatgaatattccagtacagatacaccgtatcccggtagcctgcctccagaactccgggtgaagtcagatgagcctccagggccctctgagcaagttggaccttctcaattccatctagagcccgaaactcaaaatccagagacccttgaagacatccagtcctcttcactccagcaagaagccccagcacagcttccacagctccttgaggaagaaccttcttcaatgcagcaggaggccccagctctgcctccagagtcctctatggagagtctaactctaccgaatcatgaggtgtcagttcaacctccaggtgaggatcaagcttattatcacttgcccaacattacagttaaacctgcagatgtggaggttaccataacttcagaggctaccaatgagacagaatcttcccaagctcagcaggagaccccaattcagtttccagaggaggtggaaccttctgcaacccaacaggaggccccaattgagcctccagttcctcctatggagcatgaactttccatcagtgagcagcagcagccagttcagccttctgagacttctagggaggtcgaatcttctccgacccagcaggagaccccaggtcagcctccagaacatcatgaagtcacagtttcacctccaggtgaccatcaaactcatcatttagattcacccagtgtctctgtgaagcctccagacgtgcagctcaccatagcagcagagcctagtgcagaggtgggaacttctctagtccagcaggaggctacaactcggctctcagggtcaggtaatgatatagaacctcccgccatccagcacgggggcccacctctgctttcagagtcatcagaagaagctggacctttagcagttcaacaggagacttcatttcaatctccggaacctattaataatgagaacccctctccaacccagcaggaggctgcagctgagcatccacagaccgctgaggagggtgagtcttccctaacccatcaggaggccccagctcagactccagagttccctaatgtagttgtagctcaacctccagagcattcacacctgactcaagccacagttcaacctttggatctggggtttaccatcactccagaatccatgacagaggttgaactttctccaaccatgaaggagaccccaactcagcctcctaagaaagttgtaccccaacttcgagtatatcaaggggtaacaaatccaacaccaggtcaggatcaagctcagcatccagtgtcacccagcgttacagttcaacttttggacctgggacttaccatcactccagaacccactacggaggttggacattctacacccccgaagaggactatagtttctccaaagcatcctgaggtgacacttccacatccagaccaggttcagactcagcattcacacctgactcgagccacagttcaacctttggacctggggtttaccatcactccaaaatccatgacagaggttgaaccttctacagccctgatgactacagctcctcctccaggacaccctgaggtgacacttccaccttcagacaagggtcaggctcagcattcacacctgactcaagccaccgttcaacctctggacctggagcttaccataactacaaaacctactacagaggttaaaccgtctccaaccacggaggagacctcaactcagcctccagacctgggacttgccatcattccagaacccactacagagactggacattctacagccctggagaagactacagctcctcgtccagaccgggttcagactctgcatcgaagcctgactgaagtcacaggtccacctactgaactagaacctgctcaggattcactggtgcagtctgaaagttacacccaaaataaggctttaactgcaccagaggaacacaaggcctccacaagcaccaacatatgtgagctctgtacctgcggagatgagatgttgtcatgtattgatctcaacccagagcagaggctccgccaagtgcctgtgccagagcccaacacccacaatggcaccttcaccatcttaattctcagagaaaataacttgactgaattacacaaggattcatttgaaggcctgctatccctccagtatttagatttatcctgcaataaaatacagtctattgaaagacatacatttgaaccactaccatttttgaagtttataaatcttagttgcaatgtaattacagaactcagctttggaacatttcaggcctggcacggaatgcagtttttacataagttaattctcaatcacaatcctctgacaactgttgaagatccgtatctctttaaattgccagcattaaaatatctagacatgggaacaacgctagtcccacttacaacacttaagaacattctcatgatgactgttgaactggaaaaactgatcttacctagccatatggcctgctgcctctgccaatttaaaaacagcattgaggctgtctgcaagacagtcaagctgcattgcaacagtgcatgtctgacaaacaccacacattgtcctgaagaagcatcggtagggaatccagaaggagcgttcatgaaggtgttacaagcccggaagaactacacaagcactgagctgattgttgagccagaggagccctcagacagcagtggcatcaacttgtcaggctttgggagtgagcagctagacaccaatgacgagagtgattttatcagtacactaagttacatcttgccttatttctcagcggtaaacctagatgtgaaatcactgttactaccgttaattaaactgccaaccacaggaaacagcctggcaaagattcaaactgtaggccaaaaccggcagagagtgaagagagtcctcatgggcccaaggagcatccagaaaaggcacttcaaagaggtaggaaggcagagcatcaggagggaacagggtgcccaggcatctgtggagaacgctgccgaagaaaaaaggctcgggagtccagccccaagggaggtggaacagccccacacacagcaggggcctgagaagttagcgggaaacgccgtctacaccaagccttccttcacccaagagcataaggcagcagtctctgtgctgaaacccttctccaagggcgcgccttctacctccagccctgcaaaagccctaccacaggtgagagacagatggaaagacttaacccacgctatttccattttagaaagtgcaaaggctagagttacaaatacgaagacgtctaaaccaatcgtacatgccagaaaaaaataccgctttcacaaaactcgctcccacgtgacccacagaacacccaaagtcaaaaagagtccaaaggtcagaaagaaaagttatctgagtagactgatgctcgcaaacaggcttccattctctgcagcgaagagcctcataaattccccttcacaaggggctttttcatccttaggagacctgagtcctcaagaaaacccttttctggaagtatctgctccttcagaacattttatagaaaagaataatacaaaacacacaactgcaagaaatgcctttgaagaaaatgattttatggaaaacactaacatgccagaaggaaccatctctgaaaacacaaactacaatcatcctcctgaggcagattccgctgggactgcattcaacttagggccaactgttaaacaaactgagacaaaatgggaatacaacaacgtgggcactgacctgtcccccgagcccaaaagcttcaattacccattgctctcgtccccaggtgatcagtttgaaattcagctaacccagcagctacagtcccttatccccaacaacaatgtgagaaggctcattgctcatgttatccggaccttgaagatggactgctctggggcccatgtgcaagtgacctgtgccaagctcatctccaggacaggccacctgatgaagcttctcagtgggcagcaggaagtaaaggcatccgagatagaatgggatacggaccaatggaagattgagaactacattaatgagagcacagaagcccagagtgaacagaaagagaagtcgcttgagctcaaaaaagaagttccaggatatggctatactgacaaactcatcttggcattaattgttactggaatactaacgattttgattatacttttctgcctcattgtgatatgttgtcaccgaaggtcattacaagaagatgaagaaggattctcaagggacagcgaagccccaacggaggaggaggagagtgaagccctgccataggaggagaacacagcccacctcaggcctcctgcaaaaatacatagaataaacaac

SEQ ID NO: 148053 - DNA, 5537 bp, Homo sapiens
  Payload ID: 9300
  Gene Symbol: LRRC37A3
  Gene Name: leucine rich repeat containing 37, member A3
  Uniprot ID: O60309
  ENST ID: ENST00000319651
  CDS Start-End: 404-5308
ttgcaggtcagttgctctccctggaaggaagagtgttctcggatttcaccttaaaggaggaaggctgccagaactgaactagcacttctgaatatcctgaggcgaggtccggtgacttccttgggaagctctgccgcgcccccatcccaccctaccccaccctaccccaccacagcaggcgctggagtcctgggaccaccaggatctgaggcccaaatccttcctcactaaggggaggagaggggtgctccggcagggcaggatgggaaggcgtgcttgggcgggattgtgacataagagtgccctggtgacatggagcagatctgtggcataaataaaggtgtcataaagacagggcgggactcatgcttacaaggggcacgagcgtctcggagctgccagaatgacttccgctcagtgcccggcactagcgtgtgtcatgtccccgctgcgtttctggggcccatggcccctccttatgtggcaactattgtggctactagtcaaggaggctcagcctctggagtgggtcaaggacccgctccagctgacctctaaccccctggggccgcctgagccctggtcttcccactcctcccatttcccacgggaatctccccatgcgcctactctcccagcagacccgtgggactttgatcacctggggccctctgcttcctcagagatgccagccccaccccaggaatcgactgaaaatttggttccattcctggacacctgggattcagctggagagctgcccctggagccagagcagttcttggcttcacagcaggatttaaaggacaagctgagtccacaggaaaggctccctgtttcgcccaagaagctgaagaaagatccagctcagcgttggagccttgctgagattattggaattatacaccaattatccacacctcagagtcagaaacagactttgcagaatgaatattccagtacagatacaccgtatcccggtagcctgcctccagaactccgggtgaagtcagatgagcctccagggccctctgagcaagttggaccttctcaattccatctagagcccgaaactcaaaatccagagacccttgaagacatccagtcctcttcactccagcaagaagccccagcacagcttccacagctccttgaggaagaaccttcttcaatgcagcaggaggccccagctctgcctccagagtcctctatggagagtctaactctaccgaatcatgaggtgtcagttcaacctccaggtgaggatcaagcttattatcacttgcccaacattacagttaaacctgcagatgtggaggttaccataacttcagagcctaccaatgagacagaatcttcccaagcccagcaggagaccccaattcagtttccagaggaggtggaaccttctgcaacccaacaggaggccccaattgagcctccagttcctcctatggagcatgaactttccatcagtgagcagcagcagccagttcagccttctgagtcttctagggaggtcgaatcttctccgacccagcaggagaccccaggtcagcctccagaacatcatgaagtcacagtttcacctccaggtcaccatcaaactcatcatttagcttcacccagtgtctctgtgaagcctccagacgtgcagctcaccatagcagcagagcctagtgcagaggtgggaacttctctagtccaccaggaggctacaactcggctctcagggtcaggtaatgatgtagaacctcccgccatccagcacgggggcccacctctgcttccagagtcatcagaagaagctggacctttagcagttcaacaggagacttcatttcaatctccggaacctattaataatgagaacccctctccaacccagcaggaggctgcagctgagcatccacagaccgctgaggagggtgagtcttccctaacccatcaggaggccccagctcagactccagagttccctaatgtagttgtagctcaacctccagagcattcacacctgactcaagccacagttcaacctttggatctggggtttaccatcactccagaatccatgacagaggttgaactttctccaaccatgaaggagaccccaactcagcctcctaagaaagttgtaccccaacttcgagtatatcaaggggtaacaaatccaacaccaggtcaggatcaagctcagcatccagtgtcacccagcgttacagttcaacttttggacctgggacttaccatcactccagaacccactacggaggttggacattctacacccccgaagaggactatagtttctccaaagcatcctgaggtgacacttccacatccagaccaggttcagactcagcattcacacctgactcgagccacagttcaacctttggacctggggtttaccatcactccaaaatccatgacagaggttgaaccttctacagccctgatgactacagctcctcctccaggacaccctgaggtgacacttccaccttcagacaagggtcaggctcagcattcacacctgactcaagccaccgttcaacctctggacctggagcttaccataactacaaaacctactacagaggttaaaccatctccaaccacggaggagacctcaactcagcttccagacctgggacttgccatcattccagaacccactacagagactggacattctacagccctggagaagactacagctcctcgtccagaccgggttcagactctgcatcgaagcctgactgaagtcacaggtccacctactgaactagaacctgctcaggattcactggtgcagtctgaaagttacacccaaaataaggctttaactgcaccagaggaacacaaggcctccacaagcaccaacatatgtgagctctgtacctgcggagatgagatgttgtcatgtattgatctcaacccagagcagaggctccgccaagtgcctgtgccagagcccaacacccacaatggcaccttcaccatcttaaatttccaaggaaactatatttcttacattgatggaaatgtatggaaagcatacagttggaccgagaaactaattctcagagaaaataacttgactgaattacacaaggattcatttgaaggcctgctatccctccagtatttagatttatcctgcaataaaatacagtctattgaaagacatacatttgaaccactaccatttttgaagtttataaatcttagttgcaatgtaattacagaactcagctttggaacatttcaggcctggcacggaatgcagtttttacataagttaattctcaatcacaatcctctgacaactgttgaagatccatatctctttaaattgccagcattaaaatatctagacatgggaacaacgctagtcccacttacaacacttaagaacattctcatgatgactgttgaactggaaaaactgatcgtacctagccatatggcctgctgcctctgccaatttaaaaacagcattgaggctgtctgcaagacagtcaagctgcattgcaacagtgcatgtctgacaaacaccacacattgtcctgaagaagcatctgtagggaatccagaaggagcgttcatgaaggtgttacaagcccggaagaattacacaagcactgagctgattattgagccggaggagccctcagacagcagtggcatcaacttgtcaggctttgggagtgagcagctagacaccaatgacgagagtgatgttaccagtacactaagttacatcttaccttatttctcagccgttaacctagatgtgaaatcactgttactaccgttcattaaactgccaaccacaggaaacagcctggcaaagattcaaactgtaggcaaaaaccggcagagactgaatagagtcctcatgggcccaaggagcatccagaaaaggcacttcaaagaggtaggaaggcagagcatcaggagggaacagggtgcccaggcatctgtggagaacactgccgaagaaaaaaggctcggaagtccagccccaagggagctgaaacagcctcacacacagcaggggcctgagaagttagcgggaaacgccgtctacaccaagccttcgttcacccaagagcataaggcagcagtctctgtgctgaaacccttctccaagggcgcgccttctacctccagccctgcaaaagccctaccacaggtgagagacagatggaaagacttaacccacgctatttccattttagaaagtgcaaaggctagagttacaaatatgaagacatctaaacccatcgtacattccagaaaaaaataccgctttcacaaaactcgctcccgcatgacccacagaacacccaaggtcaaaaagagtccaaaggtcagaaagaaaagttatctgagtagactgatgctctcaaacaggcttccgttctctgcagcgaagagcctcataaattccccttcacaaggggctttttcatccttaagagacctgagtcctcaagaaaatccttttctggaagtatctgctccttcagaacattttatagaaaacaataatacaaaagacacaactgcaagaaatgcctttgaagaaaatgtttttatggaaaacactaacatgccagaaggaaccatctctgaaaacacaaactacaatcatcctcctgaggcagattccgctgggactgcattcaacttagggccaactgttaaacaaactgagacaaaatgggaatacaacaacgtgggcactgacctgtcccccgagcccaaaagcttcaattacccattgctctcgtccccaggtgatcagtttgaaattcagctaacccagcagctgcagtccgttatccccaacaacaatgtgagaaggctcattgctcatgttatccggaccttgaagatggactgctctggggcccatgtgcaagtgacctgtgccaagctcgtctccaggacaggccacctgatgaagcttctcagtgggcagcaggaagtaaaggcatccaagatagaatgggatacggaccaatggaagactgagaactacattaatgagagcacagaagcccagagtgaacagaaagagaagtcgcttgagttcacaaaagaacttccaggatatggctataccaaaaaactcatcttggcgttaattgtgactggaatactaacgattttgattatacttctctgcctcattgagatctgttgtcaccgaaggtcattacaagaagatgaagaaggattctcaagggacagcgaagccccaacggaggaggagagtgaagccctgccataggaggagaacccagcccacctcaggcctcctgcaaaaatacatagcgtaaacaacggccatcaaaaaagcaggactgaagccagcggcccacacatccacagaggcagcgggcagagcaagcacagggccatcgttcctgcccttgtttcccagtctaattagtcacccagacctgaaaacatatgctcagggggtggagattttacaattaaataacattgtttttggt

SEQ ID NO: 148054 - DNA, 2654 bp, Homo sapiens
  Payload ID: 9300
  Gene Symbol: LRRC37A3
  Gene Name: leucine rich repeat containing 37, member A3
  ENST ID: ENST00000334962
  CDS Start-End: 584-2419
tttttcaatatcactcttcgtggattcttctttatattaaatatgttgtaacttattgttgttattcttttgaatgctcaaattgtccagatttgaccaatgcagtctttgttattttttaactccgcaatccaggttaaactaagctatttttaatgcccagagtaatttataatatttcccactcccaacaggaattgagaaagggactccggaagttgggggcttattcagacttcttaaaagtctaccttcttcctctgtactttcagcccaaagtgagacttttgagttgggaagagatacttctgaaactactaatcactgtcacccaattctaatcccaaccatctttattctaggcataccatactcactgccatgcttacccttcagttgggcacttttgtcctccttcctattggccttctggttcctacccaactgtccagtccacaggcttcaatgatacctttttcccacccctgtggtagtgttggctgcctcctttacctactcaagtaaccgctttaccgctaatttattgctctctgttttcatctataggatcgtacctagccatatggcctgctgcctctgccaatttaaaaacagcattgaggctgtctgcaagacagtcaagctgcattgcaacagtgcatgtctgacaaacaccacacattgtcctgaagaagcatctgtagggaatccagaaggagcgttcatgaaggtgttacaagcccggaagaattacacaagcactgagctgattattgagccggaggagccctcagacagcagtggcatcaacttgtcaggctttgggagtgagcagctagacaccaatgacgagagtgatgttaccagtacactaagttacatcttaccttatttctcagccgttaacctagatgtgaaatcactgttactaccgttcattaaactgccaaccacaggaaacagcctggcaaagattcaaactgtaggcaaaaaccggcagagactgaatagagtcctcatgggcccaaggagcatccagaaaaggcacttcaaagaggtaggaaggcagagcatcaggagggaacagggtgcccaggcatctgtggagaacactgccgaagaaaaaaggctcggaagtccagccccaagggagctgaaacagcctcacacacagcaggggcctgagaagttagcgggaaacgccgtctacaccaagccttcgttcacccaagagcataaggcagcagtctctgtgctgaaacccttctccaagggcgcgccttctacctccagccctgcaaaagccctaccacaggtgagagacagatggaaagacttaacccacgctatttccattttagaaagtgcaaaggctagagttacaaatatgaagacatctaaacccatcgtacattccagaaaaaaataccgctttcacaaaactcgctcccgcatgacccacagaacacccaaggtcaaaaagagtccaaaggtcagaaagaaaagttatctgagtagactgatgctctcaaacaggcttccgttctctgcagcgaagagcctcataaattccccttcacaaggggctttttcatccttaagagacctgagtcctcaagaaaatccttttctggaagtatctgctccttcagaacattttatagaaaacaataatacaaaagacacaactgcaagaaatgcctttgaagaaaatgtttttatggaaaacactaacatgccagaaggaaccatctctgaaaacacaaactacaatcatcctcctgaggcagattccgctgggactgcattcaacttagggccaactgttaaacaaactgagacaaaatgggaatacaacaacgtgggcactgacctgtcccccgagcccaaaagcttcaattacccattgctctcgtccccaggtgatcagtttgaaattcagctaacccagcagctgcagtccgttatccccaacaacaatgtgagaaggctcattgctcatgttatccggaccttgaagatggactgctctggggcccatgtgcaagtgacctgtgccaagctcgtctccaggacaggccacctgatgaagcttctcagtgggcagcaggaagtaaaggcatccaagatagaatgggatacggaccaatggaagactgagaactacattaatgagagcacagaagcccagagtgaacagaaagagaagtcgcttgagttcacaaaagaacttccaggatatggctataccaaaaaactcatcttggcgttaattgtgactggaatactaacgattttgattatacttctctgcctcattgagatctgttgtcaccgaaggtcattacaagaagatgaagaaggattctcaagggacagcgaagccccaacggaggaggagagtgaagccctgccataggaggagaacccagcccacctcaggcctcctgcaaaaatacatagcgtaaacaacggccatcaaaaaagcaggactgaagccagcggcccacacatccacagaggcagcgggcagagcaagcacagggccatcgttcctgcccttgtttcccagtctaattagtcacccagacctgaaaacatatgctcagggggtggagattttacaattaaataacattgtttttggtgccctc

SEQ ID NO: 148055 - DNA, 2589 bp, Homo sapiens
  Payload ID: 9300
  Gene Symbol: LRRC37A3
  Gene Name: leucine rich repeat containing 37, member A3
  ENST ID: ENST00000339474
  CDS Start-End: 44-2302
aacggaagaaacaagatggcggctgaaggcgatccgcatagagatggagtttcaccgtgttgcccaggctggtgtcgaactcctgagctcaggcgatccgcccgcctcagcttcccaaagtgttgggattataggcgtgagccactgcacctggcacagaaatttccaaggaaactatatttcttacattgatggaaatgtatggaaagcatacagttggaccgagaaactaattctcagagaaaataacttgactgaattacacaaggattcatttgaaggcctgctatccctccagtatttaattctcaatcacaatcctctgacaactgttgaagatccatatctctttaaattgccagcattaaaatatctagacatgggaacaacgctagtcccacttacaacacttaagaacattctcatgatgactgttgaactggaaaaactgatcgtacctagccatatggcctgctgcctctgccaatttaaaaacagcattgaggctgtctgcaagacagtcaagctgcattgcaacagtgcatgtctgacaaacaccacacattgtcctgaagaagcatctgtagggaatccagaaggagcgttcatgaaggtgttacaagcccggaagaattacacaagcactgagctgattattgagccggaggagccctcagacagcagtggcatcaacttgtcaggctttgggagtgagcagctagacaccaatgacgagagtgatgttaccagtacactaagttacatcttaccttatttctcagccgttaacctagatgtgaaatcactgttactaccgttcattaaactgccaaccacaggaaacagcctggcaaagattcaaactgtaggcaaaaaccggcagagactgaatagagtcctcatgggcccaaggagcatccagaaaaggcacttcaaagaggtaggaaggcagagcatcaggagggaacagggtgcccaggcatctgtggagaacactgccgaagaaaaaaggctcggaagtccagccccaagggagctgaaacagcctcacacacagcaggggcctgagaagttagcgggaaacgccgtctacaccaagccttcgttcacccaagagcataaggcagcagtctctgtgctgaaacccttctccaagggcgcgccttctacctccagccctgcaaaagccctaccacaggtgagagacagatggaaagacttaacccacgctatttccattttagaaagtgcaaaggctagagttacaaatatgaagacatctaaacccatcgtacattccagaaaaaaataccgctttcacaaaactcgctcccgcatgacccacagaacacccaaggtcaaaaagagtccaaaggtcagaaagaaaagttatctgagtagactgatgctctcaaacaggcttccgttctctgcagcgaagagcctcataaattccccttcacaaggggctttttcatccttaagagacctgagtcctcaagaaaatccttttctggaagtatctgctccttcagaacattttatagaaaacaataatacaaaagacacaactgcaagaaatgcctttgaagaaaatgtttttatggaaaacactaacatgccagaaggaaccatctctgaaaacacaaactacaatcatcctcctgaggcagattccgctgggactgcattcaacttagggccaactgttaaacaaactgagacaaaatgggaatacaacaacgtgggcactgacctgtcccccgagcccaaaagcttcaattacccattgctctcgtccccaggtgatcagtttgaaattcagctaacccagcagctgcagtccgttatccccaacaacaatgtgagaaggctcattgctcatgttatccggaccttgaagatggactgctctggggcccatgtgcaagtgacctgtgccaagctcgtctccaggacaggccacctgatgaagcttctcagtgggcagcaggaagtaaaggcatccaagatagaatgggatacggaccaatggaagactgagaactacattaatgagagcacagaagcccagagtgaacagaaagagaagtcgcttgagttcacaaaagaacttccaggatatggctataccaaaaaactcatcttggcgttaattgtgactggaatactaacgattttgattatacttctctgcctcattgagatctgttgtcaccgaaggtcattacaagaagatgaagaaggattctcaagggacagcgaagccccaacggaggaggagagtgaagccctgccataggaggagaacccagcccacctcaggcctcctgcaaaaatacatagcgtaaacaacggccatcaaaaaagcaggactgaagccagcggcccacacatccacagaggcagcgggcagagcaagcacagggccatcgttcctgcccttgtttcccagtctaattagtcacccagacctgaaaacatatgctcagggggtggagattttacaattaaataacattgtttttggtgccctctcccttggttcatcaagcaccagtcatataataccacatacttgaactcctg

SEQ ID NO: 148056 - DNA, 3273 bp, Homo sapiens
  Payload ID: 9300
  Gene Symbol: LRRC37A3
  Gene Name: leucine rich repeat containing 37, member A3
  ENST ID: ENST00000400877
  CDS Start-End: 1018-3036
attttccatgtttacatacacaaatacctgccattctgtgacagttgcctttagtattcagtacagtaacatacagtacaggtttgtagcctaggagtcctaagccataccgtgtaccctaggtatggtggctacaccacctaggtttgtgtaagtatacgctatgatattagcacaatggtgaaataacctagtgacccatttctcaagctcctcacgtggcaagcaatgcatgactgcatatgaaagctcttaaatagggattgtttctaaattaatctcaaaacagtcattatttactatttatggaattttttttaaaaaaaggagcaaaagtatcatttcagtgggaacttaacttggggctacagtgttttatttaacttttaccccaaagttgcaaagtgttttgaaatttttccctgtaaaataattattttaattcaatttaaataaaacccaccaaggagacttcaagctttaagaagtctagcttcctgtgaaatgtgagaggaagtcagcactcatttcagaaatctgattataataatagctccatccctaaatgaggtgaatcttggaatctcttccattttattttattttatttttttgagatggagtttctctcttgttgcccaggctgaagtgcaatgttgtgatctcggctcactgcaacctctgcctcccaggttcaagcgattctcctgctttggcctcctgagtagctgggattgcagaaatttccaaggaaactatatttcttacattgatggaaatgtatggaaagcatacagttggaccgagaaactaattctcagagaaaataacttgactgaattacacaaggattcatttgaaggcctgctatccctccagtatttagatttatcctgcaataaaatacagtctattgaaagacatacatttgaaccactaccatttttgaagtttataaatcttagttgcaatgtaattacagaactcagctttggaacatttcaggcctggcacggaatgcagtttttacataagttaattctcaatcacaatcctctgacaactgttgaagatccatatctctttaaattgccagcattaaaatatctagacatgggaacaacgctagtcccacttacaacacttaagaacattctcatgatgactgttgaactggaaaaactgatcgtacctagccatatggcctgctgcctctgccaatttaaaaacagcattgaggctgtctgcaagacagtcaagctgcattgcaacagtgcatgtctgacaaacaccacacattgtcctgaagaagcatctgtagggaatccagaaggagcgttcatgaaggtgttacaagcccggaagaattacacaagcactgagctgattattgagccggaggagccctcagacagcagtggcatcaacttgtcaggctttgggagtgagcagctagacaccaatgacgagagtgatgttaccagtacactaagttacatcttaccttatttctcagccgttaacctagatgtgaaatcactgttactaccgttcattaaactgccaaccacaggaaacagcctggcaaagattcaaactgtaggcaaaaaccggcagagactgaatagagtcctcatgggcccaaggagcatccagaaaaggcacttcaaagaggtaggaaggcagagcatcaggagggaacagggtgcccaggcatctgtggagaacactgccgaagaaaaaaggctcggaagtccagccccaagggagctgaaacagcctcacacacagcaggggcctgagaagttagcgggaaacgccgtctacaccaagccttcgttcacccaagagcataaggcagcagtctctgtgctgaaacccttctccaagggcgcgccttctacctccagccctgcaaaagccctaccacaggtgagagacagatggaaagacttaacccacgctatttccattttagaaagtgcaaaggctagagttacaaatatgaagacatctaaacccatcgtacattccagaaaaaaataccgctttcacaaaactcgctcccgcatgacccacagaacacccaaggtcaaaaagagtccaaaggtcagaaagaaaagttatctgagtagactgatgctctcaaacaggcttccgttctctgcagcgaagagcctcataaattccccttcacaaggggctttttcatccttaagagacctgagtcctcaagaaaatccttttctggaagtatctgctccttcagaacattttatagaaaacaataatacaaaagacacaactgcaagaaatgcctttgaagaaaatgtttttatggaaaacactaacatgccagaaggaaccatctctgaaaacacaaactacaatcatcctcctgaggcagattccgctgggactgcattcaacttagggccaactgttaaacaaactgagacaaaatgggaatacaacaacgtgggcactgacctgtcccccgagcccaaaagcttcaattacccattgctctcgtccccaggtgatcagtttgaaattcagctaacccagcagctgcagtccgttatccccaacaacaatgtgagaaggctcattgctcatgttatccggaccttgaagatggactgctctggggcccatgtgcaagtgacctgtgccaagctcgtctccaggacaggccacctgatgaagcttctcagtgggcagcaggaagtaaaggcatccaagatagaatgggatacggaccaatggaagactgagaactacattaatgagagcacagaagcccagagtgaacagaaagagaagtcgcttgagttcacaaaagaacttccaggatatggctataccaaaaaactcatcttggcgttaattgtgactggaatactaacgattttgattatacttctctgcctcattgagatctgttgtcaccgaaggtcattacaagaagatgaagaaggattctcaagggacagcgaagccccaacggaggaggagagtgaagccctgccataggaggagaacccagcccacctcaggcctcctgcaaaaatacatagcgtaaacaacggccatcaaaaaagcaggactgaagccagcggcccacacatccacagaggcagcgggcagagcaagcacagggccatcgttcctgcccttgtttcccagtctaattagtcacccagacctgaaaacatatgctcagggggtggagattttacaattaaataacattgtttttggtgccctctc

SEQ ID NO: 148057 - DNA, 692 bp, Homo sapiens
  Payload ID: 9300
  Gene Symbol: LRRC37A3
  Gene Name: leucine rich repeat containing 37, member A3
  ENST ID: ENST00000584788
  CDS Start-End: 1-692
agccctggagaagactacagctcctcgtccagaccgggttcagactctgcatcgaagcctgactgaagtcacaggtccacctactgaactagaacctgctcaggattcactggtgcagtctgaaagttacacccaaaataaggctttaactgcaccagaggaacacaaggcctccacaagcaccaacatatgtgagctctgtacctgcggagatgagatgttgtcatgtattgatctcaacccagagcagaggctccgccaagtgcctgtgccagagcccaacacccacaatggcaccttcaccatcttaaatttccaaggaaactatatttcttacattgatggaaatgtatggaaagcatacagttggaccgagaaactaattctcagagaaaataacttgactgaattacacaaggattcatttgaaggcctgctatccctccagtatttagatttatcctgcaataaaatacagtctattgaaagacatacatttgaaccactaccatttttgaagtttataaatcttagttgcaatgtaattacagaactcagctttggaacatttcaggcctggcacggaatgcagtttttacataagttgatcgtacctagccatatggcctgctgcctctgccaatttaaaaacagcattgaggctgtctgcaagacagtcaagctgcattgca

SEQ ID NO: 148058 - DNA, 510 bp, Homo sapiens
  Payload ID: 9300
  Gene Symbol: LRRC37A3
  Gene Name: leucine rich repeat containing 37, member A3
  ENST ID: ENST00000583510
  CDS Start-End: 1-282
ggggcccatgtgcaagtgacctgtgccaagctcgtctccaggacaggccacctgatgaagcttctcagtgggcagcaggaagtaaaggcatccaagatagaatgggatacggaccaatggaagactgagaactacattaatgagagcacagaagcccagagtgaacagaaagagaagtcgcttgagatctgttgtcaccgaaggtcattacaagaagatgaagaaggattctcaagggacagcgaagccccaacggaggaggagagtgaagccctgccataggaggagaacccagcccacctcaggcctcctgcaaaaatacatagcgtaaacaacggccatcaaaaaagcaggactgaagccagcggcccacacatccacagaggcagcgggcagagcaagcacagggccatcgttcctgcccttgtttcccagtctaattagtcacccagacctgaaaacatatgctcagggggtggagattttacaattaaataacattgtttttgg

SEQ ID NO: 148059 - DNA, 589 bp, Homo sapiens
  Payload ID: 9300
  Gene Symbol: LRRC37A3
  Gene Name: leucine rich repeat containing 37, member A3
  ENST ID: ENST00000580464
  CDS Start-End: 1-589
ggttaaaccatctccaaccacggaggagacctcaactcagcttccagacctgggacttgccatcattccagaacccactacagagactggacattctacagccctggagaagactacagctcctcgtccagaccgggttcagactctgcatcgaagcctgactgaagtcacaggtccacctactgaactagaacctgctcaggattcactggtgcagtctgaaagttacacccaaaataaggctttaactgcaccagaggaacacaaggcctccacaagcaccaacatatgtgagctctgtacctgcggagatgagatgttgtcatgtattgatctcaacccagagcagaggctccgccaagtgcctgtgccagagcccaacacccacaatggcaccttcaccatcttaaatttccaaggaaactatatttcttacattgatggaaatgtatggaaagcatacagttggaccgagaaactaattctcaatcacaatcctctgacaactgttgaagatccatatctctttaaattgccagcattaaaatatctagacatgggaacaacgctagtcccacttacaacactt

SEQ ID NO: 148060 - DNA, 735 bp, Homo sapiens
  Payload ID: 9300
  Gene Symbol: LRRC37A3
  Gene Name: leucine rich repeat containing 37, member A3
  ENST ID: ENST00000581368
  CDS Start-End: 28-735
ccgcgctccggtaacggaagaaacaagatggcggctgaaggcgatccgcaaaatttccaaggaaactatatttcttacattgatggaaatgtatggaaagcatacagttggaccgagaaactaattctcagagaaaataacttgactgaattacacaaggattcatttgaaggcctgctatccctccagtatttagatttatcctgcaataaaatacagtctattgaaagacatacatttgaaccactaccatttttgaagtttataaatcttagttgcaatgtaattacagaactcagctttggaacatttcaggcctggcacggaatgcagtttttacataagttaattctcaatcacaatcctctgacaactgttgaagatccatatctctttaaattgccagcattaaaatatctagacatgggaacaacgctagtcccacttacaacacttaagaacattctcatgatgactgttgaactggaaaaactgatcgtacctagccatatggcctgctgcctctgccaatttaaaaacagcattgaggctgtctgcaagacagtcaagctgcattgcaacagtgcatgtctgacaaacaccacacattgtcctgaagaagcatctgtagggaatccagaaggagcgttcatgaaggtgttacaagcccggaagaattacacaagcactgagctgattattgagccggaggagccctcagacagcagtggcatc

SEQ ID NO: 148061 - DNA, 5665 bp, Homo sapiens
  Payload ID: 9300
  Gene Symbol: LRRC37A3
  Gene Name: leucine rich repeat containing 37, member A3
  Uniprot ID: O60309
  ENST ID: ENST00000584306
  CDS Start-End: 532-5436
tgggattataggcgtgagccactgcacctggcacaggctgaagtgcaatgttgtgatctcggctcactgcaacctctgcctcccaggttcaagcgattctcctgctttggcctcctgagtagctgggattgcaggtcagttgctctccctggaaggaagagtgttctcggatttcaccttaaaggaggaaggctgccagaactgaactagcacttctgaatatcctgaggcgaggtccggtgacttccttgggaagctctgccgcgcccccatcccaccctaccccaccctaccccaccacagcaggcgctggagtcctgggaccaccaggatctgaggcccaaatccttcctcactaaggggaggagaggggtgctccggcagggcaggatgggaaggcgtgcttgggcgggattgtgacataagagtgccctggtgacatggagcagatctgtggcataaataaaggtgtcataaagacagggcgggactcatgcttacaaggggcacgagcgtctcggagctgccagaatgacttccgctcagtgcccggcactagcgtgtgtcatgtccccgctgcgtttctggggcccatggcccctccttatgtggcaactattgtggctactagtcaaggaggctcagcctctggagtgggtcaaggacccgctccagctgacctctaaccccctggggccgcctgagccctggtcttcccactcctcccatttcccacgggaatctccccatgcgcctactctcccagcagacccgtgggactttgatcacctggggccctctgcttcctcagagatgccagccccaccccaggaatcgactgaaaatttggttccattcctggacacctgggattcagctggagagctgcccctggagccagagcagttcttggcttcacagcaggatttaaaggacaagctgagtccacaggaaaggctccctgtttcgcccaagaagctgaagaaagatccagctcagcgttggagccttgctgagattattggaattatacaccaattatccacacctcagagtcagaaacagactttgcagaatgaatattccagtacagatacaccgtatcccggtagcctgcctccagaactccgggtgaagtcagatgagcctccagggccctctgagcaagttggaccttctcaattccatctagagcccgaaactcaaaatccagagacccttgaagacatccagtcctcttcactccagcaagaagccccagcacagcttccacagctccttgaggaagaaccttcttcaatgcagcaggaggccccagctctgcctccagagtcctctatggagagtctaactctaccgaatcatgaggtgtcagttcaacctccaggtgaggatcaagcttattatcacttgcccaacattacagttaaacctgcagatgtggaggttaccataacttcagagcctaccaatgagacagaatcttcccaagcccagcaggagaccccaattcagtttccagaggaggtggaaccttctgcaacccaacaggaggccccaattgagcctccagttcctcctatggagcatgaactttccatcagtgagcagcagcagccagttcagccttctgagtcttctagggaggtcgaatcttctccgacccagcaggagaccccaggtcagcctccagaacatcatgaagtcacagtttcacctccaggtcaccatcaaactcatcatttagcttcacccagtgtctctgtgaagcctccagacgtgcagctcaccatagcagcagagcctagtgcagaggtgggaacttctctagtccaccaggaggctacaactcggctctcagggtcaggtaatgatgtagaacctcccgccatccagcacgggggcccacctctgcttccagagtcatcagaagaagctggacctttagcagttcaacaggagacttcatttcaatctccggaacctattaataatgagaacccctctccaacccagcaggaggctgcagctgagcatccacagaccgctgaggagggtgagtcttccctaacccatcaggaggccccagctcagactccagagttccctaatgtagttgtagctcaacctccagagcattcacacctgactcaagccacagttcaacctttggatctggggtttaccatcactccagaatccatgacagaggttgaactttctccaaccatgaaggagaccccaactcagcctcctaagaaagttgtaccccaacttcgagtatatcaaggggtaacaaatccaacaccaggtcaggatcaagctcagcatccagtgtcacccagcgttacagttcaacttttggacctgggacttaccatcactccagaacccactacggaggttggacattctacacccccgaagaggactatagtttctccaaagcatcctgaggtgacacttccacatccagaccaggttcagactcagcattcacacctgactcgagccacagttcaacctttggacctggggtttaccatcactccaaaatccatgacagaggttgaaccttctacagccctgatgactacagctcctcctccaggacaccctgaggtgacacttccaccttcagacaagggtcaggctcagcattcacacctgactcaagccaccgttcaacctctggacctggagcttaccataactacaaaacctactacagaggttaaaccatctccaaccacggaggagacctcaactcagcttccagacctgggacttgccatcattccagaacccactacagagactggacattctacagccctggagaagactacagctcctcgtccagaccgggttcagactctgcatcgaagcctgactgaagtcacaggtccacctactgaactagaacctgctcaggattcactggtgcagtctgaaagttacacccaaaataaggctttaactgcaccagaggaacacaaggcctccacaagcaccaacatatgtgagctctgtacctgcggagatgagatgttgtcatgtattgatctcaacccagagcagaggctccgccaagtgcctgtgccagagcccaacacccacaatggcaccttcaccatcttaaatttccaaggaaactatatttcttacattgatggaaatgtatggaaagcatacagttggaccgagaaactaattctcagagaaaataacttgactgaattacacaaggattcatttgaaggcctgctatccctccagtatttagatttatcctgcaataaaatacagtctattgaaagacatacatttgaaccactaccatttttgaagtttataaatcttagttgcaatgtaattacagaactcagctttggaacatttcaggcctggcacggaatgcagtttttacataagttaattctcaatcacaatcctctgacaactgttgaagatccatatctctttaaattgccagcattaaaatatctagacatgggaacaacgctagtcccacttacaacacttaagaacattctcatgatgactgttgaactggaaaaactgatcgtacctagccatatggcctgctgcctctgccaatttaaaaacagcattgaggctgtctgcaagacagtcaagctgcattgcaacagtgcatgtctgacaaacaccacacattgtcctgaagaagcatctgtagggaatccagaaggagcgttcatgaaggtgttacaagcccggaagaattacacaagcactgagctgattattgagccggaggagccctcagacagcagtggcatcaacttgtcaggctttgggagtgagcagctagacaccaatgacgagagtgatgttaccagtacactaagttacatcttaccttatttctcagccgttaacctagatgtgaaatcactgttactaccgttcattaaactgccaaccacaggaaacagcctggcaaagattcaaactgtaggcaaaaaccggcagagactgaatagagtcctcatgggcccaaggagcatccagaaaaggcacttcaaagaggtaggaaggcagagcatcaggagggaacagggtgcccaggcatctgtggagaacactgccgaagaaaaaaggctcggaagtccagccccaagggagctgaaacagcctcacacacagcaggggcctgagaagttagcgggaaacgccgtctacaccaagccttcgttcacccaagagcataaggcagcagtctctgtgctgaaacccttctccaagggcgcgccttctacctccagccctgcaaaagccctaccacaggtgagagacagatggaaagacttaacccacgctatttccattttagaaagtgcaaaggctagagttacaaatatgaagacatctaaacccatcgtacattccagaaaaaaataccgctttcacaaaactcgctcccgcatgacccacagaacacccaaggtcaaaaagagtccaaaggtcagaaagaaaagttatctgagtagactgatgctctcaaacaggcttccgttctctgcagcgaagagcctcataaattccccttcacaaggggctttttcatccttaagagacctgagtcctcaagaaaatccttttctggaagtatctgctccttcagaacattttatagaaaacaataatacaaaagacacaactgcaagaaatgcctttgaagaaaatgtttttatggaaaacactaacatgccagaaggaaccatctctgaaaacacaaactacaatcatcctcctgaggcagattccgctgggactgcattcaacttagggccaactgttaaacaaactgagacaaaatgggaatacaacaacgtgggcactgacctgtcccccgagcccaaaagcttcaattacccattgctctcgtccccaggtgatcagtttgaaattcagctaacccagcagctgcagtccgttatccccaacaacaatgtgagaaggctcattgctcatgttatccggaccttgaagatggactgctctggggcccatgtgcaagtgacctgtgccaagctcgtctccaggacaggccacctgatgaagcttctcagtgggcagcaggaagtaaaggcatccaagatagaatgggatacggaccaatggaagactgagaactacattaatgagagcacagaagcccagagtgaacagaaagagaagtcgcttgagttcacaaaagaacttccaggatatggctataccaaaaaactcatcttggcgttaattgtgactggaatactaacgattttgattatacttctctgcctcattgagatctgttgtcaccgaaggtcattacaagaagatgaagaaggattctcaagggacagcgaagccccaacggaggaggagagtgaagccctgccataggaggagaacccagcccacctcaggcctcctgcaaaaatacatagcgtaaacaacggccatcaaaaaagcaggactgaagccagcggcccacacatccacagaggcagcgggcagagcaagcacagggccatcgttcctgcccttgtttcccagtctaattagtcacccagacctgaaaacatatgctcagggggtggagattttacaattaaataacattgtttttggt

SEQ ID NO: 148062 - DNA, 5177 bp, Homo sapiens
  Payload ID: 9301
  Gene Symbol: LRRC37A
  Gene Name: leucine rich repeat containing 37A
  Uniprot ID: A6NMS7
  ENST ID: ENST00000320254
  CDS Start-End: 4-5106
agaatgtcttctgctcagtgcccggcactagtgtgtgtcatgtcccggctgcgtttctggggcccatggcccctccttatgtggcaactattgtggctactagtcaaggaggctcagcctctggagtgggtcaaggacccgctccagctcacctctaatcccctggggccgcctgagtcctggtcttcccactcctcccatttcccacgggaatctccccatgcgcctactctcccagcagacccgtgggactttgatcacctggggccctctgcttcctcagagatgccagccccaccccaggaatcgactgaaaatttggttccattcctggacacctgggattcagctggagagcagcccctggagccagagcagttcttggcttcacagcaggatttaaaggacaagctgagtccacaggaaaggctccctgtttcgcccaagaagctgaagaaagatccagctcagcgttggagccttgctgagattattggaattacacgccaattatccacacctcagagtcagaaacagactttgcagaatgaatattccagtacagatacaccgtatcccggtagcctgcctccagaactccgggtgaagtcagatgagcctccagggccctctgagcaagttggaccttctcaattccatctagagcccgaaactcaaaatccagagacccttgaagacatccagtcctcttcactccagcaagaagccccagcacagcttccacagctccttgaggaagaaccttcttcaatgcagcaggaggccccagctctgcctccagagtcctctatggagagtctaactctaccgaatcatgaggtgtcagttcaacctccaggtgaggatcaagcttattatcacttgcccaacattacagttaaacctgcagatgtggaggttaccataacttcagagcctaccaatgagacagaatcttcccaagcccagcaggagaccccaattcagtttccagaggaggtggaaccttctgcaacccaacaggaggccccaattgagcctccagttcctcctatggagcatgaactttccatcagtgagcagcagcagccagttcagccttctgagtctcctagggaggtcgaatcttctccgacccagcaggagaccccaggtcagcctccagaacatcatgaagtcacagtttcacctccaggtcaccatcaaactcatcatttagcttcacccagtgtctctgtgaagcctccagacgtgcagctcaccatagcagcagagcctagtgcagaggtgggaacttctctagtccaccaggaggctacaactcggctctcagggtcaggtaatgatgtagaacctcccgccatccagcacgggggcccacctctgcttccagagtcatcagaagaagctggacctttagcagttcaacaggagacttcatttcaatctccggaacctattaataatgagaacccctctccaacccagcaggaggctgcagctgagcatccacagaccgctgaggagggtgagtcttccctaacccatcaggaggccccagctcagactccagagttccctaatgtagttgtagctcaacctccagagcattcacacctgactcaagccacagttcaacctttggatctggggtttaccatcactccagaatccaagacagaggttgaactttctccaaccatgaaggagaccccaactcagcctcctaagaaagttgtaccccaacttcgagtatatcaaggggtaacaaatccaacaccaggtcaggatcaagctcagcatccagtgtcacccagcgttacagttcaacttttggacctgggacttaccatcactccagaacctactacggaggttggacattctacacccccgaagaggactatagtttctccaaagcatcctgaggtgacacttccacatccagaccaggttcagactcagcattcacacctgactcgagccacagttcaacctttggacctggggtttaccatcactccaaaatccatgacagaggttgaaccttctacagccctgatgactacagctcctcctccaggacaccctgaggtgacacttccaccttcagacaagggtcaggctcagcattcacacctgactcaagccaccgttcaacctctggacctggagcttaccataactacaaaacctactacagaggttaaaccatctccaaccacggaggagacctcaactcagcctccagacctgggacttgccatcattccagaacccactacagagactggacattctacagccctggagaagactacagctcctcgtccagaccgggttcagactctgcatcgaagcctgactgaagtcacaggtccacctactgaactagaacctgctcaggattcactggtgcagtctgaaagttacacccaaaataaggctttaactgcaccagaggaacacaaggcctccacaagcaccaacatatgtgagctctgtacctgcggagatgagatgttgtcatgtattgatctcaacccagagcagaggctccgccaagtgcctgtgccagagcccaacacccacaatggcaccttcaccatcttaaatttccaaggaaactatatttcttacattgatggaaatgtatggaaagcatacagttggactgagaaactaattctcagagaaaataacttgactgaattacacaaggattcatttgaaggcctgctatccctccagtatttagatttatcctgcaataaaatacagtctattgaaagacatacatttgaaccactaccatttttgaagtttataaatcttagttgcaatgtaattacagaactcagctttggaacatttcaggcctggcacggaatgcagtttttacataagttaattctcaatcacaatcctctgacaactgttgaagatccgtatctctttaaattgccagcattaaaatatctagacatgggaacaacgctagtcccacttacaacacttaagaacattctcatgatgactgttgaactggaaaaactgatcttacctagccatatggcctgctgcctctgccaatttaaaaacagcattgaggctgtctgcaagacagtcaagctgcattgcaacagtgcatgtctgacaaacaccacacattgtcctgaagaagcatcggtagggaatccagaaggagcgttcatgaaggtgttacaagcccggaagaactacacaagcactgagctgattgttgagccagaggagccctcagacagcagtggcatcaacttgtcaggctttgggagtgagcagctagacaccaatgacgagagtgattttatcagtacactaagttacatcttgccttatttctcagcggtaaacctagatgtgaaatcactgttactaccgttcattaaactgccaaccacaggaaacagcctggcaaagattcaaactgtaggccaaaaccggcagagagtgaagagagtcctcatgggcccaaggagcatccagaaaaggcacttcaaagaggtaggaaggcagagcatcaggagggaacagggtgcccaggcatctgtggagaacgctgccgaagaaaaaaggctcacgagtccagccccaagggaggtggaacagccccacacacagcaggggcctgagaagttagcgggaaacgccgtctacaccaagccttcgttcacccaagagcataaggcagcagtctctgtgctgaaacccttctccaagggcacgccttctacctccagccctgcaaaagccctaccacaggtgagagacagatcgaaagacttaacccacgctatttccattttagaaagtgcaaaggctagagttacaaatacgaagacgtctaaaccaatcgtacatgccagaaaaaaataccgctttcacaaaactcgctcccacgtgacccacagaacaaccaaagtcaaaaagagtccaaaggtcagaaagaaaagttatctgagtagactgatgctcgcaaacaggcttccattctctgcagcgaagagcctcataaattccccttcacaaggggctttttcatccttaggagacctgagtcctcaagaaaacccttttctggaagtatctgctctttcagaacattttatagagaagaataatacaaaacacacaactgcaagaaatgcctttgaagaaaatgattttatggaaaacactaacatgccagaaggaaccatctctgaaaacacaaactacaatcatcctcctgaggcagattccgctgggactgcattcaacttagggccaactgttaaacaaactgagacaaaatgggaatacaacaacgtgggcactgacctgtcccccgagcccaaaagcttcaattacccattgctctcgtccccaggtgatcagtttgaaattcagctaacccagcagctacagtcccttatccccaacaacaatgtgagaaggctcattgctcatgttatccggaccttgaagatggactgctctggggcccatgtgcaagtgacctgtgccaagctcatctccaggacaggccacctgatgaagcttctcagtgggcagcaggaagtaaaggcatccaagatagaatgggatacggaccaatggaagattgagaactacattaatgagagcacagaagcccagagtgaacagaaagagaagtcgcttgagctcaaaaaagaagttccaggatatggctatactgacaaactcatcttggcattaattgttactggaatactaacgattttgattatacttttctgcctcattgtgatatgttgtcaccgaaggtcattacaagaagatgaagaaggattctcaaggggcattttcagatttctgccatggaggggatgctcttcgcgaagggagagtcaggatggactttcctcatttggacagccgctctggtttaaagatctgtacaaacctctcagtgccacaagaataaataatcatgcatggaagctgcacaagaagtcatctaatgaggacaagatcctcaacagggaccctggggacagcgaagccccaacggaggaggaggagagtgaagccctgccataggaggagaacacagcccacctcaggcctcctgcaaaaatacatagaataaacaacaacagttactaaatgaa

SEQ ID NO: 148063 - DNA, 4997 bp, Homo sapiens
  Payload ID: 9301
  Gene Symbol: LRRC37A
  Gene Name: leucine rich repeat containing 37A
  ENST ID: ENST00000393465
  CDS Start-End: 36-4943
cttagaaggggcacgagcgtctcggagctgccagaatgtcttctgctcagtgcccggcactagtgtgtgtcatgtcccggctgcgtttctggggcccatggcccctccttatgtggcaactattgtggctactagtcaaggaggctcagcctctggagtgggtcaaggacccgctccagctcacctctaatcccctggggccgcctgagtcctggtcttcccactcctcccatttcccacgggaatctccccatgcgcctactctcccagcagacccgtgggactttgatcacctggggccctctgcttcctcagagatgccagccccaccccaggaatcgactgaaaatttggttccattcctggacacctgggattcagctggagagcagcccctggagccagagcagttcttggcttcacagcaggatttaaaggacaagctgagtccacaggaaaggctccctgtttcgcccaagaagctgaagaaagatccagctcagcgttggagccttgctgagattattggaattacacgccaattatccacacctcagagtcagaaacagactttgcagaatgaatattccagtacagatacaccgtatcccggtagcctgcctccagaactccgggtgaagtcagatgagcctccagggccctctgagcaagttggaccttctcaattccatctagagcccgaaactcaaaatccagagacccttgaagacatccagtcctcttcactccagcaagaagccccagcacagcttccacagctccttgaggaagaaccttcttcaatgcagcaggaggccccagctctgcctccagagtcctctatggagagtctaactctaccgaatcatgaggtgtcagttcaacctccaggtgaggatcaagcttattatcacttgcccaacattacagttaaacctgcagatgtggaggttaccataacttcagagcctaccaatgagacagaatcttcccaagcccagcaggagaccccaattcagtttccagaggaggtggaaccttctgcaacccaacaggaggccccaattgagcctccagttcctcctatggagcatgaactttccatcagtgagcagcagcagccagttcagccttctgagtctcctagggaggtcgaatcttctccgacccagcaggagaccccaggtcagcctccagaacatcatgaagtcacagtttcacctccaggtcaccatcaaactcatcatttagcttcacccagtgtctctgtgaagcctccagacgtgcagctcaccatagcagcagagcctagtgcagaggtgggaacttctctagtccaccaggaggctacaactcggctctcagggtcaggtaatgatgtagaacctcccgccatccagcacgggggcccacctctgcttccagagtcatcagaagaagctggacctttagcagttcaacaggagacttcatttcaatctccggaacctattaataatgagaacccctctccaacccagcaggaggctgcagctgagcatccacagaccgctgaggagggtgagtcttccctaacccatcaggaggccccagctcagactccagagttccctaatgtagttgtagctcaacctccagagcattcacacctgactcaagccacagttcaacctttggatctggggtttaccatcactccagaatccaagacagaggttgaactttctccaaccatgaaggagaccccaactcagcctcctaagaaagttgtaccccaacttcgagtatatcaaggggtaacaaatccaacaccaggtcaggatcaagctcagcatccagtgtcacccagcgttacagttcaacttttggacctgggacttaccatcactccagaacctactacggaggttggacattctacacccccgaagaggactatagtttctccaaagcatcctgaggtgacacttccacatccagaccaggttcagactcagcattcacacctgactcgagccacagttcaacctttggacctggggtttaccatcactccaaaatccatgacagaggttgaaccttctacagccctgatgactacagctcctcctccaggacaccctgaggtgacacttccaccttcagacaagggtcaggctcagcattcacacctgactcaagccaccgttcaacctctggacctggagcttaccataactacaaaacctactacagaggttaaaccatctccaaccacggaggagacctcaactcagcctccagacctgggacttgccatcattccagaacccactacagagactggacattctacagccctggagaagactacagctcctcgtccagaccgggttcagactctgcatcgaagcctgactgaagtcacaggtccacctactgaactagaacctgctcaggattcactggtgcagtctgaaagttacacccaaaataaggctttaactgcaccagaggaacacaaggcctccacaagcaccaacatatgtgagctctgtacctgcggagatgagatgttgtcatgtattgatctcaacccagagcagaggctccgccaagtgcctgtgccagagcccaacacccacaatggcaccttcaccatcttaaatttccaaggaaactatatttcttacattgatggaaatgtatggaaagcatacagttggactgagaaactaattctcagagaaaataacttgactgaattacacaaggattcatttgaaggcctgctatccctccagtatttagatttatcctgcaataaaatacagtctattgaaagacatacatttgaaccactaccatttttgaagtttataaatcttagttgcaatgtaattacagaactcagctttggaacatttcaggcctggcacggaatgcagtttttacataagttaattctcaatcacaatcctctgacaactgttgaagatccgtatctctttaaattgccagcattaaaatatctagacatgggaacaacgctagtcccacttacaacacttaagaacattctcatgatgactgttgaactggaaaaactgatcttacctagccatatggcctgctgcctctgccaatttaaaaacagcattgaggctgtctgcaagacagtcaagctgcattgcaacagtgcatgtctgacaaacaccacacattgtcctgaagaagcatcggtagggaatccagaaggagcgttcatgaaggtgttacaagcccggaagaactacacaagcactgagctgattgttgagccagaggagccctcagacagcagtggcatcaacttgtcaggctttgggagtgagcagctagacaccaatgacgagagtgattttatcagtacactaagttacatcttgccttatttctcagcggtaaacctagatgtgaaatcactgttactaccgttcattaaactgccaaccacaggaaacagcctggcaaagattcaaactgtaggccaaaaccggcagagagtgaagagagtcctcatgggcccaaggagcatccagaaaaggcacttcaaagaggtaggaaggcagagcatcaggagggaacagggtgcccaggcatctgtggagaacgctgccgaagaaaaaaggctcacgagtccagccccaagggaggtggaacagccccacacacagcaggggcctgagaagttagcgggaaacgccgtctacaccaagccttcgttcacccaagagcataaggcagcagtctctgtgctgaaacccttctccaagggcacgccttctacctccagccctgcaaaagccctaccacaggtgagagacagatcgaaagacttaacccacgctatttccattttagaaagtgcaaaggctagagttacaaatacgaagacgtctaaaccaatcgtacatgccagaaaaaaataccgctttcacaaaactcgctcccacgtgacccacagaacaaccaaagtcaaaaagagtccaaaggtcagaaagaaaagttatctgagtagactgatgctcgcaaacaggcttccattctctgcagcgaagagcctcataaattccccttcacaaggggctttttcatccttaggagacctgagtcctcaagaaaacccttttctggaagtatctgctctttcagaacattttatagagaagaataatacaaaacacacaactgcaagaaatgcctttgaagaaaatgattttatggaaaacactaacatgccagaaggaaccatctctgaaaacacaaactacaatcatcctcctgaggcagattccgctgggactgcattcaacttagggccaactgttaaacaaactgagacaaaatgggaatacaacaacgtgggcactgacctgtcccccgagcccaaaagcttcaattacccattgctctcgtccccaggtgatcagtttgaaattcagctaacccagcagctacagtcccttatccccaacaacaatgtgagaaggctcattgctcatgttatccggaccttgaagatggactgctctggggcccatgtgcaagtgacctgtgccaagctcatctccaggacaggccacctgatgaagcttctcagtgggcagcaggaagtaaaggcatccaagatagaatgggatacggaccaatggaagattgagaactacattaatgagagcacagaagcccagagtgaacagaaagagaagtcgcttgagctcaaaaaagaagttccaggatatggctatactgacaaactcatcttggcattaattgttactggaatactaacgattttgattatacttttctgcctcattgtgatatgttgtcaccgaaggtcattacaagaagatgaagaaggattctcaagggacagcgaagccccaacggaggaggaggagagtgaagccctgccataggaggagaacacagcccacctcaggcctcctgcaaaaatacatagaataaacaac

SEQ ID NO: 148064 - DNA, 3860 bp, Homo sapiens
  Payload ID: 9301
  Gene Symbol: LRRC37A
  Gene Name: leucine rich repeat containing 37A
  ENST ID: ENST00000496930
  CDS Start-End: 1575-3791
gaaaactataatgcctttcaaatatggcttattgcttggatctcaatatctcccacgtatcttgggtggaatattttgccgaagatctttctgtcaatcatttacaatcatgtgctgcaaaatgaagtttgggtcaacagtagaccacatatatgatggtggttctgtaagcgtataatggagctatccctatataggtataccatttttatcttttttttttttttttttttttttttgagatggagtctcgctctgttgtccaggctggagtgcagtggtatgatcccagctcattgcaacctccacctcccaggttcaagtgattctcctacctcagcctcctgagtagctgggattatagacacgcgtcaccacactcagctaatttttgtatttttagtagagatggggtttcatcatgttggccaggctggtcttgaactcctgagctcaagtgatccacccaccttggcgtcccaaagtgctgggattacaggcatgagccactgtgcccaggccccatttttatcttttacacagtattttaactatatattttccatgtttacatacacaaatacctgccattctgtgacagttgcctttagtattcagtacagtaacatacagtacaggtttgtagcctaggagtcctaagccataccgtgtaccctaggtatggtggctacaccacctaggtttgtgtaagtatacgctatgatattagcacaatggtgaaatcacctagtgacacatttctcaagctcctcacgtggcaagcaatgcatgactgcatatgaaagctcttaaatagagattgtttctaaattaatctcaaaacagtcattatttactatttatggaattttttttaaaaaaaggagcaaaagtatcatttcagtgggaacttaacttggggctacagtgttttatttaacttttaccccaaagttgcaaagtgttttgaaatttttccctgtaaaataattattttaattcaatttaaataaaacccaccaaggagacttcaagctttaagaagtctagcttcctgtgaaatgtgagaggaagtcagcactcatttcagaaatctgattataacgatagctccatccctaaatgaggtgaatcttggactctcttccattttattttattttatttttttgagatggagtttctctcttgttgcccaggctgaagtgcaatgttgcgatctcggctcactgcaacctctgcctcccaggttcaagtgattctcctgctttggcctcctgagtagctgggattgcagaaatttccaaggaaactatatttcttacattgatggaaatgtatggaaagcatacagttggactgagaaactaattctcagagaaaataacttgactgaattacacaaggattcatttgaaggcctgctatccctccagtatttagatttatcctgcaataaaatacagtctattgaaagacatacatttgaaccactaccatttttgaagtttataaatcttagttgcaatgtaattacagaactcagctttggaacatttcaggcctggcacggaatgcagtttttacataagttaattctcaatcacaatcctctgacaactgttgaagatccgtatctctttaaattgccagcattaaaatatctagacatgggaacaacgctagtcccacttacaacacttaagaacattctcatgatgactgttgaactggaaaaactgatcttacctagccatatggcctgctgcctctgccaatttaaaaacagcattgaggctgtctgcaagacagtcaagctgcattgcaacagtgcatgtctgacaaacaccacacattgtcctgaagaagcatcggtagggaatccagaaggagcgttcatgaaggtgttacaagcccggaagaactacacaagcactgagctgattgttgagccagaggagccctcagacagcagtggcatcaacttgtcaggctttgggagtgagcagctagacaccaatgacgagagtgattttatcagtacactaagttacatcttgccttatttctcagcggtaaacctagatgtgaaatcactgttactaccgttcattaaactgccaaccacaggaaacagcctggcaaagattcaaactgtaggccaaaaccggcagagagtgaagagagtcctcatgggcccaaggagcatccagaaaaggcacttcaaagaggtaggaaggcagagcatcaggagggaacagggtgcccaggcatctgtggagaacgctgccgaagaaaaaaggctcacgagtccagccccaagggaggtggaacagccccacacacagcaggggcctgagaagttagcgggaaacgccgtctacaccaagccttcgttcacccaagagcataaggcagcagtctctgtgctgaaacccttctccaagggcacgccttctacctccagccctgcaaaagccctaccacaggtgagagacagatcgaaagacttaacccacgctatttccattttagaaagtgcaaaggctagagttacaaatacgaagacgtctaaaccaatcgtacatgccagaaaaaaataccgctttcacaaaactcgctcccacgtgacccacagaacaaccaaagtcaaaaagagtccaaaggtcagaaagaaaagttatctgagtagactgatgctcgcaaacaggcttccattctctgcagcgaagagcctcataaattccccttcacaaggggctttttcatccttaggagacctgagtcctcaagaaaacccttttctggaagtatctgctctttcagaacattttatagagaagaataatacaaaacacacaactgcaagaaatgcctttgaagaaaatgattttatggaaaacactaacatgccagaaggaaccatctctgaaaacacaaactacaatcatcctcctgaggcagattccgctgggactgcattcaacttagggccaactgttaaacaaactgagacaaaatgggaatacaacaacgtgggcactgacctgtcccccgagcccaaaagcttcaattacccattgctctcgtccccaggtgatcagtttgaaattcagctaacccagcagctacagtcccttatccccaacaacaatgtgagaaggctcattgctcatgttatccggaccttgaagatggactgctctggggcccatgtgcaagtgacctgtgccaagctcatctccaggacaggccacctgatgaagcttctcagtgggcagcaggaagtaaaggcatccaagatagaatgggatacggaccaatggaagattgagaactacattaatgagagcacagaagcccagagtgaacagaaagagaagtcgcttgagctcaaaaaagaagttccaggatatggctatactgacaaactcatcttggcattaattgttactggaatactaacgattttgattatacttttctgcctcattgtgatatgttgtcaccgaaggtcattacaagaagatgaagaaggattctcaaggggcattttcagatttctgccatggaggggatgctcttcgcgaagggagagtcaggatggactttcctcatttggacagccgctctggtttaaagatctgtacaaacctctcagtgccacaagaataaataatcatgcatggaagctgcacaagaagtcatctaatgaggacaagatcctcaacagggaccctggggacagcgaagccccaacggaggaggaggagagtgaagccctgccataggaggagaacacagcccacctcaggcctcctgcaaaaatacatagaataaacaacaacagttactaaatg

SEQ ID NO: 148065 - DNA, 5183 bp, Homo sapiens
  Payload ID: 9301
  Gene Symbol: LRRC37A
  Gene Name: leucine rich repeat containing 37A
  ENST ID: ENST00000611823
  CDS Start-End: 4-5106
agaatgacttccgctcagtgcccggcactagcgtgtgtcatgtccccgctgcgtttctggggcccatggcccctccttatgtggcaactattgtggctactagtcaaggaggctcagcctctggagtgggtcaaggacccgctccagctgacctctaaccccctggggccgcctgagccctggtcttcccactcctcccatttcccacgggaatctccccatgcgcctactctcccagcagacccgtgggactttgatcacctggggccctctgcttcctcagagatgccagccccaccccaggaatcgactgaaaatttggttccattcctggacacctgggattcagctggagagctgcccctggagccagagcagttcttggcttcacagcaggatttaaaggacaagctgagtccacaggaaaggctccctgtttcgcccaagaagctgaagaaagatccagctcagcgttggagccttgctgagattattggaattatacgccaattatccacacctcagagtcagaaacagactttgcagaatgaatattccagtacagatacaccgtatcccggtagcctgcctccagaactccgggtgaagtcagatgagcctccagggccctctgagcaagttggaccttctcaattccatctagagcccgaaactcaaaatccagagacccttgaagacatccagtcctcttcactccagcaagaagccccagcacagcttccacagctccttgaggaagaaccttcttcaatgcagcaggaggccccagctctgcctccagagtcctctatggagagtctaactctaccgaatcatgaggtgtcagttcaacctccaggtgaggatcaagcttattatcacttgcccaacattacagttaaacctgcagatgtggaggttaccataacttcagagcctaccaatgagacagaatcttcccaagcccagcaggagaccccaattcagtttccagaggaggtggaaccttctgcaacccaacaggaggccccaattgagcctccagttcctcctatggagcatgaactttccatcagtgagcagcagcagccagttcagccttctgagtctcctagggaggtcgaatcttctccgacccagcaggagaccccaggtcagcctccagaacatcatgaagtcacagtttcacctccaggtcaccatcaaactcatcatttagcttcacccagtgtctctgtgaagcctccagacgtgcagctcaccatagcagcagagcctagtgcagaggtgggaacttctctagtccaccaggaggctacaactcggctctcagggtcaggtaatgatgtagaacctcccgccatccagcacgggggcccacctctgcttccagagtcatcagaagaagctggacctttagcagttcaacaggagacttcatttcaatctccggaacctattaataatgagaacccctctccaacccagcaggaggctgcagctgagcatccacagaccgctgaggagggtgagtcttccctaacccatcaggaggccccagctcagactccagagttccctaatgtagttgtagctcaacctccagagcattcacacctgactcaagccacagttcaacctttggatctggggtttaccatcactccagaatccaagacagaggttgaactttctccaaccatgaaggagaccccaactcagcctcctaagaaagttgtaccccaacttcgagtatatcaaggggtaacaaatccaacaccaggtcaggatcaagctcagcatccagtgtcacccagcgttacagttcaacttttggacctgggacttaccatcactccagaacctactacggaggttggacattctacacccccgaagaggactatagtttctccaaagcatcctgaggtgacacttccacatccagaccaggttcagactcagcattcacacctgactcgagccacagttcaacctttggacctggggtttaccatcactccaaaatccatgacagaggttgaaccttctacagccctgatgactacagctcctcctccaggacaccctgaggtgacacttccaccttcagacaagggtcaggctcagcattcacacctgactcaagccaccgttcaacctctggacctggagcttaccataactacaaaacctactacagaggttaaaccatctccaaccacggaggagacctcaactcagcctccagacctgggacttgccatcattccagaacccactacagagactggacattctacagccctggagaagactacagctcctcgtccagaccgggttcagactctgcatcgaagcctgactgaagtcacaggtccacctactgaactagaacctgctcaggattcactggtgcagtctgaaagttacacccaaaataaggctttaactgcaccagaggaacacaaggcctccacaagcaccaacatatgtgagctctgtacctgcggagatgagatgttgtcatgtattgatctcaacccagagcagaggctccgccaagtgcctgtgccagagcccaacacccacaatggcaccttcaccatcttaaatttccaaggaaactatatttcttacattgatggaaatgtatggaaagcatacagttggaccgagaaactaattctcagagaaaataacttgactgaattacacaaggattcatttgaaggcctgctatccctccagtatttagatttatcctgcaataaaatacagtctattgaaagacatacatttgaaccactaccatttttgaagtttataaatcttagttgcaatgtaattacagaactcagctttggaacatttcaggcctggcacggaatgcagtttttacataagttaattctcaatcacaatcctctgacaactgttgaagatccgtatctctttaaattgccagcattaaaatatctagacatgggaacaacgctagtcccacttacaacacttaagaacattctcatgatgactgttgaactggaaaaactgatcttacctagccatatggcctgctgcctctgccaatttaaaaacagcattgaggctgtctgcaagacagtcaagctgcattgcaacagtgcatgtctgacaaacaccacacattgtcctgaagaagcatcggtagggaatccagaaggagcgttcatgaaggtgttacaagcccggaagaactacacaagcactgagctgattgttgagccagaggagccctcagacagcagtggcatcaacttgtcaggctttgggagtgagcagctagacaccaatgacgagagtgattttatcagtacactacgttacatcttgccttatttctcagcggtaaacctagatgtgaaatcactgttactaccgttaattaaactgccaaccacaggaaacagcctggcaaagattcaaactgtaggccaaaaccggcagagagtgaagagagtcctcatgggcccaaggagcatccagaaaagacacttcaaagaggtaggaaggcagagcatcaggagggaacagggtgcccaggcatctgtggagaacgctgccgaagaaaaaaggctcgggagtccagccccaagggaggtggaacagccccacacacagcaggggcctgagaagttagcgggaaacgccgtctacaccaagccttccttcacccaagagcataaggcagcagtctctgtgctgaaacccttctccaagggcgcgccttctacctccagccctgcaaaagccctaccacaggtgagagacagatggaaagacttaacccacgctatttccactttagaaagtgcaaaggctagagttacaaatacgaagacgtctaaaccaatcgtacatgccagaaaaaaataccgctttcacaaaactcgctcccacgtgacccacagaacacccaaagtcaaaaagagtccaaaggtcagaaagaaaagttatctgagtagactgatgctcgcaaacaggcttccattctctgcagcgaagagcctcataaattccccttcacaaggggctttttcatccttaggagacctgagtcctcaagaaaacccttttctggaagtatctgctccttcagaacattttatagaaaagaataatacaaaacacacaactgcaagaaatgcctttgaagaaaatgattttatggaaaacactaacatgccagaaggaaccatctctgaaaacacaaactacaatcatcctcctgaggcagattccgctgggactgcattcaacttagggccaactgttaaacaaactgagacaaaatgggaatacaacaacgtgggcactgacctgtcccccgagcccaaaagcttcaattacccattgctctcgtccccaggtgatcagtttgaaattcagctaacccagcagctacagtcccttatccccaacaacaatgtgagaaggctcattgctcatgttatccggaccttgaagatggactgctctggggcccatgtgcaagtgacctgtgccaagctcatctccaggacaggccacctgatgaagcttctcagtgggcagcaggaagtaaaggcatccaagatagaatgggatacggaccaatggaagattgagaactacattaatgagagcacagaagcccagagtgaacagaaagagaagtcgcttgagctcaaaaaagaagttccaggatatggctatactgacaaactcatcttggcattaattgttactggaatactaacgattttgattatacttttctgcctcattgtgatatgttgtcaccgaaggtcattacaagaagatgaagaaggattctcaaggggcattttcagatttctgccacggaggggatgctcttcgcgaagggagagtcaggatggactttcctcatttggacagccgctctggtttaaagatatgtacaaacctctcagtgccacaagaataaataatcatgcgtggaagctgcacaagaagtcatctaatgaggacaagatcctcaacagggaccctggggacagcgaagccccaacggaggaggaggagagtgaagccctgccataggaggagaacacagcccacctcaggcctcctgcaaaaatacatagaataaacaacaacagttactaaataaatgaaaa

SEQ ID NO: 148066 - DNA, 3854 bp, Homo sapiens
  Payload ID: 9301
  Gene Symbol: LRRC37A
  Gene Name: leucine rich repeat containing 37A
  ENST ID: ENST00000629032
  CDS Start-End: 1570-3786
ttgaaaactataatgcctttcaaatatggcttattgcttggatctcaatatctcccacgtatcttgggtggaatattttgctgaagatctttctgtcaatcatttacaatcatgtgctgcaaaatgaagtttgggtcaacagtagaccacatatatgatggtggttccgtaagcgtataatggagctatccctatataggtataccatttttatctttttttttttttttttttgagatggagtctcactctgttgtccaggctggagtgcagtggtatgatcccagctcattgcaacctccacctcccaggttcaagtgattctcctacctcagcctcctgagtagctgggattatagacacgcgtcaccacactcagctaatttttgtatttttagtagagatggggtttcatcatgttggccaggctggtcttgaactcctgagctcaagtgatccacccaccttggcgtcccaaagtgctgggattacaggcatgagccactgtgcccaggccccatttttatcttttacacagtattttaactatatattttccatgtttacatacacaaatacctgccattctgtgacagttgcctttagtattcagtacagtaacatacagtacaggtttgtagcctaggagtcctaagccataccgtgtaccctaggtatggtggctacaccacctaggtttgtgtaagtatacgctatgatgttagcacaatggtgaaatcacctagtgacccatttctcaagctcctcacgtgggaagcaatgcatgactgcatatgaaagctcttaaatagggattgtttctaaattaatctcaaaacagtcattatttactatttatggaattttttttaaaaaaaggagcaaaagtatcatttcagtgggaacttaacttggggctacagtgttttatttaacttttaccccaaagttgcaaagtgttttgaaatttttccctgtaaaataattattttaattcaatttaaataaaacccaccaaggagacttcaagctttaagaagtctagcttcctgtgaaatgtgagaggaagtcagcactcatttcagaaatctgattataacaatagctccatccctaaatgaggtgaatcttggaatctcttccattttattttattttatttttttgagatggagtttctctcttgttgcccaggctgaagtgcaatgttgtgatctcggctcactgcaacctctgcctcccaggttcaagggattctcctgctttggcctcctgagtagctgggattgcagaaatttccaaggaaactatatttcttacattgatggaaatgtatggaaagcatacagttggaccgagaaactaattctcagagaaaataacttgactgaattacacaaggattcatttgaaggcctgctatccctccagtatttagatttatcctgcaataaaatacagtctattgaaagacatacatttgaaccactaccatttttgaagtttataaatcttagttgcaatgtaattacagaactcagctttggaacatttcaggcctggcacggaatgcagtttttacataagttaattctcaatcacaatcctctgacaactgttgaagatccgtatctctttaaattgccagcattaaaatatctagacatgggaacaacgctagtcccacttacaacacttaagaacattctcatgatgactgttgaactggaaaaactgatcttacctagccatatggcctgctgcctctgccaatttaaaaacagcattgaggctgtctgcaagacagtcaagctgcattgcaacagtgcatgtctgacaaacaccacacattgtcctgaagaagcatcggtagggaatccagaaggagcgttcatgaaggtgttacaagcccggaagaactacacaagcactgagctgattgttgagccagaggagccctcagacagcagtggcatcaacttgtcaggctttgggagtgagcagctagacaccaatgacgagagtgattttatcagtacactacgttacatcttgccttatttctcagcggtaaacctagatgtgaaatcactgttactaccgttaattaaactgccaaccacaggaaacagcctggcaaagattcaaactgtaggccaaaaccggcagagagtgaagagagtcctcatgggcccaaggagcatccagaaaagacacttcaaagaggtaggaaggcagagcatcaggagggaacagggtgcccaggcatctgtggagaacgctgccgaagaaaaaaggctcgggagtccagccccaagggaggtggaacagccccacacacagcaggggcctgagaagttagcgggaaacgccgtctacaccaagccttccttcacccaagagcataaggcagcagtctctgtgctgaaacccttctccaagggcgcgccttctacctccagccctgcaaaagccctaccacaggtgagagacagatggaaagacttaacccacgctatttccactttagaaagtgcaaaggctagagttacaaatacgaagacgtctaaaccaatcgtacatgccagaaaaaaataccgctttcacaaaactcgctcccacgtgacccacagaacacccaaagtcaaaaagagtccaaaggtcagaaagaaaagttatctgagtagactgatgctcgcaaacaggcttccattctctgcagcgaagagcctcataaattccccttcacaaggggctttttcatccttaggagacctgagtcctcaagaaaacccttttctggaagtatctgctccttcagaacattttatagaaaagaataatacaaaacacacaactgcaagaaatgcctttgaagaaaatgattttatggaaaacactaacatgccagaaggaaccatctctgaaaacacaaactacaatcatcctcctgaggcagattccgctgggactgcattcaacttagggccaactgttaaacaaactgagacaaaatgggaatacaacaacgtgggcactgacctgtcccccgagcccaaaagcttcaattacccattgctctcgtccccaggtgatcagtttgaaattcagctaacccagcagctacagtcccttatccccaacaacaatgtgagaaggctcattgctcatgttatccggaccttgaagatggactgctctggggcccatgtgcaagtgacctgtgccaagctcatctccaggacaggccacctgatgaagcttctcagtgggcagcaggaagtaaaggcatccaagatagaatgggatacggaccaatggaagattgagaactacattaatgagagcacagaagcccagagtgaacagaaagagaagtcgcttgagctcaaaaaagaagttccaggatatggctatactgacaaactcatcttggcattaattgttactggaatactaacgattttgattatacttttctgcctcattgtgatatgttgtcaccgaaggtcattacaagaagatgaagaaggattctcaaggggcattttcagatttctgccacggaggggatgctcttcgcgaagggagagtcaggatggactttcctcatttggacagccgctctggtttaaagatatgtacaaacctctcagtgccacaagaataaataatcatgcgtggaagctgcacaagaagtcatctaatgaggacaagatcctcaacagggaccctggggacagcgaagccccaacggaggaggaggagagtgaagccctgccataggaggagaacacagcccacctcaggcctcctgcaaaaatacatagaataaacaacaacagttactaaat

SEQ ID NO: 148067 - DNA, 5010 bp, Homo sapiens
  Payload ID: 9301
  Gene Symbol: LRRC37A
  Gene Name: leucine rich repeat containing 37A
  ENST ID: ENST00000625784
  CDS Start-End: 36-4943
cttacaaggggcacgagcgtctcggagctgccagaatgacttccgctcagtgcccggcactagcgtgtgtcatgtccccgctgcgtttctggggcccatggcccctccttatgtggcaactattgtggctactagtcaaggaggctcagcctctggagtgggtcaaggacccgctccagctgacctctaaccccctggggccgcctgagccctggtcttcccactcctcccatttcccacgggaatctccccatgcgcctactctcccagcagacccgtgggactttgatcacctggggccctctgcttcctcagagatgccagccccaccccaggaatcgactgaaaatttggttccattcctggacacctgggattcagctggagagctgcccctggagccagagcagttcttggcttcacagcaggatttaaaggacaagctgagtccacaggaaaggctccctgtttcgcccaagaagctgaagaaagatccagctcagcgttggagccttgctgagattattggaattatacgccaattatccacacctcagagtcagaaacagactttgcagaatgaatattccagtacagatacaccgtatcccggtagcctgcctccagaactccgggtgaagtcagatgagcctccagggccctctgagcaagttggaccttctcaattccatctagagcccgaaactcaaaatccagagacccttgaagacatccagtcctcttcactccagcaagaagccccagcacagcttccacagctccttgaggaagaaccttcttcaatgcagcaggaggccccagctctgcctccagagtcctctatggagagtctaactctaccgaatcatgaggtgtcagttcaacctccaggtgaggatcaagcttattatcacttgcccaacattacagttaaacctgcagatgtggaggttaccataacttcagagcctaccaatgagacagaatcttcccaagcccagcaggagaccccaattcagtttccagaggaggtggaaccttctgcaacccaacaggaggccccaattgagcctccagttcctcctatggagcatgaactttccatcagtgagcagcagcagccagttcagccttctgagtctcctagggaggtcgaatcttctccgacccagcaggagaccccaggtcagcctccagaacatcatgaagtcacagtttcacctccaggtcaccatcaaactcatcatttagcttcacccagtgtctctgtgaagcctccagacgtgcagctcaccatagcagcagagcctagtgcagaggtgggaacttctctagtccaccaggaggctacaactcggctctcagggtcaggtaatgatgtagaacctcccgccatccagcacgggggcccacctctgcttccagagtcatcagaagaagctggacctttagcagttcaacaggagacttcatttcaatctccggaacctattaataatgagaacccctctccaacccagcaggaggctgcagctgagcatccacagaccgctgaggagggtgagtcttccctaacccatcaggaggccccagctcagactccagagttccctaatgtagttgtagctcaacctccagagcattcacacctgactcaagccacagttcaacctttggatctggggtttaccatcactccagaatccaagacagaggttgaactttctccaaccatgaaggagaccccaactcagcctcctaagaaagttgtaccccaacttcgagtatatcaaggggtaacaaatccaacaccaggtcaggatcaagctcagcatccagtgtcacccagcgttacagttcaacttttggacctgggacttaccatcactccagaacctactacggaggttggacattctacacccccgaagaggactatagtttctccaaagcatcctgaggtgacacttccacatccagaccaggttcagactcagcattcacacctgactcgagccacagttcaacctttggacctggggtttaccatcactccaaaatccatgacagaggttgaaccttctacagccctgatgactacagctcctcctccaggacaccctgaggtgacacttccaccttcagacaagggtcaggctcagcattcacacctgactcaagccaccgttcaacctctggacctggagcttaccataactacaaaacctactacagaggttaaaccatctccaaccacggaggagacctcaactcagcctccagacctgggacttgccatcattccagaacccactacagagactggacattctacagccctggagaagactacagctcctcgtccagaccgggttcagactctgcatcgaagcctgactgaagtcacaggtccacctactgaactagaacctgctcaggattcactggtgcagtctgaaagttacacccaaaataaggctttaactgcaccagaggaacacaaggcctccacaagcaccaacatatgtgagctctgtacctgcggagatgagatgttgtcatgtattgatctcaacccagagcagaggctccgccaagtgcctgtgccagagcccaacacccacaatggcaccttcaccatcttaaatttccaaggaaactatatttcttacattgatggaaatgtatggaaagcatacagttggaccgagaaactaattctcagagaaaataacttgactgaattacacaaggattcatttgaaggcctgctatccctccagtatttagatttatcctgcaataaaatacagtctattgaaagacatacatttgaaccactaccatttttgaagtttataaatcttagttgcaatgtaattacagaactcagctttggaacatttcaggcctggcacggaatgcagtttttacataagttaattctcaatcacaatcctctgacaactgttgaagatccgtatctctttaaattgccagcattaaaatatctagacatgggaacaacgctagtcccacttacaacacttaagaacattctcatgatgactgttgaactggaaaaactgatcttacctagccatatggcctgctgcctctgccaatttaaaaacagcattgaggctgtctgcaagacagtcaagctgcattgcaacagtgcatgtctgacaaacaccacacattgtcctgaagaagcatcggtagggaatccagaaggagcgttcatgaaggtgttacaagcccggaagaactacacaagcactgagctgattgttgagccagaggagccctcagacagcagtggcatcaacttgtcaggctttgggagtgagcagctagacaccaatgacgagagtgattttatcagtacactacgttacatcttgccttatttctcagcggtaaacctagatgtgaaatcactgttactaccgttaattaaactgccaaccacaggaaacagcctggcaaagattcaaactgtaggccaaaaccggcagagagtgaagagagtcctcatgggcccaaggagcatccagaaaagacacttcaaagaggtaggaaggcagagcatcaggagggaacagggtgcccaggcatctgtggagaacgctgccgaagaaaaaaggctcgggagtccagccccaagggaggtggaacagccccacacacagcaggggcctgagaagttagcgggaaacgccgtctacaccaagccttccttcacccaagagcataaggcagcagtctctgtgctgaaacccttctccaagggcgcgccttctacctccagccctgcaaaagccctaccacaggtgagagacagatggaaagacttaacccacgctatttccactttagaaagtgcaaaggctagagttacaaatacgaagacgtctaaaccaatcgtacatgccagaaaaaaataccgctttcacaaaactcgctcccacgtgacccacagaacacccaaagtcaaaaagagtccaaaggtcagaaagaaaagttatctgagtagactgatgctcgcaaacaggcttccattctctgcagcgaagagcctcataaattccccttcacaaggggctttttcatccttaggagacctgagtcctcaagaaaacccttttctggaagtatctgctccttcagaacattttatagaaaagaataatacaaaacacacaactgcaagaaatgcctttgaagaaaatgattttatggaaaacactaacatgccagaaggaaccatctctgaaaacacaaactacaatcatcctcctgaggcagattccgctgggactgcattcaacttagggccaactgttaaacaaactgagacaaaatgggaatacaacaacgtgggcactgacctgtcccccgagcccaaaagcttcaattacccattgctctcgtccccaggtgatcagtttgaaattcagctaacccagcagctacagtcccttatccccaacaacaatgtgagaaggctcattgctcatgttatccggaccttgaagatggactgctctggggcccatgtgcaagtgacctgtgccaagctcatctccaggacaggccacctgatgaagcttctcagtgggcagcaggaagtaaaggcatccaagatagaatgggatacggaccaatggaagattgagaactacattaatgagagcacagaagcccagagtgaacagaaagagaagtcgcttgagctcaaaaaagaagttccaggatatggctatactgacaaactcatcttggcattaattgttactggaatactaacgattttgattatacttttctgcctcattgtgatatgttgtcaccgaaggtcattacaagaagatgaagaaggattctcaagggacagcgaagccccaacggaggaggaggagagtgaagccctgccataggaggagaacacagcccacctcaggcctcctgcaaaaatacatagaataaacaacaacagttactaaa

SEQ ID NO: 148068 - DNA, 3162 bp, Homo sapiens
  Payload ID: 9302
  Gene Symbol: LRRC37B
  Gene Name: leucine rich repeat containing 37B
  ENST ID: ENST00000327564
  CDS Start-End: 62-2986
aacagatctggacccaagcctaataaaggtgacataaataaaggtgtcataaagacagggcatggcacacgcttataaggggcatgagcatctcagggctgccagaatggcttttgctgagtgcatagcaccagcgtgtgtcatgtcttggctgcgtttctggggcccatggcccctccttacgtggcaactattgtctttactagtcaaggaggctcagcctctggtgtgggtcaaggacccgctccagctgacctctaaccccctggggccacctgagccctggtcttcccgctcctcccatctcccatgggaatctccccatgcacctgctcccccagcagccccgggggactttgattacctggggccctctgcttcttcgcagatgtcagccctgcctcaggaaccaactgaaaatttggctccattcctgaaggaattggattcagctggagagctgcccctggggccagagccgttcttggctgcacatcaggacttaaatgacaagcggactccagaagaaaggctcccagaggtggttccgcttctcaaccgggatcagaaccaggccctagttcagcttcctcgcctcaagtgggttcaaactacagatctagatcgggctgcaggtcatcaggcagatgaaatacttgttccactagacagtaaggtttcaagaccaaccaaatttgttgtttcgcccaagaacctgaagaaagatctagctgaacgttggagccttcctgagattgttgggattccacaccaattatccaaacctcagcgtcagaaacagactttgccagatgattatttgagtatggacacactgtatcccggcagcctacctccagaactccgggtgaacgcagatgagcctccagggcctcctgagcaagttggactttctcaattccatctagagcccaaaagtcaaaatccagagacccttgaagacatccagtcctcttcactccaggaagaagccccagcgcagcttctacagctccctcaggaggtagaaccttcaacccagcaggaggccccagctctgcctccagagtcctctatggagagtctagctcaaactccactgaatcatgaagtgacagttcaacctccaggtgaggatcaagctcattataatttgcccaagtttacagtcaaacctgcagatgtggaggttaccatgacttcagagcctaaaaatgagacagaatctacccaagcccagcaggaggccccaattcagcctcccgaggaggcggaaccttcttctacagccctgaggactacagatcctcctccagaacaccctgaggtgacacttccaccttcagacaagggtcaggctcagcattcacacctgactgaagccacagttcaacctctggacctggagcttagcataactacagagcctactacagaggttaaaccgtctccaaccacggaggaaacctcagctcagcctccagacccggggcttgccataactccagaacccactacagagattggacattccacagccctggagaagactagagctcctcatccagaccaggttcagactctgcatcgaagcctgactgaagtcacaggtccacctacaaagttagaatcttcgcaggattcattggtgcagtctgaaactgcaccagaggaacagaaggcctccacaagcaccaacatatgtgagctctgcacctgcggagatgagactctgtcatgtgttggtctcagcccaaagcagaggctccgccaagtgcctgtgccagagcccgacacctacaatggcatcttcaccaccttaaatttccaaggaaactatatttcataccttgatggaaatgtatggaaagcatacagttggaccgagaaactaattctcagtgaaaattatttgactgaattacctaaggattcatttgaaggcctgctatacctccagtatttagatttatcctgcaataaaatacgatatattgaaagacaaacatttgaatcactaccatttttgcagtatataaatctgggctgcaatttaattacaaaactgagccttggaacatttcaggcctggcacggaatgcagtttttacacaacttaattctcaatcgcaatcctctgactactgtcgaagatccatatctctttgaactgccggcattaaaatatctagacatgggaacaacacacatcacacttacaacacttaagaacattctcacgatgactgttgaactggaaaaactgatcttacctagccatatggcctgctgcctctgccaatttaaaaatagcattgaggctgtctgcaagacagtcaagctgcattgcaacactgcatgtctgactaacagcatacattgtcctgaagaagcatctgtagggaatccagaaggagcgttcatgaagatgttacaagcccggaagcagcacatgagcactcagctgactattgagtcggaggcgccctcagacagcagtggcatcaacttgtcaggctttgggggtgatcagcttgaaattcagctaaccgagcagctacggtccctcatccccaacgaggatgtgagaaagttcatgtctcatgttatccggaccttgaaaatggaatgttcagaaacacatgtgcaagggagctgtgccaagctcatgttgcgaacaggcctcctgatgaagcttctcagcgagcagcaggaagcaaaggcattgaatgtagaatgggatacggaccaacaaaaaacaaattatattaatgagaacatggaacagaatgaacagaaagagcagaagtcaagtgagctcatgaaagaagttccaggagatgactataagaacaaactcatcttcgcaatatctgtgactgtaatactaataattttgattataattttttgtcttatagaggtgaattcacataaaagggcatcagaaaaatacaaagacaacccatcaatatcaggagcctgagcatgagttaaagcatgtggatggcctggagctatgtttttaaaattgttattaaatattggttttttacttaaatcaatgaaaactttctttactttgtggttgtgttcctcaaaatgagaatttttaacaataataaaaataaagcttgttagatcatttttaatggtaataaa

SEQ ID NO: 148069 - DNA, 3025 bp, Homo sapiens
  Payload ID: 9302
  Gene Symbol: LRRC37B
  Gene Name: leucine rich repeat containing 37B
  Uniprot ID: Q96QE4
  ENST ID: ENST00000341671
  CDS Start-End: 6-2849
gtgtcatgtcttggctgcgtttctggggcccatggcccctccttacgtggcaactattgtctttactagtcaaggaggctcagcctctggtgtgggtcaaggacccgctccagctgacctctaaccccctggggccacctgagccctggtcttcccgctcctcccatctcccatgggaatctccccatgcacctgctcccccagcagccccgggggactttgattacctggggccctctgcttcttcgcagatgtcagccctgcctcaggaaccaactgaaaatttggctccattcctgaaggaattggattcagctggagagctgcccctggggccagagccgttcttggctgcacatcaggacttaaatgacaagcggactccagaagaaaggctcccagaggtggttccgcttctcaaccgggatcagaaccaggccctagttcagcttcctcgcctcaagtgggttcaaactacagatctagatcgggctgcaggtcatcaggcagatgaaatacttgttccactagacagtaaggtttcaagaccaaccaaatttgttgtttcgcccaagaacctgaagaaagatctagctgaacgttggagccttcctgagattgttgggattccacaccaattatccaaacctcagcgtcagaaacagactttgccagatgattatttgagtatggacacactgtatcccggcagcctacctccagaactccgggtgaacgcagatgagcctccagggcctcctgagcaagttggactttctcaattccatctagagcccaaaagtcaaaatccagagacccttgaagacatccagtcctcttcactccaggaagaagccccagcgcagcttctacagctccctcaggaggtagaaccttcaacccagcaggaggccccagctctgcctccagagtcctctatggagagtctagctcaaactccactgaatcatgaagtgacagttcaacctccaggtgaggatcaagctcattataatttgcccaagtttacagtcaaacctgcagatgtggaggttaccatgacttcagagcctaaaaatgagacagaatctacccaagcccagcaggaggccccaattcagcctcccgaggaggcggaaccttcttctacagccctgaggactacagatcctcctccagaacaccctgaggtgacacttccaccttcagacaagggtcaggctcagcattcacacctgactgaagccacagttcaacctctggacctggagcttagcataactacagagcctactacagaggttaaaccgtctccaaccacggaggaaacctcagctcagcctccagacccggggcttgccataactccagaacccactacagagattggacattccacagccctggagaagactagagctcctcatccagaccaggttcagactctgcatcgaagcctgactgaagtcacaggtccacctacaaagttagaatcttcgcaggattcattggtgcagtctgaaactgcaccagaggaacagaaggcctccacaagcaccaacatatgtgagctctgcacctgcggagatgagactctgtcatgtgttggtctcagcccaaagcagaggctccgccaagtgcctgtgccagagcccgacacctacaatggcatcttcaccaccttaaatttccaaggaaactatatttcataccttgatggaaatgtatggaaagcatacagttggaccgagaaactaattctcagtgaaaattatttgactgaattacctaaggattcatttgaaggcctgctatacctccagtatttagatttatcctgcaataaaatacgatatattgaaagacaaacatttgaatcactaccatttttgcagtatataaatctgggctgcaatttaattacaaaactgagccttggaacatttcaggcctggcacggaatgcagtttttacacaacttaattctcaatcgcaatcctctgactactgtcgaagatccatatctctttgaactgccggcattaaaatatctagacatgggaacaacacacatcacacttacaacacttaagaacattctcacgatgactgttgaactggaaaaactgatcttacctagccatatggcctgctgcctctgccaatttaaaaatagcattgaggctgtctgcaagacagtcaagctgcattgcaacactgcatgtctgactaacagcatacattgtcctgaagaagcatctgtagggaatccagaaggagcgttcatgaagatgttacaagcccggaagcagcacatgagcactcagctgactattgagtcggaggcgccctcagacagcagtggcatcaacttgtcaggctttgggggtgatcagcttgaaattcagctaaccgagcagctacggtccctcatccccaacgaggatgtgagaaagttcatgtctcatgttatccggaccttgaaaatggaatgttcagaaacacatgtgcaagggagctgtgccaagctcatgttgcgaacaggcctcctgatgaagcttctcagcgagcagcaggaagcaaaggcattgaatgtagaatgggatacggaccaacaaaaaacaaattatattaatgagaacatggaacagaatgaacagaaagagcagaagtcaagtgagctcatgaaagaagttccaggagatgactataagaacaaactcatcttcgcaatatctgtgactgtaatactaataattttgattataattttttgtcttatagaggtgaattcacataaaagggcatcagaaaaatacaaagacaacccatcaatatcaggagcctgagcatgagttaaagcatgtggatggcctggagctatgtttttaaaattgttattaaatattggttttttacttaaatcaatgaaaactttctttactttgtggttgtgttcctcaaaatgagaatttttaacaataataaaaataaagcttgttagatcatttttaatggtaataaa

SEQ ID NO: 148070 - DNA, 3025 bp, Homo sapiens
  Payload ID: 9302
  Gene Symbol: LRRC37B
  Gene Name: leucine rich repeat containing 37B
  Uniprot ID: Q96QE4
  ENST ID: ENST00000394713
  CDS Start-End: 12-2855
cagcgtgtgtcatgtcttggctgcgtttctggggcccatggcccctccttacgtggcaactattgtctttactagtcaaggaggctcagcctctggtgtgggtcaaggacccgctccagctgacctctaaccccctggggccacctgagccctggtcttcccgctcctcccatctcccatgggaatctccccatgcacctgctcccccagcagccccgggggactttgattacctggggccctctgcttcttcgcagatgtcagccctgcctcaggaaccaactgaaaatttggctccattcctgaaggaattggattcagctggagagctgcccctggggccagagccgttcttggctgcacatcaggacttaaatgacaagcggactccagaagaaaggctcccagaggtggttccgcttctcaaccgggatcagaaccaggccctagttcagcttcctcgcctcaagtgggttcaaactacagatctagatcgggctgcaggtcatcaggcagatgaaatacttgttccactagacagtaaggtttcaagaccaaccaaatttgttgtttcgcccaagaacctgaagaaagatctagctgaacgttggagccttcctgagattgttgggattccacaccaattatccaaacctcagcgtcagaaacagactttgccagatgattatttgagtatggacacactgtatcccggcagcctacctccagaactccgggtgaacgcagatgagcctccagggcctcctgagcaagttggactttctcaattccatctagagcccaaaagtcaaaatccagagacccttgaagacatccagtcctcttcactccaggaagaagccccagcgcagcttctacagctccctcaggaggtagaaccttcaacccagcaggaggccccagctctgcctccagagtcctctatggagagtctagctcaaactccactgaatcatgaagtgacagttcaacctccaggtgaggatcaagctcattataatttgcccaagtttacagtcaaacctgcagatgtggaggttaccatgacttcagagcctaaaaatgagacagaatctacccaagcccagcaggaggccccaattcagcctcccgaggaggcggaaccttcttctacagccctgaggactacagatcctcctccagaacaccctgaggtgacacttccaccttcagacaagggtcaggctcagcattcacacctgactgaagccacagttcaacctctggacctggagcttagcataactacagagcctactacagaggttaaaccgtctccaaccacggaggaaacctcagctcagcctccagacccggggcttgccataactccagaacccactacagagattggacattccacagccctggagaagactagagctcctcatccagaccaggttcagactctgcatcgaagcctgactgaagtcacaggtccacctacaaagttagaatcttcgcaggattcattggtgcagtctgaaactgcaccagaggaacagaaggcctccacaagcaccaacatatgtgagctctgcacctgcggagatgagactctgtcatgtgttggtctcagcccaaagcagaggctccgccaagtgcctgtgccagagcccgacacctacaatggcatcttcaccaccttaaatttccaaggaaactatatttcataccttgatggaaatgtatggaaagcatacagttggaccgagaaactaattctcagtgaaaattatttgactgaattacctaaggattcatttgaaggcctgctatacctccagtatttagatttatcctgcaataaaatacgatatattgaaagacaaacatttgaatcactaccatttttgcagtatataaatctgggctgcaatttaattacaaaactgagccttggaacatttcaggcctggcacggaatgcagtttttacacaacttaattctcaatcgcaatcctctgactactgtcgaagatccatatctctttgaactgccggcattaaaatatctagacatgggaacaacacacatcacacttacaacacttaagaacattctcacgatgactgttgaactggaaaaactgatcttacctagccatatggcctgctgcctctgccaatttaaaaatagcattgaggctgtctgcaagacagtcaagctgcattgcaacactgcatgtctgactaacagcatacattgtcctgaagaagcatctgtagggaatccagaaggagcgttcatgaagatgttacaagcccggaagcagcacatgagcactcagctgactattgagtcggaggcgccctcagacagcagtggcatcaacttgtcaggctttgggggtgatcagcttgaaattcagctaaccgagcagctacggtccctcatccccaacgaggatgtgagaaagttcatgtctcatgttatccggaccttgaaaatggaatgttcagaaacacatgtgcaagggagctgtgccaagctcatgttgcgaacaggcctcctgatgaagcttctcagcgagcagcaggaagcaaaggcattgaatgtagaatgggatacggaccaacaaaaaacaaattatattaatgagaacatggaacagaatgaacagaaagagcagaagtcaagtgagctcatgaaagaagttccaggagatgactataagaacaaactcatcttcgcaatatctgtgactgtaatactaataattttgattataattttttgtcttatagaggtgaattcacataaaagggcatcagaaaaatacaaagacaacccatcaatatcaggagcctgagcatgagttaaagcatgtggatggcctggagctatgtttttaaaattgttattaaatattggttttttacttaaatcaatgaaaactttctttactttgtggttgtgttcctcaaaatgagaatttttaacaataataaaaataaagcttgttagatcatttttaatggt

SEQ ID NO: 148071 - DNA, 3091 bp, Homo sapiens
  Payload ID: 9302
  Gene Symbol: LRRC37B
  Gene Name: leucine rich repeat containing 37B
  ENST ID: ENST00000543378
  CDS Start-End: 336-2933
gatgccgaggagacccaggagtctgaggacaactaggaggatgacatggaggaggacgacgatgactccgattatccggaggagctggaagatgacgacgaggacgccagttactccacggaaagcagcttcagcagcactccagaaagtggtaaaatagctgtggagtgcagacccagtgaagagattgtagatgtcagatgggaagaactacacagtttaattcaagtcagttgctctcccctgaaggaagagtattctcggatttcacctcagaggaggaagaattcaggctgccagaactggactagcacttctgaagatcccaaggccagatgtcagccctgcctcaggaaccaactgaaaatttggctccattcctgaaggaattggattcagctggagagctgcccctggggccagagccgttcttggctgcacatcaggacttaaatgacaagcggactccagaagaaaggctcccagaggtggttccgcttctcaaccgggatcagaaccaggccctagttcagcttcctcgcctcaagtgggttcaaactacagatctagatcgggctgcaggtcatcaggcagatgaaatacttgttccactagacagtaaggtttcaagaccaaccaaatttgttgtttcgcccaagaacctgaagaaagatctagctgaacgttggagccttcctgagattgttgggattccacaccaattatccaaacctcagcgtcagaaacagactttgccagatgattatttgagtatggacacactgtatcccggcagcctacctccagaactccgggtgaacgcagatgagcctccagggcctcctgagcaagttggactttctcaattccatctagagcccaaaagtcaaaatccagagacccttgaagacatccagtcctcttcactccaggaagaagccccagcgcagcttctacagctccctcaggaggtagaaccttcaacccagcaggaggccccagctctgcctccagagtcctctatggagagtctagctcaaactccactgaatcatgaagtgacagttcaacctccaggtgaggatcaagctcattataatttgcccaagtttacagtcaaacctgcagatgtggaggttaccatgacttcagagcctaaaaatgagacagaatctacccaagcccagcaggaggccccaattcagcctcccgaggaggcggaaccttcttctacagccctgaggactacagatcctcctccagaacaccctgaggtgacacttccaccttcagacaagggtcaggctcagcattcacacctgactgaagccacagttcaacctctggacctggagcttagcataactacagagcctactacagaggttaaaccgtctccaaccacggaggaaacctcagctcagcctccagacccggggcttgccataactccagaacccactacagagattggacattccacagccctggagaagactagagctcctcatccagaccaggttcagactctgcatcgaagcctgactgaagtcacaggtccacctacaaagttagaatcttcgcaggattcattggtgcagtctgaaactgcaccagaggaacagaaggcctccacaagcaccaacatatgtgagctctgcacctgcggagatgagactctgtcatgtgttggtctcagcccaaagcagaggctccgccaagtgcctgtgccagagcccgacacctacaatggcatcttcaccaccttaaatttccaaggaaactatatttcataccttgatggaaatgtatggaaagcatacagttggaccgagaaactaattctcagtgaaaattatttgactgaattacctaaggattcatttgaaggcctgctatacctccagtatttagatttatcctgcaataaaatacgatatattgaaagacaaacatttgaatcactaccatttttgcagtatataaatctgggctgcaatttaattacaaaactgagccttggaacatttcaggcctggcacggaatgcagtttttacacaacttaattctcaatcgcaatcctctgactactgtcgaagatccatatctctttgaactgccggcattaaaatatctagacatgggaacaacacacatcacacttacaacacttaagaacattctcacgatgactgttgaactggaaaaactgatcttacctagccatatggcctgctgcctctgccaatttaaaaatagcattgaggctgtctgcaagacagtcaagctgcattgcaacactgcatgtctgactaacagcatacattgtcctgaagaagcatctgtagggaatccagaaggagcgttcatgaagatgttacaagcccggaagcagcacatgagcactcagctgactattgagtcggaggcgccctcagacagcagtggcatcaacttgtcaggctttgggggtgatcagcttgaaattcagctaaccgagcagctacggtccctcatccccaacgaggatgtgagaaagttcatgtctcatgttatccggaccttgaaaatggaatgttcagaaacacatgtgcaagggagctgtgccaagctcatgttgcgaacaggcctcctgatgaagcttctcagcgagcagcaggaagcaaaggcattgaatgtagaatgggatacggaccaacaaaaaacaaattatattaatgagaacatggaacagaatgaacagaaagagcagaagtcaagtgagctcatgaaagaagttccaggagatgactataagaacaaactcatcttcgcaatatctgtgactgtaatactaataattttgattataattttttgtcttatagaggtgaattcacataaaagggcatcagaaaaatacaaagacaacccatcaatatcaggagcctgagcatgagttaaagcatgtggatggcctggagctatgtttttaaaattgttattaaatattggttttttacttaaatcaatgaaaactttctttactttgtggttgtgttcctcaaaatgagaatttttaacaataataaaaataaagcttgttagatc

SEQ ID NO: 148072 - DNA, 2773 bp, Homo sapiens
  Payload ID: 9302
  Gene Symbol: LRRC37B
  Gene Name: leucine rich repeat containing 37B
  ENST ID: ENST00000584368
  CDS Start-End: 15-2741
tcagggctgccagaatggcttttgctgagtgcatagcaccagcgtgtgtcatgtcttggctgcgtttctggggcccatggcccctccttacgtggcaactattgtctttactagtcaaggaggctcagcctctggtgtgggtcaaggacccgctccagctgacctctaaccccctggggccacctgagccctggtcttcccgctcctcccatctcccatgggaatctccccatgcacctgctcccccagcagccccgggggactttgattacctggggccctctgcttcttcgcagatgtcagccctgcctcaggaaccaactgaaaatttggctccattcctgaaggaattggattcagctggagagctgcccctggggccagagccgttcttggctgcacatcaggacttaaatgacaagcggactccagaagaaaggctcccagaggtggttccgcttctcaaccgggatcagaaccaggccctagttcagcttcctcgcctcaagtgggttcaaactacagatctagatcgggctgcaggtcatcaggcagatgaaatacttgttccactagacagtaaggtttcaagaccaaccaaatttgttgtttcgcccaagaacctgaagaaagatctagctgaacgttggagccttcctgagattgttgggattccacaccaattatccaaacctcagcgtcagaaacagactttgccagatgattatttgagtatggacacactgtatcccggcagcctacctccagaactccgggtgaacgcagatgagcctccagggcctcctgagcaagttggactttctcaattccatctagagcccaaaagtcaaaatccagagacccttgaagacatccagtcctcttcactccaggaagaagccccagcgcagcttctacagctccctcaggaggtagaaccttcaacccagcaggaggccccagctctgcctccagagtcctctatggagagtctagctcaaactccactgaatcatgaagtgacagttcaacctccaggtgaggatcaagctcattataatttgcccaagtttacagtcaaacctgcagatgtggaggttaccatgacttcagagcctaaaaatgagacagaatctacccaagcccagcaggaggccccaattcagcctcccgaggaggcggaaccttcttctacagccctgaggactacagatcctcctccagaacaccctgaggtgacacttccaccttcagacaagggtcaggctcagcattcacacctgactgaagccacagttcaacctctggacctggagcttagcataactacagagcctactacagaggttaaaccgtctccaaccacggaggaaacctcagctcagcctccagacccggggcttgccataactccagaacccactacagagattggacattccacagccctggagaagactagagctcctcatccagaccaggttcagactctgcatcgaagcctgactgaagtcacaggtccacctacaaagttagaatcttcgcaggattcattggtgcagtctgaaactgcaccagaggaacagaaggcctccacaagcaccaacatatgtgagctctgcacctgcggagatgagactctgtcatgtgttggtctcagcccaaagcagaggctccgccaagtgcctgtgccagagcccgacacctacaatggcatcttcaccaccttaaatttccaaggaaactatatttcataccttgatggaaatgtatggaaagcatacagttggaccgagaaactaattctcagtgaaaattatttgactgaattacctaaggattcatttgaaggcctgctatacctccagtatttaattctcaatcgcaatcctctgactactgtcgaagatccatatctctttgaactgccggcattaaaatatctagacatgggaacaacacacatcacacttacaacacttaagaacattctcacgatgactgttgaactggaaaaactgatcttacctagccatatggcctgctgcctctgccaatttaaaaatagcattgaggctgtctgcaagacagtcaagctgcattgcaacactgcatgtctgactaacagcatacattgtcctgaagaagcatctgtagggaatccagaaggagcgttcatgaagatgttacaagcccggaagcagcacatgagcactcagctgactattgagtcggaggcgccctcagacagcagtggcatcaacttgtcaggctttgggggtgatcagcttgaaattcagctaaccgagcagctacggtccctcatccccaacgaggatgtgagaaagttcatgtctcatgttatccggaccttgaaaatggaatgttcagaaacacatgtgcaagggagctgtgccaagctcatgttgcgaacaggcctcctgatgaagcttctcagcgagcagcaggaagcaaaggcattgaatgtagaatgggatacggaccaacaaaaaacaaattatattaatgagaacatggaacagaatgaacagaaagagcagaagtcaagtgagctcatgaaagaagttccaggagatgactataagaacaaactcatcttcgcaatatctgtgactgtaatactaataattttgattataattttttgtcttatagaggtgaattcacataaaagggcatcagaaaaatacaaagacaacccatcaatatcaggagcctgagcatgagttaaagcatgtggatggcctggagc

SEQ ID NO: 148073 - DNA, 764 bp, Homo sapiens
  Payload ID: 9302
  Gene Symbol: LRRC37B
  Gene Name: leucine rich repeat containing 37B
  ENST ID: ENST00000582117
  CDS Start-End: 1-710
ctgaagaagcatctgtagggaatccagaaggagcgttcatgaagatgttacaagcccggaagcagcacatgagcactcagctgactattgagtcggaggcgccctcagacagcagtggcatcaacttgtcaggctttgggggtgatcagcttgaaattcagctaaccgagcagctacggtccctcatccccaacgaggatgtgagaaagttcatgtctcatgttatccggaccttgaaaatggaatgttcagaaacacatgtgcaagggagctgtgccaagctcatgttgcgaacaggcctcctgatgaagcttctcagcgagcagcaggaagcaaaggcattgaatgtagaatgggatacggaccaacaaaaaacaaattatattaatgagaacatggaacagaatgaacagaaagagcagaagtcaagtgagctcatgaaagaagttccaggagatgactataagaacaaactcatcttcgcaatatctgtgactgtaatactaataattttgattataattttttgtcttatagaggtaaggacaataattaattcaggttttcagaatacaatcctgtgtttgtgtggattcagaatccacaaactgaaaaccaacgtcactttcccacttgacattcttcttctgtcatttaaggctgaggtgtgctttgttcttttactgcaatgtatattccaggattgttaaaggatcctcgcttccaggaggtctctgtgaaataaaaccaagttaatcccacta

SEQ ID NO: 148074 - DNA, 733 bp, Homo sapiens
  Payload ID: 9302
  Gene Symbol: LRRC37B
  Gene Name: leucine rich repeat containing 37B
  ENST ID: ENST00000579206
  CDS Start-End: 267-733
aggaggggggcggcgatgccgaggagacccaggagtctgaggacaactaggaggatgacatggaggaggacgacgatgactccgattatccggaggagctggaagatgacgacgaggacgccagttactccacggaaagcagcttcagcagcactccaggtcagttgctctcccctgaaggaagagtattctcggatttcacctcagaggaggaagaattcaggctgccagaactggactagcacttctgaagatcccaaggccagatgtcagccctgcctcaggaaccaactgaaaatttggctccattcctgaaggaattggattcagctggagagctgcccctggggccagagccgttcttggctgcacatcaggacttaaatgacaagcggactccagaagaaaggctcccagaggtggttccgcttctcaaccgggatcagaaccaggccctagttcagcttcctcgcctcaagtgggttcaaactacagatctagatcgggctgcaggtcatcaggcagatgaaatacttgttccactagacagtaaggtttcaagaccaaccaaatttgttgtttcgcccaagaacctgaagaaagatctagctgaacgttggagccttcctgagattgttgggattccacaccaattatccaaacctcagcgtcagaaacagactttgccagatgattatttgagtatggacacactgtatcccggcagcctacc

SEQ ID NO: 148075 - DNA, 725 bp, Homo sapiens
  Payload ID: 9302
  Gene Symbol: LRRC37B
  Gene Name: leucine rich repeat containing 37B
  ENST ID: ENST00000583342
  CDS Start-End: 70-725
ggcgggggcgcgggggcagccacctagcccggaccaccgcagcccggagggctgtcaacagagtggtgtatgatgactacgagagcgaggaggaggagtaagaggaggggggcggcgatgccgaggagacccaggagtctgaggacaactaggaggatgacatggaggaggacgacgatgactccgattatccggaggagctggaagatgacgacgaggacgccagttactccacggaaagcagcttcagcagcactccagatgtcagccctgcctcaggaaccaactgaaaatttggctccattcctgaaggaattggattcagctggagagctgcccctggggccagagccgttcttggctgcacatcaggacttaaatgacaagcggactccagaagaaaggctcccagaggtggttccgcttctcaaccgggatcagaaccaggccctagttcagcttcctcgcctcaagtgggttcaaactacagatctagatcgggctgcaggtcatcaggcagatgaaatacttgttccactagacagtaaggtttcaagaccaaccaaatttgttgtttcgcccaagaacctgaagaaagatctagctgaacgttggagccttcctgagattgttgggattccacaccaattatccaaacctcagcgtcagaaacagactttgccagatgattatttgagtatggacacactgtatcccggcagcct

SEQ ID NO: 148076 - DNA, 2807 bp, Homo sapiens
  Payload ID: 9302
  Gene Symbol: LRRC37B
  Gene Name: leucine rich repeat containing 37B
  ENST ID: ENST00000578674
  CDS Start-End: 15-2177
tcagggctgccagaatggcttttgctgagtgcatagcaccagcgtgtgtcatgtcttggctgcgtttctggggcccatggcccctccttacgtggcaactattgtctttactagtcaaggaggctcagcctctggtgtgggtcaaggacccgctccagctgacctctaaccccctggggccacctgagccctggtcttcccgctcctcccatctcccatgggaatctccccatgcacctgctcccccagcagccccgggggactttgattacctggggccctctgcttcttcgcagatgtcagccctgcctcaggaaccaactgaaaatttggctccattcctgaaggaattggattcagctggagagctgcccctggggccagagccgttcttggctgcacatcaggacttaaatgacaagcggactccagaagaaaggctcccagaggtggttccgcttctcaaccgggatcagaaccaggccctagttcagcttcctcgcctcaagtgggttcaaactacagatctagatcgggctgcaggtcatcaggcagatgaaatacttgttccactagacagtaaggtttcaagaccaaccaaatttgttgtttcgcccaagaacctgaagaaagatctagctgaacgttggagccttcctgagattgttgggattccacaccaattatccaaacctcagcgtcagaaacagactttgccagatgattatttgagtatggacacactgtatcccggcagcctacctccagaactccgggtgaacgcagatgagcctccagggcctcctgagcaagttggactttctcaattccatctagagcccaaaagtcaaaatccagagacccttgaagacatccagtcctcttcactccaggaagaagccccagcgcagcttctacagctccctcaggaggtagaaccttcaacccagcaggaggccccagctctgcctccagagtcctctatggagagtctagctcaaactccactgaatcatgaagtgacagttcaacctccaggtgaggatcaagctcattataatttgcccaagtttacagtcaaacctgcagatgtggaggttaccatgacttcagagcctaaaaatgagacagaatctacccaagcccagcaggaggccccaattcagcctcccgaggaggcggaaccttcttctacagccctgaggactacagatcctcctccagaacaccctgaggtgacacttccaccttcagacaagggtcaggctcagcattcacacctgactgaagccacagttcaacctctggacctggagcttagcataactacagagcctactacagaggttaaaccgtctccaaccacggaggaaacctcagctcagcctccagacccggggcttgccataactccagaacccactacagagattggacattccacagccctggagaagactagagctcctcatccagaccaggttcagactctgcatcgaagcctgactgaagtcacaggtccacctacaaagttagaatcttcgcaggattcattggtgcagtctgaaactgcaccagaggaacagaaggcctccacaagcaccaacatatgtgagctctgcacctgcggagatgagactctgtcatgtgttggtctcagcccaaagcagaggctccgccaagtgcctgtgccagagcccgacacctacaatggcatcttcaccaccttaaatttccaaggaaactatatttcataccttgatggaaatgtatggaaagcatacagttggaccgagaaactaattctcagtgaaaattatttgactgaattacctaaggattcatttgaaggcctgctatacctccagtatttagatttatcctgcaataaaatacgatatattgaaagacaaacatttgaatcactaccatttttgcagtatataaatctgggctgcaatttaattacaaaactgagccttggaacatttcaggcctggcacggaatgcagtttttacacaacttaattctcaatcgcaatcctctgactactgtcgaagatccatatctctttgaactgccggcattaaaatatctagacatgggaacaacacacatcacacttacaacacttaagaacattctcacgatgactgttgaactggaaaaactctgaagaagcatctgtagggaatccagaaggagcgttcatgaagatgttacaagcccggaagcagcacatgagcactcagctgactattgagtcggaggcgccctcagacagcagtggcatcaacttgtcaggctttgggggtgatcagcttgaaattcagctaaccgagcagctacggtccctcatccccaacgaggatgtgagaaagttcatgtctcatgttatccggaccttgaaaatggaatgttcagaaacacatgtgcaagggagctgtgccaagctcatgttgcgaacaggcctcctgatgaagcttctcagcgagcagcaggaagcaaaggcattgaatgtagaatgggatacggaccaacaaaaaacaaattatattaatgagaacatggaacagaatgaacagaaagagcagaagtcaagtgagctcatgaaagaagttccaggagatgactataagaacaaactcatcttcgcaatatctgtgactgtaatactaataattttgattataattttttgtcttatagaggtgaattcacataaaagggcatcagaaaaatacaaagacaacccatcaatatcaggagcctgagcatgagttaaagcatgtggatggcctggagc

SEQ ID NO: 148077 - DNA, 2209 bp, Homo sapiens
  Payload ID: 9303
  Gene Symbol: LRRC38
  Gene Name: leucine rich repeat containing 38
  Uniprot ID: Q5VT99
  ENST ID: ENST00000376085
  CDS Start-End: 456-1340
ggacacgccttagggaaaccgctcctgggcttggtagctgaacttagacgtcgagtgcagcccgcccggtgcgcgcggcgtcttactgccagatctcggaaatcagctgccagggtggggccgcgttttggcgacggccactcggccacccctgccgctcccgcctctcccaagagatttttctagcgggttaatttcctgtccgggtaaaccctttggtgagtccctcgcccctccctccccgcccctcccctctccatccctgctgtcccggctccccagtccgtccgcgccgcgctccatcgcccccgcacgcccgggcgcacgccctccccgcccgggccgccctctggctccccgcgcccggcagccagtgcctcaccgcgccgtcccgcgccagggctcgctccgagagccgcttccttctcgccgcggccggcgcgggccccccggccatgcgcccccgagccccagcctgcgccgccgcggcgctcgggctctgcagccttctgctgctgctcgcgcccgggcacgcgtgccccgcgggctgcgcctgcaccgacccgcacaccgtggactgccgcgaccgcgggctgcccagcgtgccagaccctttccccctggacgtgcgcaagctgctggtggccggcaaccgcatccagcggatccccgaggacttcttcatcttctacggcgacctggtctacctggacttcaggaacaactcgctgcgctcgctggaggagggcacgttcagcggctcggccaagctcgtgttcctcgacctcagctacaacaacttgacccagctgggcgccggcgccttccgctcggccgggaggctggtgaagcttagcctggctaacaacaacctggtgggcgtgcacgaggacgccttcgagaccctggagtcgctgcaggtgctggagctcaacgacaacaacctgcgcagcctcagcgtggccgccctggccgcgctgcccgcgctgcgctccctgcgtctggacgggaacccctggctgtgcgactgtgacttcgcccacctcttctcctggatccaggagaacgcatccaaactgcccaaaggccttgatgaaatccagtgctccctgcccatggagagcaggaggatatccctgcgtgagctgtcggaggccagcttcagcgagtgtaggttcagcctgtcactcacagacctctgcatcatcattttctccggtgtggccgtgtccattgcggccatcatctccagcttcttcctggccactgtggtgcagtgcctccagaggtgcgcacccaacaaagatgcggaggatgaagacgaggacaaggatgactgagccacctcctccctcctgcctcttactctccagcaccgaaccagaagctctctccaagacgagagggaaatgctgaaaatggaaaagcactggccaccatctgtgaactgaacagagcctgttccgtgtcttggcccctgggtacacctgctgggaccactgatctcagagtttagaatcagcagagcacagaagcccaggaaggatggagggaattattcctggagcataacctgcctctcagatcgaggtgtgtgttgggggagaagatgaccgagtcaggcttcatagctgatgactaaaagcctcccccaggaaatgtgaagactggcagctttcaatggcaaagatgattttacgccattctttttctgacctgtactgggagatcatgaaacatctgccttcctcccaagaaacagcagctcaaacagtggagattcaaattcggatcattcaccacaagaacgagaactttgatccttatataataggcctcagcaaccttgggatgttatactgggaactaataaactcgtgtgcaatagactcaatgtttatgttcccccagattttatatgttgaaacctaatccccaatgtgatggtatttggaggtggggcttttgggaggtgattaggtttagatcatatcatgaggatggggcccaaatgatgggattagtgccctcatgaaaggtggccccagagagctccttcaccccttcaatgcttgaggatgcagcaagaaatcagctgcccatgaaccgagaagcaggccctcaccagaacccagccatgctggcacccagatctcagacttccagcctccagaactgggagaaataaataaatgtctgttgtttgtaa

SEQ ID NO: 148078 - DNA, 1881 bp, Homo sapiens
  Payload ID: 9304
  Gene Symbol: LRRC39
  Gene Name: leucine rich repeat containing 39
  Uniprot ID: Q96DD0
  ENST ID: ENST00000342895
  CDS Start-End: 281-1288
aaaattagaactaggctgacattacatttcacttggttacagctgactggggattttaatcatttggagccacactgaaaaaaaaatttccccctgcaatctactcttaactgatagtcgctaactttggttatgtgtggtaagtatttgacaatgtcaatgaacagtctgaaacattgctttttttctctggtacatttaggtcctttctgaaatggtatctatgattcagctattcaaaacctaatgaagttggtgactatgacaatgtggagaaatcatgacagaaaatgtggtttgtactggggctgtcaatgctgtaaaggaagtttgggaaaaaagaataaagaaactcaatgaagacctgaagcgagagaaggaatttcaacacaagctagtgcggatctgggaagaacgagtaagcttaaccaagctaagagaaaaggtcaccagggaagatggaagagtcattttgaagatagaaaaagaggaatggaagaccctcccttcttctctgctgaaactgaatcaactacaggaatggcaacttcatagaactggtttgctgaaaattcctgaattcattggaagattccagaacctcattgtgttagatttatctcgaaacacaatttcagagataccaccagggattggactgcttactagacttcaggaactgattctcagctacaacaaaatcaagactgtccccaaggaactaagtaattgtgccagcttggagaaactagaactggctgttaacagagatatatgtgatcttccacaagagctcagcaatctgctaaaacttactcaccttgatctgagtatgaacgattttactacaatccctcttgctgtgttgaacatgcctgcccttgagtggctggacatgggaagcaacaaacttgaacaacttcctgatactatagaaagaatgcaaaatctacatacgttatggctgcaacgaaatgaaataacatgcttgcctcaaacaatcagcaatatgaaaaatctgggtactcttgttctcagcaacaataaactgcaagatattccagtatgcatggaagaaatggcaaatctgaggtttgtcaacttcagagacaacccactgaaattgaaagtatcacttcctcccagtgaaggcacagatgaagaagaggaacgggaattatttggccttcagtttatgcacacatacatacaagagtcacggagaagagcagatcaccaagtcaacggttcaactactttaccaatctccataaatacggatggataatataattcaagatgcccttctaaagaggattactttggtgaattctctaatgtttggatttctgaagtaaaaagaaaagctattaccaaagtttaatgaggccacagcattttttaaagttcatattatttgctatttaaagtatatatttttttgatataaaaatataattaaaaaattttttttggtggaagacagatgatgctcaaatttcttttccattaagcagttgtttctggtgatgaagaatgatttggtaaagcagttaacaaaacattttccaaagacaccagagggtctgtatagtactgcaaagcaggactgaatcccttctgctgcaaatactggattcgaccttggtcaatcagcaatttacaaagatgccctattttcttcttttcttcaacactaagaagcctaaattgaataaacacacacaaaacattgttaaaattttgcaaaagtttataaaaaattatttttgtcactatttattgagagactgttaactaacccataatgtactaagtactttgtcccatgcttccaagacacattatatttatgaccacaataaaagatgtgtatatttt

SEQ ID NO: 148079 - DNA, 1396 bp, Homo sapiens
  Payload ID: 9304
  Gene Symbol: LRRC39
  Gene Name: leucine rich repeat containing 39
  Uniprot ID: Q96DD0
  ENST ID: ENST00000370137
  CDS Start-End: 200-1207
atcatttggagccacactgaaaaaaaaatttccccctgcaatctactcttaactgatagtcgctaactttggttatgtgtgtctattcagaatattacattaattgatttctcaaacaaaggtcctttctgaaatggtatctatgattcagctattcaaaacctaatgaagttggtgactatgacaatgtggagaaatcatgacagaaaatgtggtttgtactggggctgtcaatgctgtaaaggaagtttgggaaaaaagaataaagaaactcaatgaagacctgaagcgagagaaggaatttcaacacaagctagtgcggatctgggaagaacgagtaagcttaaccaagctaagagaaaaggtcaccagggaagatggaagagtcattttgaagatagaaaaagaggaatggaagaccctcccttcttctctgctgaaactgaatcaactacaggaatggcaacttcatagaactggtttgctgaaaattcctgaattcattggaagattccagaacctcattgtgttagatttatctcgaaacacaatttcagagataccaccagggattggactgcttactagacttcaggaactgattctcagctacaacaaaatcaagactgtccccaaggaactaagtaattgtgccagcttggagaaactagaactggctgttaacagagatatatgtgatcttccacaagagctcagcaatctgctaaaacttactcaccttgatctgagtatgaacgattttactacaatccctcttgctgtgttgaacatgcctgcccttgagtggctggacatgggaagcaacaaacttgaacaacttcctgatactatagaaagaatgcaaaatctacatacgttatggctgcaacgaaatgaaataacatgcttgcctcaaacaatcagcaatatgaaaaatctgggtactcttgttctcagcaacaataaactgcaagatattccagtatgcatggaagaaatggcaaatctgaggtttgtcaacttcagagacaacccactgaaattgaaagtatcacttcctcccagtgaaggcacagatgaagaagaggaacgggaattatttggccttcagtttatgcacacatacatacaagagtcacggagaagagcagatcaccaagtcaacggttcaactactttaccaatctccataaatacggatggataatataattcaagatgcccttctaaagaggattactttggtgaattctctaatgtttggatttctgaagtaaaaagaaaagctattaccaaagtttaatgaggccacagcattttttaaagttcatattatttgctatttaaagtatatatttttttgatataaaaatataattaaaaaattttttttggt

SEQ ID NO: 148080 - DNA, 1466 bp, Homo sapiens
  Payload ID: 9304
  Gene Symbol: LRRC39
  Gene Name: leucine rich repeat containing 39
  Uniprot ID: Q96DD0
  ENST ID: ENST00000370138
  CDS Start-End: 200-1219
atcatttggagccacactgaaaaaaaaatttccccctgcaatctactcttaactgatagtcgctaactttggttatgtgtgtctattcagaatattacattaattgatttctcaaacaaaggtcctttctgaaatggtatctatgattcagctattcaaaacctaatgaagttggtgactatgacaatgtggagaaatcatgacagaaaatgtggtttgtactggggctgtcaatgctgtaaaggaagtttgggaaaaaagaataaagaaactcaatgaagacctgaagcgagagaaggaatttcaacacaagctagtgcggatctgggaagaacgagtaagcttaaccaagctaagagaaaaggtcaccagggaagatggaagagtcattttgaagatagaaaaagaggaatggaagaccctcccttcttctctgctgaaactgaatcaactacaggaatggcaacttcatagaactggtttgctgaaaattcctgaattcattggaagattccagaacctcattgtgttagatttatctcgaaacacaatttcagagataccaccagggattggactgcttactagacttcaggaactgattctcagctacaacaaaatcaagactgtccccaaggaactaagtaattgtgccagcttggagaaactagaactggctgttaacagagatatatgtgatcttccacaagagctcagcaatctgctaaaacttactcaccttgatctgagtatgaacgattttactacaatccctcttgctgtgttgaacatgcctgcccttgagtggctggacatgggaagcaacaaacttgaacaacttcctgatactatagaaagaatgcaaaatctacatacgttatggctgcaacgaaatgaaataacatgcttgcctcaaacaatcagcaatatgaaaaatctgggtactcttgttctcagcaacaataaactgcaagatattccagtatgcatggaagaaatggcaaatctgaggtttgtcaacttcagagacaacccactgaaattgaaagtatcacttcctcccagtgaaggcacagatgaagaagaggaacgggaattatttggccttcagtttatgcacacatacatacaagagtcacggagaagagcagctcttcagttttgtgtttgtcatggacagattctgacaatatatacatgtatggctctggaaatttgaagatcaccaagtcaacggttcaactactttaccaatctccataaatacggatggataatataattcaagatgcccttctaaagaggattactttggtgaattctctaatgtttggatttctgaagtaaaaagaaaagctattaccaaagtttaatgaggccacagcattttttaaagttcatattatttgctatttaaagtatatatttttttgatataaaaatataattaaaaaattttttttggt

SEQ ID NO: 148081 - DNA, 1951 bp, Homo sapiens
  Payload ID: 9304
  Gene Symbol: LRRC39
  Gene Name: leucine rich repeat containing 39
  Uniprot ID: Q96DD0
  ENST ID: ENST00000620882
  CDS Start-End: 281-1300
aaaattagaactaggctgacattacatttcacttggttacagctgactggggattttaatcatttggagccacactgaaaaaaaaatttccccctgcaatctactcttaactgatagtcgctaactttggttatgtgtggtaagtatttgacaatgtcaatgaacagtctgaaacattgctttttttctctggtacatttaggtcctttctgaaatggtatctatgattcagctattcaaaacctaatgaagttggtgactatgacaatgtggagaaatcatgacagaaaatgtggtttgtactggggctgtcaatgctgtaaaggaagtttgggaaaaaagaataaagaaactcaatgaagacctgaagcgagagaaggaatttcaacacaagctagtgcggatctgggaagaacgagtaagcttaaccaagctaagagaaaaggtcaccagggaagatggaagagtcattttgaagatagaaaaagaggaatggaagaccctcccttcttctctgctgaaactgaatcaactacaggaatggcaacttcatagaactggtttgctgaaaattcctgaattcattggaagattccagaacctcattgtgttagatttatctcgaaacacaatttcagagataccaccagggattggactgcttactagacttcaggaactgattctcagctacaacaaaatcaagactgtccccaaggaactaagtaattgtgccagcttggagaaactagaactggctgttaacagagatatatgtgatcttccacaagagctcagcaatctgctaaaacttactcaccttgatctgagtatgaacgattttactacaatccctcttgctgtgttgaacatgcctgcccttgagtggctggacatgggaagcaacaaacttgaacaacttcctgatactatagaaagaatgcaaaatctacatacgttatggctgcaacgaaatgaaataacatgcttgcctcaaacaatcagcaatatgaaaaatctgggtactcttgttctcagcaacaataaactgcaagatattccagtatgcatggaagaaatggcaaatctgaggtttgtcaacttcagagacaacccactgaaattgaaagtatcacttcctcccagtgaaggcacagatgaagaagaggaacgggaattatttggccttcagtttatgcacacatacatacaagagtcacggagaagagcagctcttcagttttgtgtttgtcatggacagattctgacaatatatacatgtatggctctggaaatttgaagatcaccaagtcaacggttcaactactttaccaatctccataaatacggatggataatataattcaagatgcccttctaaagaggattactttggtgaattctctaatgtttggatttctgaagtaaaaagaaaagctattaccaaagtttaatgaggccacagcattttttaaagttcatattatttgctatttaaagtatatatttttttgatataaaaatataattaaaaaattttttttggtggaagacagatgatgctcaaatttcttttccattaagcagttgtttctggtgatgaagaatgatttggtaaagcagttaacaaaacattttccaaagacaccagagggtctgtatagtactgcaaagcaggactgaatcccttctgctgcaaatactggattcgaccttggtcaatcagcaatttacaaagatgccctattttcttcttttcttcaacactaagaagcctaaattgaataaacacacacaaaacattgttaaaattttgcaaaagtttataaaaaattatttttgtcactatttattgagagactgttaactaacccataatgtactaagtactttgtcccatgcttccaagacacattatatttatgaccacaataaaagatgtgtatatttt

SEQ ID NO: 148082 - DNA, 1696 bp, Homo sapiens
  Payload ID: 9305
  Gene Symbol: LRRC3B
  Gene Name: leucine rich repeat containing 3B
  Uniprot ID: Q96PB8
  ENST ID: ENST00000396641
  CDS Start-End: 593-1372
attgactgagccgactgcatctctgggcaagcggcgctttgcctctctcctgtctttgtctgctcttcctgcaaggctacggcgcctggagcagggtctgcagcggccgccgcagcaacgcgagccaagtcgtgccccgcacggccgcccggggccgcaccctcgctcggtggcggcgcccgaagacgccagccgcgccacgcactgcctgcgtcccgcgccccagccgccgcgcaccaacgccgccgccttcgccgggagccaagcccgccgggccggcccggtcccaggtgggcagctcggcttgcagctggttggaggtggcggccgctgcagccctggcagcgggcacacccctaagcatacgcacccaacgcctcctccctgagccacgaggatggagcagccaccccggcccgggactggcgcaaggtgcccaagcaaggaaagaaataatgaagagacacatgtgttagctgcagccttttgaaacacgcaagaaggaaatcaatagtgtggacagggctggaacctttaccacgcttgttggagtagatgaggaatgggctcgtgattatgctgacattccagcatgaatctggtagacctgtggttaacccgttccctctccatgtgtctcctcctacaaagttttgttcttatgatactgtgctttcattctgccagtatgtgtcccaagggctgtctttgttcttcctctgggggtttaaatgtcacctgtagcaatgcaaatctcaaggaaatacctagagatcttcctcctgaaacagtcttactgtatctggactccaatcagatcacatctattcccaatgaaatttttaaggacctccatcaactgagagttctcaacctgtccaaaaatggcattgagtttatcgatgagcatgccttcaaaggagtagctgaaaccttgcagactctggacttgtccgacaatcggattcaaagtgtgcacaaaaatgccttcaataacctgaaggccagggccagaattgccaacaacccctggcactgcgactgtactctacagcaagttctgaggagcatggcgtccaatcatgagacagcccacaacgtgatctgtaaaacgtccgtgttggatgaacatgctggcagaccattcctcaatgctgccaacgacgctgacctttgtaacctccctaaaaaaactaccgattatgccatgctggtcaccatgtttggctggttcactatggtgatctcatatgtggtatattatgtgaggcaaaatcaggaggatgcccggagacacctcgaatacttgaaatccctgccaagcaggcagaagaaagcagatgaacctgatgatattagcactgtggtatagtgtccaaactgactgtcattgagaaagaaagaaagtagtttgcgattgcagtagaaataagtggtttacttctcccatccattgtaaacatttgaaactttgtatttcagtttcttttgaattatgccactgctgaacttttaacaaacactacaacataaataatttgagtttaggtgatccaccccttaattgtacccccgatggtatatttctgagtaagctactatctgaacattagttagatccatctcactatttaataatgaaatttatttttttaatttaaaagcaaataaaagcttaactttgaaccatggaaaa

SEQ ID NO: 148083 - DNA, 489 bp, Homo sapiens
  Payload ID: 9305
  Gene Symbol: LRRC3B
  Gene Name: leucine rich repeat containing 3B
  ENST ID: ENST00000414619
  CDS Start-End: 326-489
gaaataagagaggtgggacatggaggatggctgcggccacccctgaagcttcgtccagcgcgatgggagtcagtccatccttgcacacgccacccccaactcggcaatgaaacctttggagtggcttgcggctgtgcgccgtgggaactgcaagtgcagatatgggtgcccaagcaaggaaagaaataatgaagagacacatgtgttagctgcagccttttgaaacacgcaagaaggaaatcaatagtgtggacagggctggaacctttaccacgcttgttggagtagatgaggaatgggctcgtgattatgctgacattccagcatgaatctggtagacctgtggttaacccgttccctctccatgtgtctcctcctacaaagttttgttcttatgatactgtgctttcattctgccagtatgtgtcccaagggctgtctttgttcttcctctgggggtttaaatgtcacctgtagcaatgcaaatct

SEQ ID NO: 148084 - DNA, 1551 bp, Homo sapiens
  Payload ID: 9305
  Gene Symbol: LRRC3B
  Gene Name: leucine rich repeat containing 3B
  Uniprot ID: Q96PB8
  ENST ID: ENST00000456208
  CDS Start-End: 448-1227
atcagaaccacatcggaaatcaatgaaataagcattattcttagttctagttgaggaaactgacatgcggaacaattagttggcctgtccaagacctcctagctggtatcagaaatgaaagttgaacttgattttatctagcttcaggttctggatgatttctgtacattttgttgagaccaagaaagtttaaacggtccagggtggctccactggctcaaagggaaagaggatttagtaagtggcttgatttctcttctctgccttccattccactccacccccaggtgcccaagcaaggaaagaaataatgaagagacacatgtgttagctgcagccttttgaaacacgcaagaaggaaatcaatagtgtggacagggctggaacctttaccacgcttgttggagtagatgaggaatgggctcgtgattatgctgacattccagcatgaatctggtagacctgtggttaacccgttccctctccatgtgtctcctcctacaaagttttgttcttatgatactgtgctttcattctgccagtatgtgtcccaagggctgtctttgttcttcctctgggggtttaaatgtcacctgtagcaatgcaaatctcaaggaaatacctagagatcttcctcctgaaacagtcttactgtatctggactccaatcagatcacatctattcccaatgaaatttttaaggacctccatcaactgagagttctcaacctgtccaaaaatggcattgagtttatcgatgagcatgccttcaaaggagtagctgaaaccttgcagactctggacttgtccgacaatcggattcaaagtgtgcacaaaaatgccttcaataacctgaaggccagggccagaattgccaacaacccctggcactgcgactgtactctacagcaagttctgaggagcatggcgtccaatcatgagacagcccacaacgtgatctgtaaaacgtccgtgttggatgaacatgctggcagaccattcctcaatgctgccaacgacgctgacctttgtaacctccctaaaaaaactaccgattatgccatgctggtcaccatgtttggctggttcactatggtgatctcatatgtggtatattatgtgaggcaaaatcaggaggatgcccggagacacctcgaatacttgaaatccctgccaagcaggcagaagaaagcagatgaacctgatgatattagcactgtggtatagtgtccaaactgactgtcattgagaaagaaagaaagtagtttgcgattgcagtagaaataagtggtttacttctcccatccattgtaaacatttgaaactttgtatttcagtttcttttgaattatgccactgctgaacttttaacaaacactacaacataaataatttgagtttaggtgatccaccccttaattgtacccccgatggtatatttctgagtaagctactatctgaacattagttagatccatctcactatttaataatgaaatttatttttttaatttaaaagcaaataaaagcttaactttgaaccatggaaaa

SEQ ID NO: 148085 - DNA, 927 bp, Homo sapiens
  Payload ID: 9305
  Gene Symbol: LRRC3B
  Gene Name: leucine rich repeat containing 3B
  ENST ID: ENST00000432040
  CDS Start-End: 439-927
gggtacctgggggcgcgtggagacaaggaatggagccccggaatgccgggcccttgggtacttgggaaggcaggctgctgagtgcctgggatggggcgatcttcctccccagaagcaaacaaacctccccgcgagaatctgaatgcgttggcatcttgggtggtgactgaatggtcagatcgtggactagggatgcttctccaagctctaagaggaccatagtctgctctcttctctggcacccgcttgcttctacgctccttcacctctgcagccaggtgcccaagcaaggaaagaaataatgaagagacacatgtgttagctgcagccttttgaaacacgcaagaaggaaatcaatagtgtggacagggctggaacctttaccacgcttgttggagtagatgaggaatgggctcgtgattatgctgacattccagcatgaatctggtagacctgtggttaacccgttccctctccatgtgtctcctcctacaaagttttgttcttatgatactgtgctttcattctgccagtatgtgtcccaagggctgtctttgttcttcctctgggggtttaaatgtcacctgtagcaatgcaaatctcaaggaaatacctagagatcttcctcctgaaacagtcttactgtatctggactccaatcagatcacatctattcccaatgaaatttttaaggacctccatcaactgagagttctcaacctgtccaaaaatggcattgagtttatcgatgagcatgccttcaaaggagtagctgaaaccttgcagactctggacttgtccgacaatcggattcaaagtgtgcacaaaaatgccttcaataacctgaaggccagggccagaattgccaacaacccctggcactgcgactgtactctacagcaagttctgaggagcatggcgtccaat

SEQ ID NO: 148086 - DNA, 1695 bp, Homo sapiens
  Payload ID: 9305
  Gene Symbol: LRRC3B
  Gene Name: leucine rich repeat containing 3B
  Uniprot ID: Q96PB8
  ENST ID: ENST00000417744
  CDS Start-End: 592-1371
ggaaacgcagagctaggaggtgtgggcctcgggtgaggggagacccagctcttagacctgggagcccagacagaggtggatctgcccaccttgcagctcccagaggactcctgctgccttgtaccagttgggaaaaagcaaaattcagagcagttcctttttctgggtccctcgccttggccacatcggaggaaacgtcgactcgccagggctcccgggagaaatcccgaggtcagtccctcccattctggggcacccctggagcagctagctccctgcctagcggtggcaaactccagagccccaaggagcagaacggggattccctgtgcgcaggctcctggtgcagctcctgagcacaaaggccacaccctcacagaccaggcctggtgagagagccgggcttcttcagaagtacctggatacctgaggtgcccaagcaaggaaagaaataatgaagagacacatgtgttagctgcagccttttgaaacacgcaagaaggaaatcaatagtgtggacagggctggaacctttaccacgcttgttggagtagatgaggaatgggctcgtgattatgctgacattccagcatgaatctggtagacctgtggttaacccgttccctctccatgtgtctcctcctacaaagttttgttcttatgatactgtgctttcattctgccagtatgtgtcccaagggctgtctttgttcttcctctgggggtttaaatgtcacctgtagcaatgcaaatctcaaggaaatacctagagatcttcctcctgaaacagtcttactgtatctggactccaatcagatcacatctattcccaatgaaatttttaaggacctccatcaactgagagttctcaacctgtccaaaaatggcattgagtttatcgatgagcatgccttcaaaggagtagctgaaaccttgcagactctggacttgtccgacaatcggattcaaagtgtgcacaaaaatgccttcaataacctgaaggccagggccagaattgccaacaacccctggcactgcgactgtactctacagcaagttctgaggagcatggcgtccaatcatgagacagcccacaacgtgatctgtaaaacgtccgtgttggatgaacatgctggcagaccattcctcaatgctgccaacgacgctgacctttgtaacctccctaaaaaaactaccgattatgccatgctggtcaccatgtttggctggttcactatggtgatctcatatgtggtatattatgtgaggcaaaatcaggaggatgcccggagacacctcgaatacttgaaatccctgccaagcaggcagaagaaagcagatgaacctgatgatattagcactgtggtatagtgtccaaactgactgtcattgagaaagaaagaaagtagtttgcgattgcagtagaaataagtggtttacttctcccatccattgtaaacatttgaaactttgtatttcagtttcttttgaattatgccactgctgaacttttaacaaacactacaacataaataatttgagtttaggtgatccaccccttaattgtacccccgatggtatatttctgagtaagctactatctgaacattagttagatccatctcactatttaataatgaaatttatttttttaatttaaaagcaaataaaagcttaactttgaaccatggaaaa

SEQ ID NO: 148087 - DNA, 891 bp, Homo sapiens
  Payload ID: 9306
  Gene Symbol: LRRC3C
  Gene Name: leucine rich repeat containing 3C
  Uniprot ID: A6NJW4
  ENST ID: ENST00000377924
  CDS Start-End: 51-878
catagtcttccaaaatccagcaagaaaaatccttctcagaaaggtctccaatgcgtatgacctcatcttccttcgtatcctactgcactccaggactatgccaatttatggccatgctcccaacagcaggtcacctcctgcccctcctgctggtgataggcacagggggtactgtgcccagcccccaggtgcctccccggggctgttatgtggcaaaggaagcaggtgaacggacgttccgctgcagccaggcaggcctcagtgctgtgccctccggcatccccaatgacacccgcaagctctacctggatgccaaccagctggcatcggtgcctgctggtgccttccagcacctgcctgtcctggaggagttggatctgtcccataatgcccttgcccacctctcaggggcggctttccagggcctggagggcacattgcgccacctcgacctctctgccaaccagctggcctcagtgcccgtggaggcctttgtggggctacagatccaagtgaacctatccgcaaacccatggcactgtgactgcgccctccaggaagtgctccggcaggtgaggctggtgccgggcactgggacaggcatcgtgtgtggctcaggagcccgaccggacctcgtggggcaggagttcctgctgctggcaggggaggaagagctgtgtgggtcggggtggggtggggcccggaggagcaccgatgtggccctgctggtcaccatggggggctggctgacactcatggtggcttatctggtgcattatgtgtggcagaaccgagatgagaccaggcgctccctcaagcgggccccagtgctgcccgtgcgttccgaggactcctccatcctcagcacagtggtctgatgacccaggatgc

SEQ ID NO: 148088 - DNA, 3828 bp, Homo sapiens
  Payload ID: 9307
  Gene Symbol: LRRC4
  Gene Name: leucine rich repeat containing 4
  Uniprot ID: Q9HBW1
  ENST ID: ENST00000249363
  CDS Start-End: 259-2220
tccctcccctcccctcccctcccctctgccctccccgcccccaccacttcccccttttgttaattaaaactaagaagtcggaatgggaacgaggtgcccagctcccgtggagaaagcttaaggacaccacgccagtgctttcctgccttccttccgagatggaaagaggagctcctagctcacttaagccggggtagggctggttctcctttccgagccaaaatcccaggcgatggtgaattatgaacgtgccacaccatgaagctcttgtggcaggtaactgtgcaccaccacacctggaatgccatcctgctcccgttcgtctacctcacggcgcaagtgtggattctgtgtgcagccatcgctgctgccgcctcagccgggccccagaactgcccctccgtctgctcgtgcagtaaccagttcagcaaggtggtgtgcacgcgccggggcctctccgaggtcccgcagggtattccctcgaacacccggtacctcaacctcatggagaacaacatccagatgatccaggccgacaccttccgccacctccaccacctggaggtcctgcagttgggcaggaactccatccggcagattgaggtgggggccttcaacggcctggccagcctcaacaccctggagctgttcgacaactggctgacagtcatccctagcggggcctttgaatacctgtccaagctgcgggagctctggcttcgcaacaaccccatcgaaagcatcccctcttacgccttcaaccgggtgccctccctcatgcgcctggacttgggggagctcaagaagctggagtatatctctgagggagcttttgaggggctgttcaacctcaagtatctgaacttgggcatgtgcaacattaaagacatgcccaatctcacccccctggtggggctggaggagctggagatgtcagggaaccacttccctgagatcaggcctggctccttccatggcctgagctccctcaagaagctctgggtcatgaactcacaggtcagcctgattgagcggaatgcttttgacgggctggcttcacttgtggaactcaacttggcccacaataacctctcttctttgccccatgacctctttaccccgctgaggtacctggtggagttgcatctacaccacaacccttggaactgtgattgtgacattctgtggctagcctggtggcttcgagagtatatacccaccaattccacctgctgtggccgctgtcatgctcccatgcacatgcgaggccgctacctcgtggaggtggaccaggcctccttccagtgctctgcccccttcatcatggacgcacctcgagacctcaacatttctgagggtcggatggcagaacttaagtgtcggactccccctatgtcctccgtgaagtggttgctgcccaatgggacagtgctcagccacgcctcccgccacccaaggatctctgtcctcaacgacggcaccttgaacttttcccacgtgctgctttcagacactggggtgtacacatgcatggtgaccaatgttgcaggcaactccaacgcctcggcctacctcaatgtgagcacggctgagcttaacacctccaactacagcttcttcaccacagtaacagtggagaccacggagatctcgcctgaggacacaacgcgaaagtacaagcctgttcctaccacgtccactggttaccagccggcatataccacctctaccacggtgctcattcagactacccgtgtgcccaagcaggtggcagtacccgcgacagacaccactgacaagatgcagaccagcctggatgaagtcatgaagaccaccaagatcatcattggctgctttgtggcagtgactctgctagctgccgccatgttgattgtcttctataaacttcgtaagcggcaccagcagcggagtacagtcacagccgcccggactgttgagataatccaggtggacgaagacatcccagcagcaacatccgcagcagcaacagcagctccgtccggtgtatcaggtgagggggcagtagtgctgcccacaattcatgaccatattaactacaacacctacaaaccagcacatggggcccactggacagaaaacagcctggggaactctctgcaccccacagtcaccactatctctgaaccttatataattcagacccataccaaggacaaggtacaggaaactcaaatatgactcccctcccccaaaaaacttataaaatgcaatagaatgcacacaaagacagcaacttttgtacagagtggggagagactttttcttgtatatgcttatatattaagtctatgggctggttaaaaaaaacagattatattaaaatttaaagacaaaaagtcaaaacaaaaatattttctaacttgtaagttctatttaaagggggtgggggggaatcttgggaacgttgtggggtacaagccacaagttaacttgctatgctgccagaagggatttctggtataaggttgaaattgctgagataaaataaactaaaacaacaaacatccttaaagaggtagggtgtgggctgctgagggggcaagagggatagactgaatctgtcattttttagaagatgcttcataggacacaggactatccatttctacagacatctttcttaagccgagagctgtctttgcagaattatcttattaaaaaaaaatacaaaaaaaaagcaccatgaatttgtactgtgccaaaatgatagtggcaataatatttttcttcagaggctaaggggaagatagacctgtacatgtattttaagcaggaaaaccaccaaaattcaaacgaacccttaaaggggctgagtctttgtccatgtgcacaagtcttgggggtctgtgcactggacacacatgtgccttgcctgacagaattgcttagaaaggagcagagaaggacgggagctggcgtagctctcagtctaatgctttcacattgcaccagattcctgcagttgggcttaacccactctgcaaggcatgtgtctattcagggtttcccaggaggaggaggcccctgaaggggtgcggcagcaggggggtgggaagggagggtaaagcagagagaatgtattcacaggaggccataaattagcattgtgccatgtccacctgttgttcctggactctgacacatgattgtagacaatgatggcattttatgatttttaaaaaagattttgtttgttttaaggtggagagggaggagaagcctgaattggggagcttgggagtggaagcttttctcatgcttgtgatttggtgactcttctaaatgctgattcattagggattattacagcggatgtcaactggttgtggtgatggggtgggggcagaacatgagtagcaaagaaaagggagagacgaaaagggtacaggctcacgtaaagtaatgaagcctttcccaaccaggatggttcacaaaaaagctgtgagatccacagttacaagtgacacgcatgcacacatggagttccacatggggtactgttgaatggagcacactgatgggaagcttccctctcccaggccccctcaggagaaggtggaagagaaagggtgggcgtgggtggggaaggcagagatctctgttattctggtccatctaatgatgtaacttctttcagttattattttagctttaaaaggaaataaggggttcagatttgaaagggggtggtatgggtgggggaggggaattgccaacaaaagaacactgattgtaatgtgagaaaagtgtatttttgtattttaataaatattgttgaatttttaa

SEQ ID NO: 148089 - DNA, 451 bp, Homo sapiens
  Payload ID: 9307
  Gene Symbol: LRRC4
  Gene Name: leucine rich repeat containing 4
  ENST ID: ENST00000478726
  CDS Start-End: 300-451
tggtcctcgggggccggacggagcgccgccccgcgtgccggcagccggcggactggagaactgaccccccgtttttgtctcttccaccctccgagaagaggcgaggagaaaggggaagtcggaatgggaacgaggtgcccagctcccgtggagaaagcttaaggacaccacgccagtgctttcctgccttccttccgagatggaaagaggagctcctagctcacttaagccggggtagggctggttctcctttccgagccaaaatcccaggcgatggtgaattatgaacgtgccacaccatgaagctcttgtggcaggtaactgtgcaccaccacacctggaatgccatcctgctcccgttcgtctacctcacggcgcaagtgtggattctgtgtgcagccatcgctgctgccgcctcagccgggccccagaactgcccctccgtctgctc

SEQ ID NO: 148090 - DNA, 561 bp, Homo sapiens
  Payload ID: 9307
  Gene Symbol: LRRC4
  Gene Name: leucine rich repeat containing 4
  ENST ID: ENST00000476782
  CDS Start-End: 278-561
acattcacgttctgactgaaggacaaaaggatgagagagcagtctgcgtggctgccgcctgcaacaccgcgagcccggcgcgaggaggagacgaagtcggaatgggaacgaggtgcccagctcccgtggagaaagcttaaggacaccacgccagtgctttcctgccttccttccgagatggaaagaggagctcctagctcacttaagccggggtagggctggttctcctttccgagccaaaatcccaggcgatggtgaattatgaacgtgccacaccatgaagctcttgtggcaggtaactgtgcaccaccacacctggaatgccatcctgctcccgttcgtctacctcacggcgcaagtgtggattctgtgtgcagccatcgctgctgccgcctcagccgggccccagaactgcccctccgtctgctcgtgcagtaaccagttcagcaaggtggtgtgcacgcgccggggcctctccgaggtcccgcagggtattccctcgaacacccggtacctcaacctcatggagaacaacatccagatgatccaggccgacacctt

SEQ ID NO: 148091 - DNA, 557 bp, Homo sapiens
  Payload ID: 9307
  Gene Symbol: LRRC4
  Gene Name: leucine rich repeat containing 4
  ENST ID: ENST00000494115
  CDS Start-End: 322-557
aaaactaagaagtcggaatgggaacgaggtgcccagctcccgtggagaaagcttaaggacaccacgccagtgctttcctgccttccttccgaggtaactgtgcaccaccacacctggaatgccatcctgctcccgttcgtctacctcacggcgcaagtgtggattctgtgtgcagccatcgctgctgccgcctcagccgggccccagaactgcccctccgtctgctcgtgcagtaaccagttcagcaaggtggtgtgcacgcgccggggcctctccgaggtcccgcagggtattccctcgaacacccggtacctcaacctcatggagaacaacatccagatgatccaggccgacaccttccgccacctccaccacctggaggtcctgcagttgggcaggaactccatccggcagattgaggtgggggccttcaacggcctggccagcctcaacaccctggagctgttcgacaactggctgacagtcatccctagcggggcctttgaatacctgtccaagctgcgggagctctggcttcgcaacaaccccatcgaaag

SEQ ID NO: 148092 - DNA, 2884 bp, Homo sapiens
  Payload ID: 9308
  Gene Symbol: LRRC40
  Gene Name: leucine rich repeat containing 40
  Uniprot ID: Q9H9A6
  ENST ID: ENST00000370952
  CDS Start-End: 81-1889
gaaaggagcggggcatcccaacggcgccacctttaagcgtcacgggtggggctgcagcttctggacctaggactttgaacatgtcgcgcctgaagcggatagcggggcaggatctccgcgctggtttcaaagcaggtggaagagactgcggtacctcggtaccccaagggctgttgaaggcagcgaggaagagcggccagttaaacctgtcgggtagaaacctcagtgaagtgccgcagtgtgtctggagaataaatgtggatatccctgaggaagctaatcagaatctttcgtttggtgctactgaaagatggtgggagcagacagatttgaccaaactaataatatcaaacaataaacttcagtcacttacagatgacctgcgactcttgcctgcactgactgttcttgatatacatgataatcagttgacatcccttccttctgctataagagagctagaaaatcttcagaaacttaatgtcagccataataaactgaaaatactccctgaagaaattacaaacctaagaaacctgaagtgcctgtatctccagcataatgaattaacctgcatatcagagggatttgaacaactttccaatttagaagatttagatctttcaaacaatcatcttacaactgttcctgctagtttttcttctctgtccagtctggtgcgactcaatctttctagtaatgaactgaagagtttgccagcagaaataaatagaatgaaaaggttgaagcatttggattgtaattcaaatctcttggaaactatacctcctgaattggctggcatggaatcactagaattgctttatttgcggaggaataaattacgttttctaccagaatttccttcttgtagtctattgaaggaattgcacgtaggtgaaaaccagattgaaatgttagaggcagaacatcttaaacatctgaattcaattcttgtgctagacctgagggataacaagttaaaatctgttccagatgaaattatactactacggtccttggaaaggcttgacctaagcaacaatgatattagtagtcttccctattcattggggaaccttcatttgaaatttttggcattagaaggaaatcctttgagaacaattcgaagagaaattataagtaaaggaacacaagaagtcctaaaatatctacgaagcaagatcaaagatgatggacctagccaaagtgagtctgctactgagactgccatgacactaccaagtgaatccagagtcaatatacatgccatcattacattaaaaatattagactatagtgataaacaagcaactttgattcctgatgaggtgtttgatgcagtaaaaagcaacatcgtcacttctattaacttcagtaagaatcaactatgtgaaattccaaaaaggatggtagaactgaaggaaatggtttctgatgtcgatctcagttttaataaactttcctttatatccttggagttatgtgtgcttcagaaattgacttttttagatctcaggaacaattttttaaattctttgccagaagaaatggaatcactggtaagactgcaaacgatcaatctttcctttaataggtttaaaatgctacctgaagttctatatcgtatcttcacacttgaaacaattctgattagtaataatcaggttggatctgtggaccctcagaaaatgaagatgatggaaaatctgaccacgttggaccttcaaaataatgacctcttacaaattccaccagagctcggtaattgtgtaaacttaagaacattactactggatggaaatccattccgagttcctcgagcagccatattaatgaaaggaacagctgctatacttgaatatttgagagaccgaattcctacttaacatggagttgctttataacccttgtcatgtattattaaccctggttaattctaaggaggatgtaacatttgttttagtatcatcttaaaaggtgattattgtaattgatcttgtagtttcccagtatcacctacctgttggtataattagcctgggccatattcactgccagtaaatatttttacatttttatttaagatttttgtaaggtgttgtatacatttgtaatggtgataaccacaatgtgttcatacatttgttctaaatgttttgcttatgatttatcctgctaactttcattttcttatagcaagcagttttttcaaaaatgaatttttatttaatgtggttcagtattataataacaaagcatttttgtagaactggttttttttctcatttatttttgtattccatacaatgtgaccaattgacttgaatatgactagccagtttctatgtttttgttagatataaaattaaatcgaattttgttgaatactgttctttggcatttaaaaaataagaccttcttatcttgggccacatgtcaaaagaaaaaggaaacaaaaatatattaaaaataagacttttcattacccatgataggacttttgtgatatggctaatctcagtacacatttcaacttaaaacctttttatttacagcaccataattttaaaatttacttgcaatcttggtaagactaaacttgcagtgtttttctaaaagggaatttgataggtaaacttgatttaataaaaattaaatatcatttttgtttacaccaaaattatcagaagtaggttgattagtcattataacacttaccatatgattctattaagaagtcaattcagtagcatgtatatcaatttatatagataggtagatagcttttggatgattgaggcatgcttatattatgaaaaaaattgctaataaagataaatactacatgttcagaataaaagttacatttttcaaatattga

SEQ ID NO: 148093 - DNA, 2947 bp, Homo sapiens
  Payload ID: 9309
  Gene Symbol: LRRC41
  Gene Name: leucine rich repeat containing 41
  Uniprot ID: Q15345
  ENST ID: ENST00000343304
  CDS Start-End: 45-2483
ggcggtccgcgggcgacactctcgggctcgcgcacctccccaagatggcggcgcccgaggcctggcgcgcccggagttgctggttctgtgaggtagcggcggcaacgaccatggaggccacgtcccgggaggcggcgccagcgaagagctcggcctcgggccccaacgctccccccgccctgttcgagctgtgcgggcgggcggtgagcgcccatatgggggttctggagagcggggtgtgggccctcccaggcccaatacttcaaagcatcctacctctgctcaatatatattacttggagaggattgaggaaactgccctcaagaaaggcctctcaactcaggccatctggcgccgactctgggatgaactgatgaagacaaggccttccagtttggaaagtgtgacatgttggcgagccaagtttatggaggcctttttttcccatgttctacgtgggaccattgatgtgtcttctgacaggcgtctttgtgatcagcggttctcacctcttctgcacagctcccgccatgtccgacagctcaccatctgtaacatgctgcagggtgcaaccgagctggtggctgagcccaaccgcagggttctggagaccctggccagctccctgcacactctcaagttccgccacctgctgttctctgatgtggctgctcagcagtcacttcggcagctgttgcatcagctcattcaccatggggctgtcagtcaagtgtcgctatactcctggcctgtgcctgagtcagcccttttcatccttattctcaccatgagtgctggcttctggcaaccagggcctggtggcccaccctgccgcctctgtggagaggcctcccgaggccgggccccatcccgagatgaagggtccctcttattgggctcacgtcggccccgccgggatgctgctgagcgatgtgctgcagccctgatggccagccggcgtaagagtgaagccaagcagatgcccagagctgcacctgccactcgggtaacacgccggagcacacaggagagcctgacagcaggcggaacagaccttaagagggagctgcaccccccagccacctcccatgaggctcctggcaccaagcggtcaccttctgctccagcagccacctcctctgcctcttcttctacatcctcatacaaacgggcaccagctagctcagccccacagcctaagcccctaaagcgtttcaagcgagctgcagggaagaagggtgctcgcacccgtcaggggcctggtgcagagtctgaagacctgtatgacttcgtttttattgtggctggcgagaaggaggatggcgaagagatggagattggggaagtggcttgtggagctttggatggatcagatcccagctgcctggggcttccagcactggaagcttcacaaagattccgcagcatctccaccttggagctattcacagttccactctccacagaggcagccctgacactatgccacctgctgagctcctgggtgtcactggagagcctcacactctcctacaatggcctgggctctaacatcttccgcctgctagacagcctgcgggccctgtcaggccaggctggatgtcgcctccgtgccctgcatctcagtgacctgttctcaccactgcccatcctggagctgacacgtgctatcgtgcgagcactgcccctgctacgggtcctctctattcgtgttgaccacccaagccagcgggacaaccctggtgtgccagggaatgcagggccccctagccacataataggcgatgaggagataccagaaaactgcctggagcagttggagatgggatttccacggggagcccagccagccccactgctgtgctccgttctgaaggcctcgggttctctgcagcagctgtccctggatagtgccacctttgcctctccccaggattttgggcttgttttgcaaacactcaaagagtacaacctagccctgaaaagactgagcttccatgacatgaatctcgctgactgtcagagcgaggtgctctttttgctacagaatctgactctgcaagagattaccttctccttctgccgtctgtttgagaagcgcccagcccaatttctgcctgagatggttgctgctatgaagggcaactccacactgaagggcctccggctgccagggaaccgcctggggaatgctggcctgctggccttggcagatgttttctcagaggattcatcctcctctctctgtcagctggacatcagttccaactgcatcaagccagatgggcttctggagttcgccaagcggctggagcgctggggccgtggagcctttggtcacctgcgcctcttccaaaactggctggaccaggatgcagtcacagccagggaagccatccggcggctccgggctacctgccatgtggttagcgactcatgggactcatcccaggccttcgcagattatgttagcaccatgtgatggggcccgtacctcacagtctcatgctcggtaccatcagcttgcaggggctgaagcatgggctgcccagaaccccaaccaccagttctatctttctctttctgtcaccttttttctcttttttccttcttcccttgcactgaggtcctggaggccttgatgaggcccagcaaacaggcattctcacagctgggtttatagtctttgggccccttactcagtatcctgggaaccctgggccaggaggttacagtggtcatcataattgctgaagagatcccctcccctgcccctgggttcctgccttccctcctcaagcaggcacccaggctttagagaagtatagggggcttcttccctgctgggcttaccacactgctctcaggcctcaaaccctttcatacctttattcttttttttaaccaaaaaagtttttcttataaaataaattttgggcaaacatc

SEQ ID NO: 148094 - DNA, 4128 bp, Homo sapiens
  Payload ID: 9309
  Gene Symbol: LRRC41
  Gene Name: leucine rich repeat containing 41
  Uniprot ID: Q15345
  ENST ID: ENST00000617190
  CDS Start-End: 287-2725
atgtactaccagccgcaggcagaggttaggggtagctgatgtttgcacccgaggaggctttgctaagaaacatccccttagtcataccacacccaagtataattgatctaggagtttatctaaaatagtagctcctaagagacttggaaagtgtgctaatttcttcgaaatttctttagaataattcacattcttccccatatcgcttatggagccgtcctaactgctgaccttttcaagatggcggtccgcgggcgacactctcgggctcgcgcacctccccaagatggcggcgcccgaggcctggcgcgcccggagttgctggttctgtgaggtagcggcggcaacgaccatggaggccacgtcccgggaggcggcgccagcgaagagctcggcctcgggccccaacgctccccccgccctgttcgagctgtgcgggcgggcggtgagcgcccatatgggggttctggagagcggggtgtgggccctcccaggcccaatacttcaaagcatcctacctctgctcaatatatattacttggagaggattgaggaaactgccctcaagaaaggcctctcaactcaggccatctggcgccgactctgggatgaactgatgaagacaaggccttccagtttggaaagtgtgacatgttggcgagccaagtttatggaggcctttttttcccatgttctacgtgggaccattgatgtgtcttctgacaggcgtctttgtgatcagcggttctcacctcttctgcacagctcccgccatgtccgacagctcaccatctgtaacatgctgcagggtgcaaccgagctggtggctgagcccaaccgcagggttctggagaccctggccagctccctgcacactctcaagttccgccacctgctgttctctgatgtggctgctcagcagtcacttcggcagctgttgcatcagctcattcaccatggggctgtcagtcaagtgtcgctatactcctggcctgtgcctgagtcagcccttttcatccttattctcaccatgagtgctggcttctggcaaccagggcctggtggcccaccctgccgcctctgtggagaggcctcccgaggccgggccccatcccgagatgaagggtccctcttattgggctcacgtcggccccgccgggatgctgctgagcgatgtgctgcagccctgatggccagccggcgtaagagtgaagccaagcagatgcccagagctgcacctgccactcgggtaacacgccggagcacacaggagagcctgacagcaggcggaacagaccttaagagggagctgcaccccccagccacctcccatgaggctcctggcaccaagcggtcaccttctgctccagcagccacctcctctgcctcttcttctacatcctcatacaaacgggcaccagctagctcagccccacagcctaagcccctaaagcgtttcaagcgagctgcagggaagaagggtgctcgcacccgtcaggggcctggtgcagagtctgaagacctgtatgacttcgtttttattgtggctggcgagaaggaggatggcgaagagatggagattggggaagtggcttgtggagctttggatggatcagatcccagctgcctggggcttccagcactggaagcttcacaaagattccgcagcatctccaccttggagctattcacagttccactctccacagaggcagccctgacactatgccacctgctgagctcctgggtgtcactggagagcctcacactctcctacaatggcctgggctctaacatcttccgcctgctagacagcctgcgggccctgtcaggccaggctggatgtcgcctccgtgccctgcatctcagtgacctgttctcaccactgcccatcctggagctgacacgtgctatcgtgcgagcactgcccctgctacgggtcctctctattcgtgttgaccacccaagccagcgggacaaccctggtgtgccagggaatgcagggccccctagccacataataggcgatgaggagataccagaaaactgcctggagcagttggagatgggatttccacggggagcccagccagccccactgctgtgctccgttctgaaggcctcgggttctctgcagcagctgtccctggatagtgccacctttgcctctccccaggattttgggcttgttttgcaaacactcaaagagtacaacctagccctgaaaagactgagcttccatgacatgaatctcgctgactgtcagagcgaggtgctctttttgctacagaatctgactctgcaagagattaccttctccttctgccgtctgtttgagaagcgcccagcccaatttctgcctgagatggttgctgctatgaagggcaactccacactgaagggcctccggctgccagggaaccgcctggggaatgctggcctgctggccttggcagatgttttctcagaggattcatcctcctctctctgtcagctggacatcagttccaactgcatcaagccagatgggcttctggagttcgccaagcggctggagcgctggggccgtggagcctttggtcacctgcgcctcttccaaaactggctggaccaggatgcagtcacagccagggaagccatccggcggctccgggctacctgccatgtggttagcgactcatgggactcatcccaggccttcgcagattatgttagcaccatgtgatggggcccgtacctcacagtctcatgctcggtaccatcagcttgcaggggctgaagcatgggctgcccagaaccccaaccaccagttctatctttctctttctgtcaccttttttctcttttttccttcttcccttgcactgaggtcctggaggccttgatgaggcccagcaaacaggcattctcacagctgggtttatagtctttgggccccttactcagtatcctgggaaccctgggccaggaggttacagtggtcatcataattgctgaagagatcccctcccctgcccctgggttcctgccttccctcctcaagcaggcacccaggctttagagaagtatagggggcttcttccctgctgggcttaccacactgctctcaggcctcaaaccctttcatacctttattcttttttttaaccaaaaaagtttttcttataaaataaattttgggcaaacatcatgcagcccttcttgatgattttctcccagagaacaaaattcaacagggccctgtggagcaaggagccccttttccctatctccttcctctaagagctacacccagaccagctggttatcagcggaggccccgctgctcctcatgagaacgctggtggaagacgaaggtgatggcagtggaggcagcatcccaggcagcctggagtacctcatcccggagcccccacttatcagtgcagtggttccaccctgccaggtctgaagtgcagtcagaaccatcagggggtggccggatctgacggctgttgacacaacgtcggcagtgcaacctagggacagaaggcacagctgaagtcactacagatcccatctccctactgtgtgggtagcttagagataatggttagggcacttccccacctgtcatgtgtgtcactgaggctagcttcatccaggataaacagctccttcaactcgcccagagagaagtggcgctctacatcctgctcctcatccaccacacagctgctcagtgccttcttgtggctctgacgctggaagatcttctcctcaatggtccctgcctggggaagaggaggtggggaatgtcaaaagatacagcgcttagccatcctcataaaaagggagcaggaaaaccaaagggttgaaactacagctacccgagaagaggagatgaataaaaagtatgagtcccagaacattatctctactcagctgaggtccattttcccagtctgtctcctgagaacatgacatgaatagtctgcccacccaggctactttctatactaatgaagggtcccagggcctggctaaatcccgtcagggtgaactgaggtttgtctgctgcagcttcagatttctgcaccaagcccaactctaactcattcaataaatatcatttaggtatctattcta

SEQ ID NO: 148095 - DNA, 892 bp, Homo sapiens
  Payload ID: 9309
  Gene Symbol: LRRC41
  Gene Name: leucine rich repeat containing 41
  ENST ID: ENST00000496156
  CDS Start-End: 1-684
ccccctagccacataataggcgatgaggagataccagaaaactgcctggagcagttggagatgggatttccacggggagcccagccagccccactgctgtgctccgttctgaaggcctcgggttctctgcagcagctgtccctggatagtgccacctttgcctctccccaggattttgggcttgttttgcaaacactcaaagagtacaacctagccctgaaaagactgagcttccatgacatgaatctcgctgactgtcagagcgaggtgctctttttgctacagaatctgactctgcaagagattaccttctccttctgccgtctgtttgagaagcgcccagcccaatttctgcctgagatggttgctgctatgaagggcaactccacactgaagggcctccggctgccagggaaccgcctggggaatgctggcctgctggccttggcagatgttttctcagaggattcatcctcctctctctgtcagctggacatcagctggagttatactcccaaagacaaggcagggctcctctctgatgtggcaaacaaggctagattcttacctaggatgccggaattaacaaaatgtaccaagctgaaatactcaagcagatcattctggatgggagttccggagatgagcacccgccggctggtgttcaagctgtccagggcttgactgctgagagtcaagtacctcgtcacatatgaccagaccaacacttcctttctggaggactccaacatgaaggcggaaggtctcataggaaatgatgaggatgggagaagacaccctggctccacgctggttcatgaatccttctacaacagaaaaggtgtaaagggaacaattcagaatcttttgaaaaaaaaaaaaacaaaaaaaa

SEQ ID NO: 148096 - DNA, 4455 bp, Homo sapiens
  Payload ID: 9309
  Gene Symbol: LRRC41
  Gene Name: leucine rich repeat containing 41
  ENST ID: ENST00000472710
  CDS Start-End: 1652-3514
tttattttatttgtgagacagagtcttgctctgtcgcccaggctgaagtgcagtggcgccatctcggctcactgcagtctctacctcctgagttcaagtgattcttgtgcctcagcctcccaagtagctgggattacaggcgtgcatcattacacctggctaatttttgtatttttagtagagatggggtttcaccatgttggtcaggctggtctcaaactcctgacctcaagtgatctgcccgccttggcctcccaaagtgctggtattacaggtgtgaaccattgcatcccacctattttttattttttgaggcagggtcttgctctgtcatccaggctggagtgcagtggtctaagcacagctcacttcagcctcaacctcctgggctccagccatcctcccaccttagcctcccaagtagctgtgaccacaggtgcacaccatcacactctgctaatttttgttttgttttgagatagggttctcactgtgtcacctgggctcaagtacagtggtgtgatcatagctcactgtagcctcgaactcctgggcttaagcgatcctcttagcctcccaaagtgctgggattacaggtgtgaaccactgtgcccagcctccatttttttccagttgaagaaactaaggcttaaagaggcttaaataatttgtccaaggattcacatttaactaagtagttaggattgcactcagatttgtcctactctagaggccaaaccctttagacactatactataacagctcttagaactagagaagttggcaagagcaggttttgtttttaagatatattgactttagagacacgaattgtttctattcttcataggaaagtactagttcagaatatagcagtagcccaaaggatggtagtggttaatctggaaaaatggaaaaggaattcaggaaagacttaataaagggcatgtgatacttgaaagatgagtagttgatatactgaaagtggcaacgacattcctattagaacagcatgacaaaggacattcctattggaaagaacagcatgacaaaggtacaggggcagaaagcggcataatatgttaggtaaatgaaaaagtagttaagtgtggctgaaatgtaggaggcaaagcagggagctgatactagcagggcagattatgaaagaccttttatcacacatattcagtaggtccttttcaatgccaaatggttcattttgcttgggcagaagtgaactgaccagctcctaaataagcatgtcaagctcatttagcatgtcagcttgttttgtgggatgatctcacccttgcccctgaaattccagcttccaactgagtggctgaagataagtggactagagtttggaacagatctagattagcttctagaggttccatttgtcaaatgagaagtctacccttccattttcctttccagtagaataaataatgcttggaaacctcttgggtgggagggggaggggaggaaaagtaaacttttgttttgatttttgtagccctcccaggcccaatacttcaaagcatcctacctctgctcaatatatattacttggagaggattgaggaaactgccctcaagaaaggcctctcaactcaggccatctggcgccgactctgggatgaactgatgaagacaaggccttccagtttggaaagtgtgacatgttggcgagccaagtttatggaggcctttttttcccatgttctacgtgggaccattgatgtgtcttctgacaggcgtctttgtgatcagcggttctcacctcttctgcacagctcccgccatgtccgacagctcaccatctgtaacatgctgcagggtgcaaccgagctggtggctgagcccaaccgcagggttctggagaccctggccagctccctgcacactctcaagttccgccacctgctgttctctgatgtggctgctcagcagtcacttcggcagctgttgcatcagctcattcaccatggggctgtcagtcaagtgtcgctatactcctggcctgtgcctgagtcagcccttttcatccttattctcaccatgagtgctggcttctggcaaccagggcctggtggcccaccctgccgcctctgtggagaggcctcccgaggccgggccccatcccgagatgaagggtccctcttattgggctcacgtcggccccgccgggatgctgctgagcgatgtgctgcagccctgatggccagccggcgtaagagtgaagccaagcagatgcccagagctgcacctgccactcgggtaacacgccggagcacacaggagagcctgacagcaggcggaacagaccttaagagggagctgcaccccccagccacctcccatgaggctcctggcaccaagcggtcaccttctgctccagcagccacctcctctgcctcttcttctacatcctcatacaaacgggcaccagctagctcagccccacagcctaagcccctaaagcgtttcaagcgagctgcagggaagaagggtgctcgcacccgtcaggggcctggtgcagagtctgaagacctgtatgacttcgtttttattgtggctggcgagaaggaggatggcgaagagatggagattggggaagtggcttgtggagctttggatggatcagatcccagctgcctggggcttccagcactggaagcttcacaaagattccgcagcatctccaccttggagctattcacagttccactctccacagaggcagccctgacactatgccacctgctgagctcctgggtgtcactggagagcctcacactctcctacaatggcctgggctctaacatcttccgcctgctagacagcctgcgggccctgtcaggccaggctggatgtcgcctccgtgccctgcatctcagtgacctgttctcaccactgcccatcctggagctgacacgtgctatcgtgcgagcactgcccctgctacgggtcctctctattcgtgttgaccacccaagccagcgggacaaccctggtgtgccagggaatgcagggccccctagccacataataggcgatgaggagataccagaaaactgcctggagcagttggagatgggatttccacggggagcccagccagccccactgctgtgctccgttctgaaggcctcgggttctctgcagcagctgtccctggatagtgccacctttgcctctccccaggattttgggcttgttttgcaaacactcaaagagtacaacctagccctgaaaagactgagcttccatgacatgaatctcgctgactgtcagagcgaggtgctctttttgctacagaatctgactctgcaagagattaccttctccttctgccgtctgtttgagaagcgcccagcccaatttctgcctgagatggttgctgctatgaagggcaactccacactgaagggcctccggctgccagggaaccgcctgggtgggggccagaccctggggagggagaggggaaaggagctaggcctttgacctaaaaactcactggataaaggcaaagacctctccactgggaacgtgggagttggaatacagatatttctgtgctggggcttcaggaaccagcagggctggttctgccagccatagttgggttgggatacccttgtcccctgttcttgggtggaggtgataggcgttctccccttctctccagggaatgctggcctgctggccttggcagatgttttctcagaggattcatcctcctctctctgtcagctggacatcagttccaactgcatcaagccagatgggcttctggagttcgccaagcggctggagcgctggggccgtggagcctttggtcacctgcgcctcttccaaaactggctggaccaggatgcagtcacagccagggaagccatccggcggctccgggctacctgccatgtggttagcgactcatgggactcatcccaggccttcgcagattatgttagcaccatgtgatggggcccgtacctcacagtctcatgctcggtaccatcagcttgcaggggctgaagcatgggctgcccagaaccccaaccaccagttctatctttctctttctgtcaccttttttctcttttttccttcttcccttgcactgaggtcctggaggccttgatgaggcccagcaaacaggcattctcacagctgggtttatagtctttgggccccttactcagtatcctgggaaccctgggccaggaggttacagtggtcatcataattgctgaagagatcccctcccctgcccctgggttcctgccttccctcctcaagcaggcacccaggctttagagaagtatagggggcttcttccctgctgggcttaccacactgctctcaggcctcaaaccctttcatacctttattcttttttttaaccaaaaaagtttttcttataaaataaattttgggcaaac

SEQ ID NO: 148097 - DNA, 2068 bp, Homo sapiens
  Payload ID: 9309
  Gene Symbol: LRRC41
  Gene Name: leucine rich repeat containing 41
  ENST ID: ENST00000498402
  CDS Start-End: 19-1584
gtagcggcggcaacgaccatggaggccacgtcccgggaggcggcgccagcgaagagctcggcctcgggccccaacgctccccccgccctgttcgagctgtgcgggcgggcggtgagcgcccatatgggggttctggagagcggggtgtgggccctcccaggcccaatacttcaaagcatcctacctctgctcaatatatattacttggagaggattgaggaaactgccctcaagaaaggcctctcaactcaggccatctggcgccgactctgggatgaactgatgaagacaaggccttccagtttggaaagtgtgacatgttggcgagccaagtttatggaggcctttttttcccatgttctacgtgggaccattgatgtgtcttctgacaggcgtctttgtgatcagcggttctcacctcttctgcacagctcccgccatgtccgacagctcaccatctgtaacatgctgcagggtgcaaccgagctggtggctgagcccaaccgcagggttctggagaccctggccagctccctgcacactctcaagttccgccacctgctgttctctgatgtggctgctcagcagtcacttcggcagctgttgcatcagctcattcaccatggggctgtcagtcaagtgtcgctatactcctggcctgtgcctgagtcagcccttttcatccttattctcaccatgagtgctggcttctggcaaccagggcctggtggcccaccctgccgcctctgtggagaggcctcccgaggccgggccccatcccgagatgaagggtccctcttattgggctcacgtcggccccgccgggatgctgctgagcgatgtgctgcagccctgatggccagccggcgtaagagtgaagccaagcagatgcccagagctgcacctgccactcgggtaacacgccggagcacacaggagagcctgacagcaggcggaacagaccttaagagggagctgcaccccccagccacctcccatgaggctcctggcaccaagcggtcaccttctgctccagcagccacctcctctgcctcttcttctacatcctcatacaaacgggcaccagctagctcagccccacagcctaagcccctaaagcgtttcaagcgagctgcagggaagaagggtgctcgcacccgtcaggggcctggtgcagagtctgaagacctgtatgacttcgtttttattgtggctggcgagaaggaggatggcgaagagatggagattggggaagtggcttgtggagctttggatggatcagatcccagctgcctggggcttccagcactggaagcttcacaaagattccgcagcatctccaccttggagctattcacagttccactctccacagaggcagccctgacactatgccacctgctgagctcctgggtgtcactggagagcctcacactctcctacaatggtgagcaccctggagtggcagggattgggcttagattgcctagcagcaccagctgtgtgcctaattctagggaggtgggaggggcaaattgggggtatgatcaggaggttagagaggaaggcttgtatgcctcatagcaggggagactgtcattgctagaagagaggaacataaagtctatacacttgattagttgttgaaagcaggggttcctgaggggcagtgagacaagccagctggaatctgaagaatgaatacattttagatatggaaggcagtccaagggcaggtgggagcagtatagtatatgcatgctcaggcagggctagagtttgacctcaccacctcaccagtcatattttaagtattcttgataatttgatctaacaatcctcacaaccctatgagggcaagtgacttcctcaggataacctagcaattatagagctaggattcaaaacccaggcaaccagactgcagattcatgctttcaaacaactatgctactctcctttccaccgtctctctcctatcagcattttaacaggtctccatcaaaaactgccaccaccacctccctctatgccatattaataaactgttatctcctgttcttcacaa

SEQ ID NO: 148098 - DNA, 2158 bp, Homo sapiens
  Payload ID: 9309
  Gene Symbol: LRRC41
  Gene Name: leucine rich repeat containing 41
  ENST ID: ENST00000617760
  CDS Start-End: 1-1854
atgagtgctggcttctggcaaccagggcctggtggcccaccctgccgcctctgtggagaggcctcccgaggccgggccccatcccgagatgaagggtccctcttattgggctcacgtcggccccgccgggatgctgctgagcgatgtgctgcagccctgatggccagccggcgtaagagtgaagccaagcagatgcccagagctgcacctgccactcgggtaacacgccggagcacacaggagagcctgacagcaggcggaacagaccttaagagggagctgcaccccccagccacctcccatgaggctcctggcaccaagcggtcaccttctgctccagcagccacctcctctgcctcttcttctacatcctcatacaaacgggcaccagctagctcagccccacagcctaagcccctaaagcgtttcaagcgagctgcagggaagaagggtgctcgcacccgtcaggggcctggtgcagagtctgaagacctgtatgacttcgtttttattgtggctggcgagaaggaggatggcgaagagatggagattggggaagtggcttgtggagctttggatggatcagatcccagctgcctggggcttccagcactggaagcttcacaaagattccgcagcatctccaccttggagctattcacagttccactctccacagaggcagccctgacactatgccacctgctgagctcctgggtgtcactggagagcctcacactctcctacaatggcctgggctctaacatcttccgcctgctagacagcctgcgggccctgtcaggccaggctggatgtcgcctccgtgccctgcatctcagtgacctgttctcaccactgcccatcctggagctgacacgtgctatcgtgcgagcactgcccctgctacgggtcctctctattcgtgttgaccacccaagccagcgggacaaccctggtgtgccagggaatgcagggccccctagccacataataggcgatgaggagataccagaaaactgcctggagcagttggagatgggatttccacggggagcccagccagccccactgctgtgctccgttctgaaggcctcgggttctctgcagcagctgtccctggatagtgccacctttgcctctccccaggattttgggcttgttttgcaaacactcaaagagtacaacctagccctgaaaagactgagcttccatgacatgaatctcgctgactgtcagagcgaggtgctctttttgctacagaatctgactctgcaagagattaccttctccttctgccgtctgtttgagaagcgcccagcccaatttctgcctgagatggttgctgctatgaagggcaactccacactgaagggcctccggctgccagggaaccgcctggggaatgctggcctgctggccttggcagatgttttctcagaggattcatcctcctctctctgtcagctggacatcagttccaactgcatcaagccagatgggcttctggagttcgccaagcggctggagcgctggggccgtggagcctttggtcacctgcgcctcttccaaaactggctggaccaggatgcagtcacagccagggaagccatccggcggctccgggctacctgccatgtggttagcgactcatggactcatcccaggccttcgcagattatgttagcaccatgtgatggggcccgtacctcacagtctcatgctcggtaccatcagcttgcaggggctgaagcatgggctgcccagaaccccaaccaccagttctatctttctctttctgtcaccttttttctcttttttccttcttcccttgcactgaggtcctggaggccttgatgaggcccagcaaacaggcattctcacagctgggtttatagtctttgggccccttactcagtatcctgggaaccctgggccaggaggttacagtggtcatcataattgctgaagagatcccctcccctgcccctgggttcctgccttccctcctcaagcaggcacccaggctttagagaagtatagggggcttcttccctgctgggcttaccacactgctctcaggcctcaaaccctttcatacctttattcttttttttaaccaaaaaagtttttcttataaaataaattttgggcaaacatc

SEQ ID NO: 148099 - DNA, 2842 bp, Homo sapiens
  Payload ID: 9309
  Gene Symbol: LRRC41
  Gene Name: leucine rich repeat containing 41
  ENST ID: ENST00000615587
  CDS Start-End: 8-2380
aacgaccatggaggccacgtcccgggaggcggcgccagcgaagagctcggcctcgggccccaacgctccccccgccctgttcgagctgtgcgggcgggcggtgagcgcccatatgggggttctggagagcggggtgtgggccctcccaggcccaatacttcaaagcatcctacctctgctcaatatatattacttggagaggattgaggaaactgccctcaagaaaggcctctcaactcaggccatctggcgccgactctgggatgaactgatgaagacaaggccttccagtttggaaagtgtgacatgttggcgagccaagtttatggaggcctttttttcccatgttctacgtgggaccattgatgtgtcttctgacaggcgtctttgtgatcagcggttctcacctcttctgcacagctcccgccatgtccgacagctcaccatctgtaacatgctgcagggtgcaaccgagctggtggctgagcccaaccgcagggttctggagaccctggccagctccctgcacactctcaagttccgccacctgctgttctctgatgtggctgctcagcagtcacttcggcagctgttgcatcagctcattcaccatggggctgtcagtcaagtgtcgctatactcctggcctgtgcctgagtcagcccttttcatccttattctcaccatgagtgctggcttctggcaaccagggcctggtggcccaccctgccgcctctgtggagaggcctcccgaggccgggccccatcccgagatgaagggtccctcttattgggctcacgtcggccccgccgggatgctgctgagcgatgtgctgcagccctgatggccagccggcgtaagagtgaagccaagcagatgcccagagctgcacctgccactcgggtaacacgccggagcacacaggagagcctgacagcaggcggaacagaccttaagagggagctgcaccccccagccacctcccatgaggctcctggcaccaagcggtcaccttctgctccagcagccacctcctctgcctcttcttctacatcctcatacaaacgggcaccagctagctcagccccacagcctaagcccctaaagcgtttcaagcgagctgcagggaagaagggtgctcgcacccgtcaggggcctggtgcagagtctgaagacctgtatgacttcgtttttattgtggctggcgagaaggaggatggcgaagagatggagattggggaagtggcttgtggagctttggatggatcagatcccagctgcctggggcttccagcactggaagcttcacaaagattccgcagcatctccaccttggagctattcacagttccactctccacagaggcagccctgacactatgccacctgctgagctcctgggtgtcactggagagcctcacactctcctacaatggcctgggctctaacatcttccgcctgctagacagcctgcgggccctgtcaggccaggctggatgtcgcctccgtgccctgcatctcagtgacctgttctcaccactgcccatcctggagctgacacgtgctatcgtgcgagcactgcccctgctacgggtcctctctattcgtgttgaccacccaagccagcgggacaaccctggtgtgccagggaatgcagggccccctagccacataataggcgatgaggagataccagaaaactgcctggagcagttggagatgggatttccacggggagcccagccagccccactgctgtgctccgttctgaaggcctcgggttctctgcagcagctgtccctggatagtgccacctttgcctctccccaggattttgggcttgttttgcaaacactcaaagagtacaacctagccctgaaaagactgagcttccatgacatgaatctcgctgactgtcagagcgaggtgctctttttgctacagaatctgactctgcaagagattaccttctccttctgccgtctgtttgagaagcgcccagcccaatttctgcctgagatggttgctgctatgaagggcaactccacactgaagggcctccggctgccagggaaccgcctggggaatgctggcctgctggccttggcagatgttttctcagaggattcatcctcctctctctgtcagctggacatcagttccaactgcatcaagccagatgggcttctggagttcgccaagcggctggagcgctggggccgtggagcctttggtcacctgcgcctcttccaaaactggctggaccaggatgcagtcacagccagggaagccatccggcggctccgggctacctgccatgtggttagcgactcatgggactcatcccaggccttcgcagattatgttagcaccatgtgatggggcccgtacctcacagtctcatgctcggtaccatcagcttgcaggggctgaagcatgggctgcccagaaccccaaccaccagttctatctttctctttctgtcaccttttttctcttttttccttcttcccttgcactgaggtcctggaggccttgatgaggcccagcaaacaggcattctcacagctgggtttatagtctttgggccccttactcagtatcctgggaaccctgggccaggaggttacagtggtcatcataattgctgaagagatcccctcccctgcccctgggttcctgccttccctcctcaagcaggcacccaggctttagagaagtatagggggcttcttccctgctgggcttaccacactgctctcaggcctcaaaccctttcatacctttattcttttttttaaccaaaaaagtttttcttataaaataaattttgggcaaaca

SEQ ID NO: 148100 - DNA, 1727 bp, Homo sapiens
  Payload ID: 9310
  Gene Symbol: LRRC42
  Gene Name: leucine rich repeat containing 42
  Uniprot ID: Q9Y546
  ENST ID: ENST00000319223
  CDS Start-End: 212-1498
cttgctcccgcccccgccggtcccgcggtcccacggcgcctggttgcccccagccccctccctcctcccaccttcactgtgtcccacccttcctagctttgtgcccggggtgctgagcccttccccgtcagccgggccgcgggaggagggagccgtcaccgaggagctgccgctcgctgccccgggcaggggcacagttgcaaccaaggcaatgtcttactacctcagctcagaaaaccacctggacccagggcccatctacatgcgagaaaatgggcagctgcacatggtcaatctggctctggatggtgtcaggagtagcctgcagaagccaaggcctttcagactgttccccaaaggcttttctgtggagctttgcatgaacagggaagacgacactgcacggaaagagaagactgatcatttcatcttcacatacacccgagaggggaatcttcggtactccgccaaatccctcttcagccttgtcctgggtttcatctccgacaatgtggatcacattgattcccttattggctttcctgagcagattgctgaaaagctgttctctgctgctgaagccagacagaaattcactgagccaggtgcagggctgagggctttacagaaattcactgaggcctatggaagtttggtgctttgctccctgtgtttgcgaaacaggtatctcgtgatttcagaaaagcttgaggagattaagtctttccgggagctgacctgcctggatctttcctgttgcaagcttggagatgagcatgaacttctagaacatctcaccaatgaagccctgtctagtgtaactcagctccacctgaaggataattgtttatctgatgctggggtgcggaagatgacagcaccagttcgagtgatgaaaagaggccttgagaatctaacattattagacttatcatgtaaccctgagatcacagatgcaggcattggatacctcttttcttttaggaaactaaactgcttagatatctctgggacagggctcaaggacatcaaaaccgtcaagcacaagctccagacccacataggccttgttcactccaaagtgcctttgaaggaatttgatcatagtaactgcaagacagagggctgggctgaccagatcgttctgcagtgggagcgtgtgactgcggaagctgtgaagccacgggagacctcggagcctagagcagcagctcagcgcttctatgggaagcggtctcgagcagaagccccactgaagtgtcccctggcagacacccacatgaactcttccgagaaactccagttctataaagagaaagccccagattgccatgggccagtgttgaaacacgaagctatctcaagccaggagtcaaagaagagcaagaagagaccttttgaggagtcagagacagaacagaataactcttcacaaccttcaaagcagaaatatgtatgtcttgctgtggaagactgggacttgttaaattcctattgattagtagatacaagttgacctttctctggcccccagctctagtgtttgagtaaaggagactgaggatgatttactttttgtttgaatttacctatggcattagcatagtaagcagatatttctacttttgtggtgtgggaggggaatgctatggaagtatgtaataatttctaatgtatattttcaatacatagtaattttttcaaataaacatttttgctgtccttaa

SEQ ID NO: 148101 - DNA, 838 bp, Homo sapiens
  Payload ID: 9310
  Gene Symbol: LRRC42
  Gene Name: leucine rich repeat containing 42
  ENST ID: ENST00000371368
  CDS Start-End: 262-838
gcgggccaagatgcgaaaccactcctctttgtgcccggggtgctgagcccttccccgtcagccgggccgcgggaggagggagccgtcaccgaggagctgccgctcgctgccccgggcaggggcacaggttgatgtcatatttttagtcttgagaaacagcatcatgccaaggaaagagcttgagctttggagtaatgcggccctgagattgaattctggctctgccacttattagctctgttctagattgcaaccaaggcaatgtcttactacctcagctcagaaaaccacctggacccagggcccatctacatgcgagaaaatgggcagctgcacatggtcaatctggctctggatggtgtcaggagtagcctgcagaagccaaggcctttcagactgttccccaaaggcttttctgtggagctttgcatgaacagggaagacgacactgcacggaaagagaagactgatcatttcatcttcacatacacccgagaggggaatcttcggtactccgccaaatccctcttcagccttgtcctgggtttcatctccgacaatgtggatcacattgattcccttattggctttcctgagcagattgctgaaaagctgttctctgctgctgaagccagacagaaattcactgagccaggtgcagggctgagggctttacagaaattcactgaggcctatggaagtttggtgctttgctccctgtgtttgcgaaacaggtatctcgtgatttcagaaaagcttgaggagattaagtctttccgggagctgacctgcctggatctttcctgttgcaagcttggagatgagcatgaacttctag

SEQ ID NO: 148102 - DNA, 2037 bp, Homo sapiens
  Payload ID: 9310
  Gene Symbol: LRRC42
  Gene Name: leucine rich repeat containing 42
  Uniprot ID: Q9Y546
  ENST ID: ENST00000371370
  CDS Start-End: 522-1808
attacttcgcgggccaagatgcgaaaccactcctgtgcgcctttccccaggccagtcccggggcgcgcgctgcctaccctcccccagctcagctctatccccggggcccgcaggacccaggggacccaccctcccgcgagcacgcacgcgcagggcccacctctgcgagttccaaaccctcggccctcgggtcgcctgccctgggcctggccccgcctccaggtccggccccgccttcgtgccggggcccgcgcacgcgcgcctccccggcccagccttgctcccgcccccgccggtcccgcggtcccacggcgcctggttgcccccagccccctccctcctcccaccttcactgtgtcccacccttcctagctttgtgcccggggtgctgagcccttccccgtcagccgggccgcgggaggagggagccgtcaccgaggagctgccgctcgctgccccgggcaggggcacaggcttcatccagtgaatactagagggatcgaacagttgcaaccaaggcaatgtcttactacctcagctcagaaaaccacctggacccagggcccatctacatgcgagaaaatgggcagctgcacatggtcaatctggctctggatggtgtcaggagtagcctgcagaagccaaggcctttcagactgttccccaaaggcttttctgtggagctttgcatgaacagggaagacgacactgcacggaaagagaagactgatcatttcatcttcacatacacccgagaggggaatcttcggtactccgccaaatccctcttcagccttgtcctgggtttcatctccgacaatgtggatcacattgattcccttattggctttcctgagcagattgctgaaaagctgttctctgctgctgaagccagacagaaattcactgagccaggtgcagggctgagggctttacagaaattcactgaggcctatggaagtttggtgctttgctccctgtgtttgcgaaacaggtatctcgtgatttcagaaaagcttgaggagattaagtctttccgggagctgacctgcctggatctttcctgttgcaagcttggagatgagcatgaacttctagaacatctcaccaatgaagccctgtctagtgtaactcagctccacctgaaggataattgtttatctgatgctggggtgcggaagatgacagcaccagttcgagtgatgaaaagaggccttgagaatctaacattattagacttatcatgtaaccctgagatcacagatgcaggcattggatacctcttttcttttaggaaactaaactgcttagatatctctgggacagggctcaaggacatcaaaaccgtcaagcacaagctccagacccacataggccttgttcactccaaagtgcctttgaaggaatttgatcatagtaactgcaagacagagggctgggctgaccagatcgttctgcagtgggagcgtgtgactgcggaagctgtgaagccacgggagacctcggagcctagagcagcagctcagcgcttctatgggaagcggtctcgagcagaagccccactgaagtgtcccctggcagacacccacatgaactcttccgagaaactccagttctataaagagaaagccccagattgccatgggccagtgttgaaacacgaagctatctcaagccaggagtcaaagaagagcaagaagagaccttttgaggagtcagagacagaacagaataactcttcacaaccttcaaagcagaaatatgtatgtcttgctgtggaagactgggacttgttaaattcctattgattagtagatacaagttgacctttctctggcccccagctctagtgtttgagtaaaggagactgaggatgatttactttttgtttgaatttacctatggcattagcatagtaagcagatatttctacttttgtggtgtgggaggggaatgctatggaagtatgtaataatttctaatgtatattttcaatacatagtaattttttcaaataaacatttttgctgtccttaa

SEQ ID NO: 148103 - DNA, 1044 bp, Homo sapiens
  Payload ID: 9310
  Gene Symbol: LRRC42
  Gene Name: leucine rich repeat containing 42
  ENST ID: ENST00000444987
  CDS Start-End: 327-1044
tcccgcccccgccggtcccgcggtcccacggcgcctggttgcccccagccccctccctcctcccaccttcactgtgtcccacccttcctagctttgtgcccggggtgctgagcccttccccgtcagccgggccgcgggaggagggagccgtcaccgaggagctgccgctcgctgccccgggcaggggcacaggttgatgtcatatttttagtcttgagaaacagcatcatgccaaggaaagagcttgagctttggagtaatgcggccctgagattgaattctggctctgccacttattagctctgttctagattgcaaccaaggcaatgtcttactacctcagctcagaaaaccacctggacccagggcccatctacatgcgagaaaatgggcagctgcacatggtcaatctggctctggatggtgtcaggagtagcctgcagaagccaaggcctttcagactgttccccaaaggcttttctgtggagctttgcatgaacagggaagacgacactgcacggaaagagaagactgatcatttcatcttcacatacacccgagaggggaatcttcggtactccgccaaatccctcttcagccttgtcctgggtttcatctccgacaatgtggatcacattgattcccttattggctttcctgagcagattgctgaaaagctgttctctgctgctgaagccagacagaaattcactgagccaggtgcagggctgagggctttacagaaattcactgaggcctatggaagtttggtgctttgctccctgtgtttgcgaaacaggtatctcgtgatttcagaaaagcttgaggagattaagtctttccgggagctgacctgcctggatctttcctgttgcaagcttggagatgagcatgaacttctagaacatctcaccaatgaagccctgtctagtgtaactcagctccacctgaaggataattgtttatctgatgctggggtgcggaagatgacagcaccagttcgagtgatgaaaagaggccttgagaatctaacattattagact

SEQ ID NO: 148104 - DNA, 2028 bp, Homo sapiens
  Payload ID: 9311
  Gene Symbol: LRRC43
  Gene Name: leucine rich repeat containing 43
  Uniprot ID: Q8N309
  ENST ID: ENST00000339777
  CDS Start-End: 29-1999
gcggttgccgggcaacgcggcccgggccatggaggcgtcgtacgagtccgagtccgagtccgagtctgaggccgggcctgggactcagcggcccgggaccgggaccgtgagcgcggccgtgcgcgagcacttgcggaagctgtgtctgcgcgagttcccgtgcggtgccggcagctggaataagtcgcgctttcttcctcaaacttggcgaacttggagggagcttgtccccagagaggaggatgtggtgagccccggagaggagacggtggaggccctgctgggcctggtccgcagccgccactccccctgggctctgctgaacaactcgaatgcagaagacagtttcctgagagaattggccatccggaacccgctgacgatcacagacaccttcttctactcctacttccggtccctgcgggtaatagacaagaaggtcaccctggtggataaagacctcctgaaatttctaaagctggaggagttggtactgagcgccaatcgaatcaaggaggtggatgccaccaatctgccccccacactcaaggtgctggagctctacggcaatgagatcagcagcatggagtgtctgtgtgcccacccacccgccggcctgcagcacttggggttaggccacaacaaacttctaggccccttggaaagtctctacgtcaccgctaatcactggcccaacctcgtctccctggacctgggcttcaacgacctgacagacctgcagagcatggtcaccagcctgaggaccctccggcacctgcgactcctggtgctgcagggaaacccactggccttggtgccctactaccgcggcctcaccatcgacagcctggcccagctctgcgtgctggacgacatcaccgtgtctcccaatgagaagcatctcttccgggggctcagcctcaatggcgatctcttggcacaggaggcgcagtttgtggtgaccatcggaaacatcagaggagtcctggacacctctgtcttagacccggaacccaggcccgaaggccctttcatcacttacaactattacgtgacctatgattttgtgaaagatgaagaaggcgaaatgaatgagtccgcgggcgtcctggccgagatcgtcaagccctctcccagcttagaattattagttgaggaatctcctgaagaggtcgtggaagacgtcatcgaagacattgttgaagaggttactgaagaggtcgaagggtctctggagtctgaggtggaggagtcaggagagtcggagctgtctgtcatctcggggccttcgaccatcttgcagatgccgagggcctctgcagaagagctggccaagttgaggctgcgtatagatccccggctctgcccgtccccagggactgtcctcttcagcactgcccacaagccctgggctgaggtcatcccctgcagttacgagatgcagcactctctcagggacctggtcccactgaaggccttcctgctggcggggaccaccgtgaccatcgtggaggagaagattctctcctggcctgtggtgctacctgctgttgacagtcccctgtctgccaagaaaggaaagggggagaaagacaagaaagggaaggagaaagacaggacggggaaaggagagaaagagccggccaaggagtggaaggtgctgaagaagaagaaagagccgcccaaggagctccggcaggacccccccatcctccaggtgctgggccggggcctggtgatcctggagcccctgctcgccggggagcccctggtgtccaccgtgtgcaacttcggcgtggtccgcacattgacatctgacaggctgacgttggccagggattcaaagaagattaagaaagttgccaaaaaagaaaagccgaaagccgtgattccgatctacgaaggcgattaccaccctgagcccctgaccgtagaggtgcagatccagctgaaccagtgccgctcggcggaggaggctctgcgcatgttcgccgtgtagggcgtgggcagtaaaggctgttcccagca

SEQ ID NO: 148105 - DNA, 891 bp, Homo sapiens
  Payload ID: 9311
  Gene Symbol: LRRC43
  Gene Name: leucine rich repeat containing 43
  ENST ID: ENST00000537729
  CDS Start-End: 451-891
caatgaggtcgccactagccactgcagctgtcgagcacgcaagataataagtcgcgctttcttcctcaaacttggcgaacttggagggagcttgtccccagagaggaggatgtggtgagccccggagaggagacggtggaggccctgctgggcctggtccgcagccgccactccccctgggctctgctgaacaactcgaatgcagaagacagtttcctgagagaattggccatccggaacccgctgacgatcacagacaccttcttctactcctacttccggtccctgcgggtaatagacaagaaggtcaccctggtggataaagacctcctgaaatttctaaagctggaggagttggtactgagcgccaatcgaatcaaggaggtggatgccaccaatctgccccccacactcaaggtgctggagctctacggcaatgagatcagcagcatggagtgtctgtgtgcccacccacccgccggcctgcagcacttggggttaggccacaacaaacttctaggccccttggaaagtctctacgtcaccgctaatcactggcccaacctcgtctccctggacctgggcttcaacgacctgacagacctgcagagcatggtcaccagcctgaggaccctccggcacctgcgactcctggtgctgcagggaaacccactggccttggtgccctactaccgcggcctcaccatcgacagcctggcccagctctgcgtgctggacgacatcaccgtgtctcccaatgagaagcatctcttccgggggctcagcctcaatggcgatctcttggcacaggaggcgcagtttgtggtgaccatcggaaacatcagaggagtcctggacacctctgtcttagacccggaacccaggcccgaa

SEQ ID NO: 148106 - DNA, 2701 bp, Homo sapiens
  Payload ID: 9312
  Gene Symbol: LRRC45
  Gene Name: leucine rich repeat containing 45
  Uniprot ID: Q96CN5
  ENST ID: ENST00000306688
  CDS Start-End: 343-2355
cttgttcttcctggatactgaggccccgacgcggctgtcgcgagggcgggggtcggggctgcaggcggggcagggctgggtgggggcgcgcgacgcacctgcctgcttcctgcacgggtggtccccaagcactgcggggccccagcccaaagcggaccttgactaccgcccagccccgcgctcccaggacctcccgcccgcggagcccactcggattgctctccgcccgggtcggcggaggccccgtctcctgtacccggcgctgggactgctccgcaccgcgcggctccctttcagcagctgcgggagcatgcggaggaggccctgccggccccgcgggtcatggaggagttccggcgctcctacagccgcctgtgcagggagagtggggccgagccccaggaggctgtcctgcagcagctgcaccagcttcccaggggccggctggacctggccacgcaaagcctgacggtggagacctgcagggccctgggcaagctgctgccgagggagacgctgtgcacggagctggtcctgagtgactgcatgctcagcgaggaaggggccacactgctgctccgaggcctgtgtgccaacaccgtgctgcgctttctggacttaaagggcaacaaccttcgggctgcaggggccgaggctctgggaaaactcctccaacagaacaagtccattcagagcctcacgctggagtggaacagcctgggcacgtgggacgatgccttcgccaccttctgcgggggcctggcggccaacggcgccctgcagcggctggacctccgcaacaaccagatcagtcacaagggcgcggaggagctggccctagccctgaagggcaacaccaccctccagcagctggacctgcgctggaataacgttggcctcctggggggccgggccctcatgaactgtctccccagcaacagaaccctgtggagactggacctggctgggaacaacatccctggagacgtcctcagagccgtggagcaagccatgggccacagccaggaccggctcaccaccttccaggagaaccaagcccgcactcacgtcctcagcaaggaggtccagcacctccgggaggagaagtccaagcagttcctcgacttgatggagactattgataagcagcgagaagagatggccaagagcagcagggcgtcggcagcccgtgtagggcagcttcaggaagccctgaatgagaggcactccatcatcaacgctctcaaggccaagctgcagatgacagaggccgccctggctctgtcggagcagaaggcccaggacctgggggagctcctggccacagcggagcaggagcagctgagcctgtcacagaggcaggccaaggagctcaagctggagcagcaggaagctgcagagcgggagtctaaactcctcagagacttgtctgctgccaatgaaaagaacctgcttctgcaaaaccaggtagacgagttggagcggaagttcaggtgtcagcaggagcagctgttccagaccaggcaggagatgaccagcatgtcagctgagctgaagatgcgggccatccaggccgaggagcgcctggacatggagaagagaagatgcagacagagcctggaggactccgaaagcctgcgcatcaaggaggtggagcatatgacccgtcacctggaggagagtgagaaggccatgcaggagcgggtgcagaggctggaggcggcgcggctgtccctggaggaggagctgagccgagtgaaagcagcggcactcagcgagcgtggccaggctgaggaggagctgatcaaggccaagagccaggcccgcctggaggagcaacagcgcctggctcacctggaggacaagctgagactgctggcgcaggcacgggacgaggcgcagggcgcttgcctacagcagaagcaggtggtggccgaggcccagacccgggtcagccagctgggcctgcaagttgagggcctgcggcggcgcctggaagagctgcagcaggagctgagcctcaaggaccaggaaagggtggccgaggtgagcagggtgcgcgtggagctgcaggagcagaacggccggctgcaggcggagctggcggctcaggaggcgctgagggagaaggcggcggccctggagcgccagctgaaagtgatggcgagcgaccaccgagaggcgctgctggacagggagagcgagaacgcgtctctccgggagaagctgcggctccgggaggcggagatcgcccgcatccgggacgaggaggcccagagggcgagcttcctgcagaacgccgtcctggcttacgtgcaggcgtcccccgtgaggaccctgagccccccaaagtgagacaggccgggaggacccgggcgcagtaggagtgcatcaggcggcgcccgagatggaccaggggctgcgtcccgcccgcgccgcctctttgagacccgggtcgtctgttccacgcggcggttgcggcgactgttggtggtgtcgcggctgcgggggaaccccgtgggaggcgcctgggaagggctccctaccggccccttcttcccggtcgacgccacgtgggagcacaccgggaaggggtcccgcgggcgcgtctccccctcgccttttgcgatgtcaccgtgaacgctgcggccgcctgcgcgcggcggggtttggaaatacagcgcgtttgcactttgtgata

SEQ ID NO: 148107 - DNA, 730 bp, Homo sapiens
  Payload ID: 9312
  Gene Symbol: LRRC45
  Gene Name: leucine rich repeat containing 45
  ENST ID: ENST00000577638
  CDS Start-End: 713-730
ggcagcccgaggtcgcttcctctccaggctctccaatttctgtgccgtagttaaagcgagcaggggcgccccttcctgcacctgggagtagagggcagttcctctgtatgacgggggagaggccttaacattcgcggtcttacctggttccccgcgtgcagagccggcttggtgcctggcaggggctgcaggtgtttcaaacatgacttcgcagcgagactcttggccagcgccaacccagaccatcgggacagttgtcccttcctgggtctagggagctgccctgaaaaggggcccacggggagggccttggggtcagcaggggcagagagtgaccgccggccccccttacacaggggccacactgctgctccgaggcctgtgtgccaacaccgtgctgcgctttctggacttaaagggcaacaaccttcgggctgcaggggccgaggctctgggaaaactcctccaacagaacaagtccattcagagcctcacgctggagtggaacagcctgggcacgtgggacgatgccttcgccaccttctgcgggggcctggcggccaacggcgccctgcagcggctggacctccgcaacaaccagatcagtcacaagggcgcggaggagctggccctagccctgaagggcaacaccaccctccagcagctggacctgcgctggaataacgttggcctcctggggggccgggccctcatgaactgtctccccagc

SEQ ID NO: 148108 - DNA, 1145 bp, Homo sapiens
  Payload ID: 9312
  Gene Symbol: LRRC45
  Gene Name: leucine rich repeat containing 45
  ENST ID: ENST00000581227
  CDS Start-End: 1-566
agcagttcctcgacttgatggagactattgataagcagcgagaagagatggccaagagcagcagggcgtcggcagcccgtgtagggcagcttcaggaagccctgaatgagaggcactccatcatcaacgctctcaaggccaagctgcagatgacagaggccgccctggctctgtcggagcagaaggcccaggacctgggggagctcctggccacagcggagcaggagcagctgagcctgtcacagaggcaggccaaggagctcaagctggagcagcaggaagctgcagagcgggagtctaaactcctcagagacttgtctgctgccaatgaaaagaacctgcttctgcaaaaccaggtagacgagttggagcggaagttcaggtgtcagcaggagcagctgttccagaccaggcaggagatgaccagcatgtcagctgagctgaagatgcgggccatccaggccgaggagcgcctggacatggagaagagaagatgcagacagagcctggaggactccgaaagcctgcgcatcaaggagggtggggagtccgtgaggagaaggtagggaggcccgctctccactctggccccacaatccctgcccctgagcaggtggagcatatgacccgtcacctggaggagagtgagaaggccatgcaggagcgggtgcagaggctggaggcggcgcggctgtccctggaggaggagctgagccgagtgaaagcagcggcactcagcgagcgtggccaggctgaggaggagctgatcaaggccaagagccaggcccgcctggaggagcaacagcgcctggctcacctggaggacaagctgagactgctggcgcaggcacgggacgaggcgcagggcgcttgcctacagcagaagcaggtggtggccgaggcccagacccgggtcagccagctgggcctgcaagttgagggcctgcggcggcgcctggaagagctgcagcaggagctgagcctcaaggaccaggaaagggtggccgaggtgagcagggtgcgcgtggagctgcaggagcagaacggccggctgcaggcggagctggcggctcaggaggcgctgagggagaaggcggcggccctggagcgccagctgaaagtgatggcgagcgaccaccgagagg

SEQ ID NO: 148109 - DNA, 1922 bp, Homo sapiens
  Payload ID: 9313
  Gene Symbol: LRRC46
  Gene Name: leucine rich repeat containing 46
  Uniprot ID: Q96FV0
  ENST ID: ENST00000269025
  CDS Start-End: 364-1329
gcatgcgctaggccgggccaacggagcccgcctttacctccccactcggcgtccagtctcttagcaacgactccggcttcctaggaactgctcctttctcaaccattcctgcccacaacaccccagcttgctgccagcaaagcccctccacacccctcaaactccagacccttcacatcaatttactgttttcttcgacctcaccccagcaattttctctgaatcaaccccctttcctcctctcctaagtctctgagtttctctctcctcctgccatcctgagttctgccatccttaggggccgccaagacctctcttttcgttcctctcccgcctcagaccagcagccttttattttagatcatgtctggagggaagtcagcccagggtccagaggaagggggcgtctgcatcactgaagcccttatcactaagcggaacttgactttccctgaagatggggaactgtcagagaagatgtttcacactcttgatgaactgcagactgtccgcctggaccgggaggggattactactatcaggaacttagaaggcctccagaatcttcacagtctctatctgcaagggaataagatccagcaaattgagaacctggcttgcatcccctccttgcgcttcctgtctctggcaggaaaccaaatcaggcaggtggaaaacctcctcgacctcccatgcctccagtttctggacctttctgagaacctgatagaaacattgaagctggatgagttcccccagagccttctcatcctcaacctgtctggaaacagctgcaccaaccaggatggctaccgcgagctggtgacagaagccctgccacttctcctggacctggacgggcagcctgtggtggagcgctggatttcggatgaggaggatgaagcctcaagcgatgaggagttcccagagctgagtggcccattctgctcagaacgaggcttcctcaaggagctggagcaggagctgagcaggcacagggagcaccggcaacagacggccctgacagagcacctgctgaggatggagatgcagcccaccctcaccgacctgcccctgctacctggggtgcccatggctggggacagcagcccttctgccactcctgcgcaaggggaggagacagtccctgaggccgtctcctcaccccaggcctcctctcccaccaagaaaccatgcagtctgattcccaggggccaccaaagctctttctggggaaggaagggggcacgagcagccacagcccccaaggcctctgtggctgaggcccccagcacaaccaaaactacggccaagagaagcaagaaatgattctctgtcaacctttctctactagtggagaggagtggggcctgcccctcttctcagacctctgacctgtgacagaagcccatccccagtaaagtgtctctaggccctgagtatgcttttcatgtcacttggggtatctcaggggaagaaaccagtgaaagctccaggaaacaaaatacagagctcagtgagccacctgattctaaagagcgagtctggaatctttcgggagctacccacagggcaggcatgcctcaggcccccgctggcttcctggctcccacttgggcaggaagcgggcaccacctcatggaagaggcatgccatctcactgccacccctagcgagtgcccttccccggtccaagccaaggaccaaggagctgtggtcctagtcatccccaacagcagccagctcctgtcccctccctgtcctcctgcccagtccccatcactcacccactcataggaatgagtacacaaccacaggccccgcagccagcccacagctgcctttgggcctcacttggctctcccacccccactggtcctgggataaagttcactgaagagaaaataaagcacatttattaa

SEQ ID NO: 148110 - DNA, 872 bp, Homo sapiens
  Payload ID: 9313
  Gene Symbol: LRRC46
  Gene Name: leucine rich repeat containing 46
  ENST ID: ENST00000579971
  CDS Start-End: 300-596
caacgactccggcttcctaggaactgctcctttctcaaccattcctgcccacaacaccccagcttgctgccagcaaagcccctccacacccctcaaactccagacccttcacatcaatttactgttttcttcgacctcaccccagcaattttctctgaatcaaccccctttcctcctctcctaagtctctgagtttctctctcctcctgccatcctgagttctgccatccttaggggccgccaagacctctcttttcgttcctctcccgcctcagaccagcagccttttattttagatcatgtctggagggaagtcagcccagggtccagaggaagggggcgtctgcatcactgaagcccttatcactaagcggaacttgactttccctgaagatggggaactgtcagagaagatgtttcacactcttgatgaactgcagactgtccgcctggaccgggaggggattactactatcaggaacttagaaggcctccagaatcttcacagtctctatctgcaagggctccagcccatttcctgttttgaagaagaggaaactatgaagattcctgtacatcattcagatcctacttgaaggctgtttggtggtggtggtggtggttggttgatcttcagccttcccctgaataagatccagcaaattgagaacctggcttgcatcccctccttgcgcttcctgtctctggcaggaaaccaaatcaggcaggtggaaaacctcctcgacctcccatgcctccagtttctggacctttctgagaacctgatagaaacattgaagctggatgagttcccccagagccttctcatcctcaacctgtctggaaacagctgcaccaaccaggatggctac

SEQ ID NO: 148111 - DNA, 2239 bp, Homo sapiens
  Payload ID: 9313
  Gene Symbol: LRRC46
  Gene Name: leucine rich repeat containing 46
  ENST ID: ENST00000584580
  CDS Start-End: 268-411
tctcaaccattcctgcccacaacaccccagcttgctgccagcaaagcccctccacacccctcaaactccagacccttcacatcaatttactgttttcttcgacctcaccccagcaattttctctgaatcaaccccctttcctcctctcctaagtctctgagtttctctctcctcctgccatcctgagttctgccatccttaggggccgccaagacctctcttttcgttcctctcccgcctcagaccagcagccttttattttagatcatgtctggagggaagtcagcccagggtccagaggaagggggcgtctgcatcactgaagcccttatcactaagcggaacttgactttccctgaagatggggaactgtcagagaagatgcactcagcaatgttgtggaatgaatgaatgggtggatggaacaagtgcttttttctccatgaacgactcaaaaggaaggtttcacactcttgatgaactgcagactgtccgcctggaccgggaggggattactactatcaggaacttagaaggcctccagaatcttcacagtctctatctgcaaggggtaacttctttctccacccttcccctccccttgacccctgtggacctaatctgtctcatctgaaaggagccaaccaggtcatcctgcccattccctggtgttcaggcaggcagaccttcatttaaaccattcccagacgaatgacatagggtcctgaattgaaaaactaattccctcaaaatagatcctgaacatgacctgtgctccttccactgttctttaggcacttctcttgatctagaagttctttttggcatctactctaaatctttcacgttaaatagctccagcccatttcctgttttgaagaagaggaaactatgaagattcctgtacatcattcagatcctacttgaaggctgtttggtggtggtggtggtggttggttgatcttcagccttcccctggttgagtattcccagctcgcttcaactttccccatagaaactttaaccgtcaagttcctgtatgctcattgttctctctgtgtatgcaagccaccaccaaggccctttccgttttcctggtggcttcttagtttccttttctgattcccaggtcactctttggttgtggaatcagaagagtatacgtagtcaggtttagataccccaggtttacacccttaaccatccacatggggaaagaaaatcatctttcttaaggtagtggcaacctgttcaaggagtggggtgatcattcccaaagtgccagatctccagctgcagagtagacatggtcttggggctttgtccccgtaaagggcccctgacgcatctgatctcagcttggtttccccacttcggtttcttcttgcagaataagatccagcaaattgagaacctggcttgcatcccctccttgcgcttcctgtctctggcaggaaaccaaatcaggcaggtggaaaacctcctcgacctcccatgcctccagtttctggacctttctgagaacctgatagaaacattgaagctggatgagttcccccagagccttctcatcctcaacctgtctggaaacagctgcaccaaccaggatggctaccgcgagctggtgacagaagccctgccacttctcctggacctggacgggcagcctgtggtggagcgctggatttcggatgaggaggatgaagcctcaagcgatgaggagttcccagagctgagtggcccattctgctcagaacgaggcttcctcaaggagctggagcaggagctgagcaggcacagggagcaccggcaacagacggccctgacagagcacctgctgaggatggagatgcagcccaccctcaccgacctgcccctgctacctggggtgcccatggctggggacagcagcccttctgccactcctgcgcaaggggaggagacagtccctgaggccgtctcctcaccccaggcctcctctcccaccaagaaaccatgcagtctgattcccaggggccaccaaagctctttctggggaaggaagggggcacgagcagccacagcccccaaggcctctgtggctgaggcccccagcacaaccaaaactacggccaagagaagcaagaaatgattctctgtcaacctttctctactagtggagaggagtggggcctgcccctcttctcagacctctgacctgtgacagaagcccatccccagtaaagtgtctctaggccct

SEQ ID NO: 148112 - DNA, 847 bp, Homo sapiens
  Payload ID: 9313
  Gene Symbol: LRRC46
  Gene Name: leucine rich repeat containing 46
  ENST ID: ENST00000579742
  CDS Start-End: 357-500
ctaggccgggccaacggagcccgcctttacctccccactcggcgtccagtctcttagcaacgactccggcttcctaggaactgctcctttctcaaccattcctgcccacaacaccccagcttgctgccagcaaagcccctccacacccctcaaactccagacccttcacatcaatttactgttttcttcgacctcaccccagcaattttctctgaatcaaccccctttcctcctctcctaagtctctgagtttctctctcctcctgccatcctgagttctgccatccttaggggccgccaagacctctcttttcgttcctctcccgcctcagaccagcagccttttattttagatcatgtctggagggaagtcagcccagggtccagaggaagggggcgtctgcatcactgaagcccttatcactaagcggaacttgactttccctgaagatggggaactgtcagagaagatgcactcagcaatgttgtggaatgaatgaatgggtggatggaacaagtgcttttttctccatgaacgactcaaaaggaaggtttcacactcttgatgaactgcagactgtccgcctggaccgggaggggattactactatcaggaacttagaaggcctccagaatcttcacagtctctatctgcaagggaataagatccagcaaattgagaacctggcttgcatcccctccttgcgcttcctgtctctggcaggaaaccaaatcaggcaggtggaaaacctcctcgacctcccatgcctccagtttctggacctttctgagaacctgatagaaacattgaagctggatgagttcccccagagccttctcatcctca

SEQ ID NO: 148113 - DNA, 4310 bp, Homo sapiens
  Payload ID: 9314
  Gene Symbol: LRRC47
  Gene Name: leucine rich repeat containing 47
  Uniprot ID: Q8N1G4
  ENST ID: ENST00000378251
  CDS Start-End: 29-1780
gtgggtgcctgccagcagctgaggcgccatggcggcggcagcggtgtcagagtcttggccggagctggagctggctgagcgcgagcggcggcgggagctgctgctgacggggcccgggctggaggagcgagtgcgggcggcgggtgggcagctgccgccgcggcttttcaccctgccgctgctgcactacttggaagtgagcggctgcgggagcttgcgcgcgccggggcctggcctggcgcagggcctgccgcagctgcacagcctcgtgctgcggcgcaacgcgctggggcccggcctgagccccgagctcgggccgctgcctgcccttcgggtgctcgacctgtcgggcaacgcgctggaggcgctgccgccgggccaaggcctgggccccgccgagccgccgggccttccgcagctgcagagcctcaacctcagcggcaaccggctgcgcgagctgccagccgacctggcgcgctgcgccccgcgcctgcagagcctcaacctcaccggcaattgcctagactcctttcccgccgagctctttcgccccggcgcgctgcccctgctcagtgaactggcggctgctgacaactgcctccgagaactcagccccgacatcgcccacctggcctcgctcaagacgttggacctctcgaacaaccagctgagcgagatccctgcagagcttgcggactgccccaagctcaaggagatcaatttccgtgggaacaagctgagggacaagcgcctggagaagatggtcagcggctgccagaccagatccatcctggagtacctgcgcgtcggaggccgtggtggcgggaagggcaagggccgtgccgagggctcggagaaggaagagagccggaggaagaggagggagaggaagcagaggcgggaaggtggtgatggggaggagcaggacgtgggagatgccggccggctgctgctcagggtcctgcacgtctctgaaaaccccgtacctctgacagtcagagtgagccccgaggtccgggatgtgcggccctacattgtgggggccgtggtgcgaggcatggacctgcagccagggaatgcactcaagcgcttcctcacctcgcagaccaagctccacgaagatctctgtgagaagaggacggctgccacccttgccacccacgagctccgtgccgtcaaagggcccctgctgtactgcgcccggcccccacaggacctcaagattgtccccttggggcggaaagaagccaaggccaaggagctggtgcggcagctgcagctggaggccgaggagcagaggaagcagaagaagcggcagagtgtgtcgggcctgcacagataccttcacttgctggatggaaatgaaaattacccgtgtcttgtggatgcagacggtgatgtgatttccttcccaccaataaccaacagtgagaagacaaaggttaagaaaacgacttctgatttgtttttggaagtaacaagtgccaccagtctgcagatttgcaaggatgtcatggatgccctcattctgaaaatggcagaaatgaaaaagtacactttagaaaataaagaggaaggatcactctcagatactgaagccgatgcagtctctggacaacttccagatcccacaacgaatcccagtgctggaaaggacgggccctcccttctggtggtggagcaggtccgggtggtggatctggaagggagcctgaaggtggtgtacccgtccaaggccgacctggccactgcccctccccacgtgactgtcgtgcgctgacgccagggccgcctgtccgcgtttgtttggccggttttgcggaggtttctatgcggcaatgctgaattatccgttagattttcaccccagtttttttgttggtttttttttttgagatggagtctcgctctgtcgccaggctggagtgcagtggcgtgatctcgagtcactgcagcctgtgtctcctgggttcaagcgattctcctgcctcagcctcccaagtagctgggactacaggtgtgtgccactaagctcagctaatttttgtatttttagtagagacggggtttcaccattttgaccaggatggtcttgatctcttgacctcatgatctgtccacctctgcccctcaaagtgctgggattacgtgatccacccgcctcagcctcccaaagtgctgggattacaggcgtgagctgtgcctggcccaccccagcattttttaagatgtatgtattcgttgttctgtttttccagatgattctgtcgtaaagtgatgctatgttgtcgttacaacatcaaagtgattttacggtttttgatgggattattcaagtgtcagaattaactgttcaaaatgttctgaatcatgtagatacatggcaggtaactgtttatgggagaaaagtacagtgctgttacgtggcactgtacagtcatgtgccacgtaacagcgtctgggtcagtgacggacacttacctgacagcggatccacaatattctcgtgcagtgtgtttggaatcctggtctgggctctcgtcgttggccttgtagatcaagtaggggaagtgagtgatgttcagtcatgctgctgggacacttggttttccagatgaaaacacataaataaaactacatgcaccatcgaggcttgtgtaaagactctgtgatcacacagcagcggctaagcacacgtttctcatgtgtcactgagcgacacgtgactgtcactggttcggagacccgaaaacttgggaagccaaccgatgtgcgtttccttgaacggcacggtcactttctatgacgcagcatcttgtaaaaccatatcatgccaggatgcagcttggcatgtgcaagggcgttgggttctccagctggcagtgatcataatcttggggggaaaagttttaatgtgaccttagaattggcagaattgcgtctcttcatactgctgttggattgctttgtgggggtggagatgtggagaccccttcaggcaagcagcctgtaggctgaaggcagtggcagcacctcaccctggctcagcggggccaagcggaggagagcggcatcggtggggtttccatcgtgtgcacgctggtgctgcagtgacaggcaggtggagccccaggagtggaccagacgcctctgcttgggaagcatcggcagtcctcagccagccgagggacagatggtagcaaaagctggaggatgcttaggtttttgagccaaaaatcttcatttatgcgccagaaaggtgggtcctgggcgccttctgttgtagacgtttccgttgtgaatgtccaggtcagacccccacgtccatgtgtcttcgtgtatgtccaggcaccacatgtgcgtgcacaccactcccgggagtcagtgtgcttggctcatgaggacacggccagccaccgcgatgattttacagaccccactgccttacgatctgggtgccatgtgagaagcagactcatcagctttatcgaatgacaccatttgttctctgttcagtgtctcgatttctgtgtctgtagaaatgactggtgattttgggaagcatctgcaagagccccacagcccacacacctttagttgtcaacctgagaggcccggggccctgtgcagtgggcagactaacagctgggtggctcttcagagccttgcaggacatgggccaggctgccttgagacctggacccacttgtctggtcaccgccaggccttcccgtctcgcccactgtgggagggaggggactccagacaggacgaggcccacacactcagtgccagctggactgccgtgggtgtgtcagatgactgccttgccttgtgtcctcccaaaacctgattcctgctgctctgggcagtcaaggcagatgccacagttggccaggggcctgccctgctggaggcttgaggcggcacgggggcttccccaggccaggactctgctggagttctggggctggggaccccagacagttgctctgagaggtgatttggggctgccatggcagaggctgccctttctctgcatggcccggcccagcccgggaaggaggaagggaggaagggagggatgctggagctgccatcttggctcccggggacttggtgtccatgctgtaacacatctgtcactgcgtgggtgtggatgaggctgccacatgctgtgccctttcctgatgcagcttgtgatgcgtgagatgctggaaatgtatttaactcgcagcacaggtgtctctgatgttttcttcaccccaccccaccccccgactcactaataaaaacagctccgcacctgg

SEQ ID NO: 148114 - DNA, 434 bp, Homo sapiens
  Payload ID: 9314
  Gene Symbol: LRRC47
  Gene Name: leucine rich repeat containing 47
  ENST ID: ENST00000479239
  CDS Start-End: 1-152
ccgaggagcagaggaagcagaagaagcggcagagtgtgtcgggcctgcacaggaaccgcctaatgctaccagaacccagaagcttcttaacagggtacaaagaaagcattctctttccaaaggagacgttgtggaaccagtctgtcatctagatggccctgacgtgagggaagtggaaggtgttaggagcggagataccttcacttgctggatggaaatgaaaattacccgtgtcttgtggatgcagacggtgatgtgatttccttcccaccaataaccaacagtgagaagacaaaggttaagaaaacgacttctgatttgtttttggaagtaacaagtgccaccagtctgcagatttgcaaggatgtcatggatgccctcattctgaaaatggcagaaatgaaaaagtacactttagaaaataaagaggaagg

SEQ ID NO: 148115 - DNA, 2784 bp, Homo sapiens
  Payload ID: 9315
  Gene Symbol: LRRC49
  Gene Name: leucine rich repeat containing 49
  Uniprot ID: Q8IUZ0
  ENST ID: ENST00000260382
  CDS Start-End: 261-2321
aatactcccgctctgtttttatgaggctgggaaaatagaacgaggaagtggtgacgcactgggctctcacgaatacaactagaagctgcaacgactgtgtggctctatcgattcgggagaggtccagaccggaaatggtcgtttccatggtaaccctgagcaggttgcctgggagatgacctctttcgggtctctttgaatctccgctgtagcgtcacctggaaggcagatctaacagagaacctggactgtctcctatcatgattcccgggaaatatcgctctgtttctggccgggctgcgaacaacgtgaactgcgggcttcatctggttattcaaacatcatcgcttcctgaaaaaaacaaagttgaattcaagctaaataaagacacatcgtcattccccggtagacttttacaacatgaccttgaaagaaactactcaagtaggcaaggtgatcatattaatttggtgagctcatcattgtcatcatttcctattcttcaacgttcttctgaagagaaaattctttactcagacaggttgagcctagaaagacaaaagctgaccgtatgtcctatcatcaatggggaagaccaccttcgtttgttgaactttcaacacaattttataactcggatacaaaatatttctaatctacagaagttaatatcgttggatttatatgataaccagattgaagaaattagtgggctttcgactctgagatgtcttcgtgtccttctgttggggaaaaacagaatcaagaaaatctcaaatctggagaatctaaaaagcttagatgtcttggatcttcatggaaatcagattaccaaaattgaaaatattaatcatttgtgtgagttgagagttttaaatcttgccaggaactttttaagtcatgttgataatcttaatgggctggattcactaactgaacttaacttgcgacacaatcaaatcactttcgtgagagatgtggataatttgccctgcctccaacatctctttctcagctttaacaatatatctagttttgacagtgtttcctgccttgctgactcttcttccctctcggacatcacctttgatggcaatcccatagctcaagagtcatggtacaaacacactgtccttcagaatatgatgcagctgcgccagctagatatgaagagaatcacggaagaagaaaggcgtatggcatctgttttagccaaaaaagaggaagagaagaagcgggaaagtcataaacaatctttgcttaaggagaagaaaaggttaacaattaacaacgtagctcgacagtgggacttgcaacaacaacgagtagccaatattgctacaaatgaagatagaaaagattctgactctcctcaggacccctgtcagattgatggaagcaccctctctgcattcccagaggaaacagggcctctagactcaggactcaacaatgctttacaaggtttatctgtcatagacacataccttgttgaagtggacggggatacactttccctatatggctcaggagcactggaatctctggataggaattggagtgttcaaacagcaggaatgatcacaacagtctccttcactttcatagaatttgatgaaatcgtccaagtgcttcctaaactgaagattaagtttcctaattctctgcaccttaaattcaaggaaacaaatcttgtaatgctgcagcaatttaacgcactagcccaactccgtcgtattgaccagttgacaattgatcctcaaggaaatccagttgtcaattttacactctggaaatactatgtactgtttaggctaagccatttcagtatgcagaaaataaatggaacagaggtgacacagaatgatatgataatggctgaaaggctctttggaatcctagcacatgtagcatcttctgagttaccccagtatcgtctgatttccattctgggtgatgccaggaaaaagcaatttcggtatctactagaatccaaaggaaaaaaacctggtattatcaacgaagaaaataatgacagcaaaagacttgtaggagaaaacacaaatcgtgctacattaaattatactacaagagacttttataatgaaaagctagaggaaataaaggaaaagaagaaattctgtaaaacatatatagaagaccttgtgaaggaagccacagaaatcaacatgaaaaatgaggctttgcagaagctttggccacagatgttcattgagcttgttagggatgcagtcatagaaattcgcaataaaaattcctatatgaagctctgcctacagcagataacagaccaaaaataaaaatggcctttagttacagttgattttggcagttttattttttgaaggttgaaaatatgcaggttatacatgttaaaacaacaacaacactatcctataaactagaaagactagtataaaagcattattgcccactgttctcatagctaaaagttaagaaggaaggaaggaaagcaggagaaaggaaggattaattgcctgtatgtgaggaccaaacaacctttgggaactaaacagttttcagagatggcgtggcactgcatccttggttcttgctttgattggtgccctgctatagcccaaagcacgtagtatttgctgatgattcagcatgagctgcatctacctacttttagctgataattttcagttatttccctttttattttatgtcatgatttcaaagccaaaaatatgttctttttatgagtgaagaataaacttactaacaaattagtcaaaa

SEQ ID NO: 148116 - DNA, 3085 bp, Homo sapiens
  Payload ID: 9315
  Gene Symbol: LRRC49
  Gene Name: leucine rich repeat containing 49
  Uniprot ID: Q8IUZ0
  ENST ID: ENST00000443425
  CDS Start-End: 674-2602
aatgggagggctctttgatatcttcctcctcctcctccctgcgctgctccccaggagccagtggacacaagcagagggatacaaatttcgcgcgggcagcgctgaggtgggccgtaaagaggaacggaccggaagtggtggtggttatagcaaccagtgtggccagcctcttccccagcttatcctcctcccaatactcccgctctgtttttatgaggctgggaaaatagaacgaggaagtggtgacgcactgggctctcacgaatacaactagaagctgcaacgactgtgtggctctatcgattcgggagaggtccagaccggaaatggtcgtttccatggtaaccctgagcaggttgcctgggagatgacctctttcgggtctctttgaatctccgctgtagcgtcacctggaaggcagatctaacagagaacctggactgtctcctatcatgattcccgggaaatatcgctctgtttctggccgggctgcgaacaacgtgaactgcgggcttcatctggttattcaaacatcatcgcttcctgaaaaaaacaaagttgaattcaagctaaataaagacacatcgtcattccccggtagacttttacaacatgaccttgaaagaaactactcaagtaggcaagattttaccaagaatataaagaatgtaaaatgaggtccatcacccaaggagcttgtagatttatttgggaagacaagggctacatatctggtgatcatattaatttggtgagctcatcattgtcatcatttcctattcttcaacgttcttctgaagagaaaattctttactcagacaggttgagcctagaaagacaaaagctgaccgtatgtcctatcatcaatggggaagaccaccttcgtttgttgaactttcaacacaattttataactcggatacaaaatatttctaatctacagaagttaatatcgttggatttatatgataaccagattgaagaaattagtgggctttcgactctgagatgtcttcgtgtccttctgttggggaaaaacagaatcaagaaaatctcaaatctggagaatctaaaaagcttagatgtcttggatcttcatggaaatcagattaccaaaattgaaaatattaatcatttgtgtgagttgagagttttaaatcttgccaggaactttttaagtcatgttgataatcttaatgggctggattcactaactgaacttaacttgcgacacaatcaaatcactttcgtgagagatgtggataatttgccctgcctccaacatctctttctcagctttaacaatatatctagttttgacagtgtttcctgccttgctgactcttcttccctctcggacatcacctttgatggcaatcccatagctcaagagtcatggtacaaacacactgtccttcagaatatgatgcagctgcgccagctagatatgaagagaatcacggaagaagaaaggcgtatggcatctgttttagccaaaaaagaggaagagaagaagcgggaaagtcataaacaatctttgcttaaggagaagaaaaggttaacaattaacaacgtagctcgacagtgggacttgcaacaacaacgagtagccaatattgctacaaatgaagatagaaaagattctgactctcctcaggacccctgtcagattgatggaagcaccctctctgcattcccagaggaaacagggcctctagactcaggactcaacaatgctttacaaggtttatctgtcatagacacataccttgttgaagtggacggggatacactttccctatatggctcaggagcactggaatctctggataggaattggagtgttcaaacagcaggaatgatcacaacagtctccttcactttcatagaatttgatgaaatcgtccaagtgcttcctaaactgaagattaagtttcctaattctctgcaccttaaattcaaggaaacaaatcttgtaatgctgcagcaatttaacgcactagcccaactccgtcgtattgaccagttgacaattgatcctcaaggaaatccagttgtcaattttacactctggaaatactatgtactgtttaggctaagccatttcagtatgcagaaaataaatggaacagaggtgacacagaatgatatgataatggctgaaaggctctttggaatcctagcacatgtagcatcttctgagttaccccagtatcgtctgatttccattctgggtgatgccaggaaaaagcaatttcggtatctactagaatccaaaggaaaaaaacctggtattatcaacgaagaaaataatgacagcaaaagacttgtaggagaaaacacaaatcgtgctacattaaattatactacaagagacttttataatgaaaagctagaggaaataaaggaaaagaagaaattctgtaaaacatatatagaagaccttgtgaaggaagccacagaaatcaacatgaaaaatgaggctttgcagaagctttggccacagatgttcattgagcttgttagggatgcagtcatagaaattcgcaataaaaattcctatatgaagctctgcctacagcagataacagaccaaaaataaaaatggcctttagttacagttgattttggcagttttattttttgaaggttgaaaatatgcaggttatacatgttaaaacaacaacaacactatcctataaactagaaagactagtataaaagcattattgcccactgttctcatagctaaaagttaagaaggaaggaaggaaagcaggagaaaggaaggattaattgcctgtatgtgaggaccaaacaacctttgggaactaaacagttttcagagatggcgtggcactgcatccttggttcttgctttgattggtgccctgctatagcccaaagcacgtagtatttgctgatgattcagcatgagctgcatctacctacttttagctgataattttcagttatttccctttttattttatgtcatgatttcaaagccaaaaatatgttctttttatgagtgaagaataaacttactaacaaattagtcaaaataaagtatgtttgcctcctt

SEQ ID NO: 148117 - DNA, 6605 bp, Homo sapiens
  Payload ID: 9315
  Gene Symbol: LRRC49
  Gene Name: leucine rich repeat containing 49
  Uniprot ID: Q8IUZ0
  ENST ID: ENST00000544974
  CDS Start-End: 530-2560
agcaagatgatgcaaacataaaggtctggtgggaaaggctgtgtgaaaatgggaatcccccagggcggaggaagtaaagcagcaagtcctctatccgtctcaaattaccttgaaatcccacctcctggaatcccccatcagcaagtgtccgctgtacctggcctgctaccacctaaagactgagcgcagccagcaggactgggaaaggcagggcgatgatggcagtgaaggatggagtctcactctgtcgcctaggctggagtgccgtggtgcgatctcgctcactgcaacctccacctcccaggttcaagcaattctctgcctcagcatcccgagtagctgggattataggtgcccgccaccatgcccagctcatttttgtatttttagtagaggcggggtttcaccatcttggccaggctggtcttgaattcctgacctcaagtgatccacccgccttggcctcccaaagtgttgggattacaggagtgagccacctcgcccagccaacttgacataacttttaaagatggattgccaagctgaggtgaactgcgggcttcatctggttattcaaacatcatcgcttcctgaaaaaaacaaagttgaattcaagctaaataaagacacatcgtcattccccggtagacttttacaacatgaccttgaaagaaactactcaagtaggcaaggtgatcatattaatttggtgagctcatcattgtcatcatttcctattcttcaacgttcttctgaagagaaaattctttactcagacaggttgagcctagaaagacaaaagctgaccgtatgtcctatcatcaatggggaagaccaccttcgtttgttgaactttcaacacaattttataactcggatacaaaatatttctaatctacagaagttaatatcgttggatttatatgataaccagattgaagaaattagtgggctttcgactctgagatgtcttcgtgtccttctgttggggaaaaacagaatcaagaaaatctcaaatctggagaatctaaaaagcttagatgtcttggatcttcatggaaatcagattaccaaaattgaaaatattaatcatttgtgtgagttgagagttttaaatcttgccaggaactttttaagtcatgttgataatcttaatgggctggattcactaactgaacttaacttgcgacacaatcaaatcactttcgtgagagatgtggataatttgccctgcctccaacatctctttctcagctttaacaatatatctagttttgacagtgtttcctgccttgctgactcttcttccctctcggacatcacctttgatggcaatcccatagctcaagagtcatggtacaaacacactgtccttcagaatatgatgcagctgcgccagctagatatgaagagaatcacggaagaagaaaggcgtatggcatctgttttagccaaaaaagaggaagagaagaagcgggaaagtcataaacaatctttgcttaaggagaagaaaaggttaacaattaacaacgtagctcgacagtgggacttgcaacaacaacgagtagccaatattgctacaaatgaagatagaaaagattctgactctcctcaggacccctgtcagattgatggaagcaccctctctgcattcccagaggaaacagggcctctagactcaggactcaacaatgctttacaaggtttatctgtcatagacacataccttgttgaagtggacggggatacactttccctatatggctcaggagcactggaatctctggataggaattggagtgttcaaacagcaggaatgatcacaacagtctccttcactttcatagaatttgatgaaatcgtccaagtgcttcctaaactgaagattaagtttcctaattctctgcaccttaaattcaaggaaacaaatcttgtaatgctgcagcaatttaacgcactagcccaactccgtcgtattgaccagttgacaattgatcctcaaggaaatccagttgtcaattttacactctggaaatactatgtactgtttaggctaagccatttcagtatgcagaaaataaatggaacagaggtgacacagaatgatatgataatggctgaaaggctctttggaatcctagcacatgtagcatcttctgagttaccccagtatcgtctgatttccattctgggtgatgccaggaaaaagcaatttcggtatctactagaatccaaaggaaaaaaacctggtattatcaacgaagaaaataatgacagcaaaagacttgtaggagaaaacacaaatcgtgctacattaaattatactacaagagacttttataatgaaaagctagaggaaataaaggaaaagaagaaattctgtaaaacatatatagaagaccttgtgaaggaagccacagaaatcaacatgaaaaatgaggctttgcagaagctttggccacagatgttcattgagcttgttagggatgcagtcatagaaattcgcaataaaaattcctatatgaagctctgcctacagcagataacagaccaaaaataaaaatggcctttagttacagttgattttggcagttttattttttgaaggttgaaaatatgcaggttatacatgttaaaacaacaacaacactatcctataaactagaaagactagtataaaagcattattgcccactgttctcatagctaaaagttaagaaggaaggaaggaaagcaggagaaaggaaggattaattgcctgtatgtgaggaccaaacaacctttgggaactaaacagttttcagagatggcgtggcactgcatccttggttcttgctttgattggtgccctgctatagcccaaagcacgtagtatttgctgatgattcagcatgagctgcatctacctacttttagctgataattttcagttatttccctttttattttatgtcatgatttcaaagccaaaaatatgttctttttatgagtgaagaataaacttactaacaaattagtcaaaataaagtatgtttgcctccttaattcagtcagaattgtcatatttattgtatgttcctctttagttaggtacggttcctgctattcacctatatggaggatgccccattcttctaggaatgcattctcagggaaccacaggaggtcctgggaatcactatgggcagagaatatgcaaatgagtcaaaactgggataggaagaaaatgttttgtcttaggagatcctgaatgactataaaatgctgttacaaagcagtaaatctgcttctctgaaagatgtttccttccattgttagctctcaaatgctcttttaatagacatgcatgtgtacctgtgtctcagaagtattagggatgcatgagtgaagggttctaatttttaaaatttcatttgaagatcaaattcatgctggtgagaagggtagtaggagcctattaccatagctagagatgatgccacttcagaaaaacaatcttagtcaataaataggaatttttcggtttgcttagattttacctagcagctattatgtcagcaggaccaccaggatatgggaaaacaggactagaagatgtacgacagcaaagacatgcagagacatgcagagacacctggaaggaagctaggtaagctgctattgcggttctgagaaagacccacatccttaagatctcttgattactcttctcccaaaaggcgtgcttaactttaacaggttaccatttttctgatcatagccttaaaaggctgtcctggttttttctttttctttttttttttttgagacagagtcttgctctgtcacccaggctggagtgcagtggcgcgatctcggctcactgcaagctccgcttcccaggttcacgccattctcctgcctcagcctcccaagtagctgggtctacaggtgcccgccaccatgcccagctaagtttttgtatttttagtagagacggggtttcaccatgttagccaggatggtctcgatctcctgacctcatgatccgcctgcctcggcctcccaaagtgctgggattacaggtgtgagccaccatgcctgtcctgtcctggttttttcatcttggcacttaggccatcagcttactagtgtgtaacctcagtttcctcctgatagcacacacttcgtaagatagtcatgagaatcaaaagaaacaatgcatgtaaagcatttctcatcatgcctggcacacagcaaacacccaatacgttgagctttaattattactcttttggctgtaggttgaacaatagggttggtgccctaggacagaggagctattagcattgctttctgatcctttagcctctccaaactgaaacatatggaccatttctcatctggctagtaaacacttatctctcctgggcttatatcttgtttggtatagaaatgagatcccagcttgaaggtgatgttgagaggagaaccaagagtatattgtctgtgggattctggcagattggaaagatgtaagaacttgtgactctttgggagtctgggtaactgttcccactctaggctttgcagatgaatggacctagctgtttagtaatctgtccagcttcctgcatgtctgttctcccctaaccctcccatccctgctgctaaagagacttgacactcacatgctttcttggcccagtcaccctgggaatcttaggaacactaagtcagcactcaatgaaatggcagcaagccatcccagccactgctggctctatgcagacctgcttcaggcctggtaatagggtctctctcttgttcctgaaaccaagcctctttattcctcagctttggtctctgcttccttcctacctgagttccctttcgctcctacctgctcccactaccccatactgatttctacttcttgaatccttactttgtcgggtctcaaacgtcgaatggcgatcctcccatctagttctacactccaaactcattttgcgttctgaagttccttggtgaagataatccccagataaaaagacaaggagacctgggtctgctgggttagggatcaagtgagggtcctatgttgtaagtgagtggtgatctagggaacaaattgccatttcttcttggaattttccagggttttcagggaaggggaagagatgcaaatcccatagtctgagactctctaggctagtgtgtgctgaagaattgctttttttcaaaagggatctcacgcagaaacactattgcatttgcctcaaaagcagaaacatttagtacccccatttagggagatactgtacccgatgttctggtacagcagctggatggtgaagtgtgctgctacacctgaggatggttaccaagtgtgcaggtggacctgaggcttgttaactgtgctgctgagtcagaggatggtgctggtatcagctcctcacttcctgagcttcattccactgaaggcctggcatgtaagacagtgcaaccctaccatgctcctgatctattcctgattgggcaaggaatgcactgggattcatattctcttcaatgagtaatcatcataacaacaaagattcattgagcaatgtcttgcactattataagctctttgtatacattctcatttaatctcctaacactgcgatatatatatgatagcaatcccatttgaacactagaaaactgaggcatagagaggatgaaaaaaaacgtaactaagggtatttcaaccaataaatagtagacagtacccacattcactgttagtcttaaggatctggcatctgggaagaattttgatgtccatggtcgttcctaatccactttcatgttttgtcattatgctgaggaatagcaaataaaagatgagaatttctcaactgtgtctacatgtgaagcatatcgtagacattatgtgcggtataaatactaacaaatgtataagtacacatgtacaatattgtgtattatttaaggatatacatattaaagtgtaaaatattggcagctggattcattgcaataatgtgtagagaatcaacttcaggagggggcaataattaaattagggggaccagttgggaaggtactgcattattctaggcaagagataattgtgacttggatcaaggtgatagcggcagaggcgtcagaaagtagttggatcttgggtatattttaaagatgaagcaacaagatttactgacagaactggatatggagtatgagaaacagtagtcaatgatggccacaaggtttttggcttgaactaccgaaaagattgagttgccatcaactgagatgagagcaatctgtgaatggaacatctgctgggaggaaggatcaggaattccgtcttatggaatacacaatgcatctcaacatgtacaatatatacaagatataccacacatctcagcatatgttgagatggttgttaaatatccaagtgcaggtgttaagtaggtgtgaatatgagttgggagttgagaagtatagattgggctagaattatagaatttggagtcattggcgtatagcagtacttgtttatgctatctttatatttaagagaataaacctatcacttgctaaataag

SEQ ID NO: 148118 - DNA, 1898 bp, Homo sapiens
  Payload ID: 9315
  Gene Symbol: LRRC49
  Gene Name: leucine rich repeat containing 49
  ENST ID: ENST00000560158
  CDS Start-End: 311-1435
tctcctcagtgctttttaccttgcgagtggtgcagcttgttctgcggatgtactgaaaccctcccatttaatctgcagtggaggagagtggagctcactgtccagtagaaatcagtgatgtagcaatgttgcagtaaatagaaatgattatatatttcaatagcttagcaagaagacatttataatatttttttctttcatctgattaagttttgctgtctattttcttccagagagatgtggataatttgccctgcctccaacatctctttctcagctttaacaatatatctaggaagaagaaaggcgtatggcatctgttttagccaaaaaagaggaagagaagaagcgggaaagtcataaacaatctttgcttaaggagaagaaaaggttaacaattaacaacgtagctcgacagtgggacttgcaacaacaacgagtagccaatattgctacaaatgaagatagaaaagattctgactctcctcaggacccctgtcagattgatggaagcaccctctctgcattcccagaggaaacagggcctctagactcaggactcaacaatgctttacaaggtttatctgtcatagacacataccttgttgaagtggacggggatacactttccctatatggctcaggagcactggaatctctggataggaattggagtgttcaaacagcaggaatgatcacaacagtctccttcactttcatagaatttgatgaaatcgtccaagtgcttcctaaactgaagattaagtttcctaattctctgcaccttaaattcaaggaaacaaatcttgtaatgctgcagcaatttaacgcactagcccaactccgtcgtattgaccagttgacaattgatcctcaaggaaatccagttgtcaattttacactctggaaatactatgtactgtttaggctaagccatttcagtatgcagaaaataaatggaacagaggtgacacagaatgatatgataatggctgaaaggctctttggaatcctagcacatgtagcatcttctgagttaccccagtatcgtctgatttccattctgggtgatgccaggaaaaagcaatttcggtatctactagaatccaaaggaaaaaaacctggtattatcaacgaagaaaataatgacagcaaaagacttgtaggagaaaacacaaatcgtgctacattaaattatactacaagagacttttataatgaaaagctagaggaaataaaggaaaagaagaaattctgtaaaacatatatagaagaccttgtgaaggaagccacagaaatcaacatgaaaaatgaggctttgcagaagctttggccacagatgttcattgagcttgttagggatgcagtcatagaaattcgcaataaaaattcctatatgaagctctgcctacagcagataacagaccaaaaataaaaatggcctttagttacagttgattttggcagttttattttttgaaggttgaaaatatgcaggttatacatgttaaaacaacaacaacactatcctataaactagaaagactagtataaaagcattattgcccactgttctcatagctaaaagttaagaaggaaggaaggaaagcaggagaaaggaaggattaattgcctgtatgtgaggaccaaacaacctttgggaactaaacagttttcagagatggcgtggcactgcatccttggttcttgctttgattggtgccctgctatagcccaaagcacgtagtatttgctgatgattcagcatgagctgcatctacctacttttagctgataattttcagttatttccctttttattttatgtcatgatttcaaagccaaaaatatgttctttttatgagtgaagaataaacttactaacaaattagtcaaaa

SEQ ID NO: 148119 - DNA, 585 bp, Homo sapiens
  Payload ID: 9315
  Gene Symbol: LRRC49
  Gene Name: leucine rich repeat containing 49
  ENST ID: ENST00000558808
  CDS Start-End: 298-585
agtgctttttaccttgcgagtggtgcagcttgttctgcggatgtactgaaaccctcccatttaatctgcagtggaggagagtggagctcactgtccagtagaaatcagtgatgtagcaatgttgcaagagatgtggataatttgccctgcctccaacatctctttctcagctttaacaatatatctagttttgacagtgtttcctgccttgctgactcttcttccctctcggacatcacctttgatggcaatcccatagctcaagagtcatggtacaaacacactgtccttcagaatatgatgcagctgcgccagctagatatgaagagaatcacggaagaagaaaggcgtatggcatctgttttagccaaaaaagaggaagagaagaagcgggaaagtcataaacaatctttgcttaaggagaagaaaaggttaacaattaacaacgtagctcgacagtgggacttgcaacaacaacgagtagccaatattgctacaaatgaagatagaaaagattctgactctcctcaggacccctgtcagattgatggaagcaccctctctgcattcccagaggaaacaggg

SEQ ID NO: 148120 - DNA, 398 bp, Homo sapiens
  Payload ID: 9315
  Gene Symbol: LRRC49
  Gene Name: leucine rich repeat containing 49
  ENST ID: ENST00000560755
  CDS Start-End: 48-398
gtcacctggaaggcagatctaacagagaacctggactgtctcctatcatgattcccgggaaatatcgctctgtttctggccgggctgcgaacaacgtgaactgcgggcttcatctggttattcaaacatcatcgcttcctgaaaaaaacaaagttgaattcaagctaaataaagacacatcgtcattccccggtagacttttacaacatgaccttgaaagaaactactcaagtaggcaagaactatatgggctggaaatgaaaactgccacgaggtccttatcagcatttggagattcttccattaagacaccttcaaaatccagaatccagcagggctgtcatagtgctggcccaaatatatctggtgatcatattaatttggtgagctcatcattg

SEQ ID NO: 148121 - DNA, 602 bp, Homo sapiens
  Payload ID: 9315
  Gene Symbol: LRRC49
  Gene Name: leucine rich repeat containing 49
  ENST ID: ENST00000558546
  CDS Start-End: 512-602
agcaagtgtccgctgtacctggcctgctaccacctaaagactgagcgcagccagcaggactgggaaaggcagggcgatgatggcagtgaagggtgaactgcgggcttcatctggttattcaaacatcatcgcttcctgaaaaaaacaaagttgaattcaagctaaataaagacacatcgtcattccccggtagacttttacaacatgaccttgaaagaaactactcaagtaggcaaggtgatcatattaatttggtgagctcatcattgtcatcatttcctattcttcaacgttcttctgaagagaaaattctttactcagacaggttgagcctagaaagacaaaagctgaccgtatgtcctatcatcaatggggaagaccaccttcgtttgttgaactttcaacacaattttataactcggatacaaaatatttctaatctacagaagttaatatcgttggatttatatgataaccagattgaagaaattagtgggctttcgactctgagatgtcttcgtgtccttctgttggggaaaaacagaatcaagaaaatctcaaatctggagaatctaaaaagcttagatgtcttggatcttcat

SEQ ID NO: 148122 - DNA, 559 bp, Homo sapiens
  Payload ID: 9315
  Gene Symbol: LRRC49
  Gene Name: leucine rich repeat containing 49
  ENST ID: ENST00000558204
  CDS Start-End: 34-222
agatctaacagagaacctggactgtctcctatcatgattcccgggaaatatcgctctgtttctggccgggctgcgaacaacgtgaactgcgggcttcatctggttattcaaacatcatcgcttcctgaaaaaaacaaacatttatacttacctactttctacacactatgtctcaagacacaacatgatttttcctcctttgaccaagttggaaacctctaaccatcacaattcaggtgtgtcctaaaaagttattaaataggcgtcactggaagaactctaaagtgaagggcagagttcacacataacagcatgaagaagggttgaattcaagctaaataaagacacatcgtcattccccggtagacttttacaacatgaccttgaaagaaactactcaagtaggcaagacaaaagctgaccgtatgtcctatcatcaatggggaagaccaccttcgtttgttgaactttcaacacaattttataactcggatacaaaatatttctaatctacagaagttaatatcgttggatttatatgataaccagattgaagaaa

SEQ ID NO: 148123 - DNA, 2586 bp, Homo sapiens
  Payload ID: 9315
  Gene Symbol: LRRC49
  Gene Name: leucine rich repeat containing 49
  Uniprot ID: Q8IUZ0
  ENST ID: ENST00000560369
  CDS Start-End: 270-2345
cctcctcccaatactcccgctctgtttttatgaggctgggaaaatagaacgaggaagtggtgacgcactgggctctcacgaatacaactagaagctgcaacgactgtgtggctctatcgattcgggagaggtccagaccggaaatggtcgtttccatggtaaccctgagcaggttgcctgggagatgacctctttcgggtctctttgaatctccgctgtagcgtcacctggaaggcagatctaacagagaacctggactgtctcctatcatgattcccgggaaatatcgctctgtttctggccgggctgcgaacaacgtgaactgcgggcttcatctggttattcaaacatcatcgcttcctgaaaaaaacaaagtaagatttaagaaggttgaattcaagctaaataaagacacatcgtcattccccggtagacttttacaacatgaccttgaaagaaactactcaagtaggcaaggtgatcatattaatttggtgagctcatcattgtcatcatttcctattcttcaacgttcttctgaagagaaaattctttactcagacaggttgagcctagaaagacaaaagctgaccgtatgtcctatcatcaatggggaagaccaccttcgtttgttgaactttcaacacaattttataactcggatacaaaatatttctaatctacagaagttaatatcgttggatttatatgataaccagattgaagaaattagtgggctttcgactctgagatgtcttcgtgtccttctgttggggaaaaacagaatcaagaaaatctcaaatctggagaatctaaaaagcttagatgtcttggatcttcatggaaatcagattaccaaaattgaaaatattaatcatttgtgtgagttgagagttttaaatcttgccaggaactttttaagtcatgttgataatcttaatgggctggattcactaactgaacttaacttgcgacacaatcaaatcactttcgtgagagatgtggataatttgccctgcctccaacatctctttctcagctttaacaatatatctagttttgacagtgtttcctgccttgctgactcttcttccctctcggacatcacctttgatggcaatcccatagctcaagagtcatggtacaaacacactgtccttcagaatatgatgcagctgcgccagctagatatgaagagaatcacggaagaagaaaggcgtatggcatctgttttagccaaaaaagaggaagagaagaagcgggaaagtcataaacaatctttgcttaaggagaagaaaaggttaacaattaacaacgtagctcgacagtgggacttgcaacaacaacgagtagccaatattgctacaaatgaagatagaaaagattctgactctcctcaggacccctgtcagattgatggaagcaccctctctgcattcccagaggaaacagggcctctagactcaggactcaacaatgctttacaaggtttatctgtcatagacacataccttgttgaagtggacggggatacactttccctatatggctcaggagcactggaatctctggataggaattggagtgttcaaacagcaggaatgatcacaacagtctccttcactttcatagaatttgatgaaatcgtccaagtgcttcctaaactgaagattaagtttcctaattctctgcaccttaaattcaaggaaacaaatcttgtaatgctgcagcaatttaacgcactagcccaactccgtcgtattgaccagttgacaattgatcctcaaggaaatccagttgtcaattttacactctggaaatactatgtactgtttaggctaagccatttcagtatgcagaaaataaatggaacagaggtgacacagaatgatatgataatggctgaaaggctctttggaatcctagcacatgtagcatcttctgagttaccccagtatcgtctgatttccattctgggtgatgccaggaaaaagcaatttcggtatctactagaatccaaaggaaaaaaacctggtattatcaacgaagaaaataatgacagcaaaagacttgtaggagaaaacacaaatcgtgctacattaaattatactacaagagacttttataatgaaaagctagaggaaataaaggaaaagaagaaattctgtaaaacatatatagaagaccttgtgaaggaagccacagaaatcaacatgaaaaatgaggctttgcagaagctttggccacagatgttcattgagcttgttagggatgcagtcatagaaattcgcaataaaaattcctatatgaagctctgcctacagcagataacagaccaaaaataaaaatggcctttagttacagttgattttggcagttttattttttgaaggttgaaaatatgcaggttatacatgttaaaacaacaacaacactatcctataaactagaaagactagtataaaagcattattgcccactgttctcatagctaaaagttaagaaggaaggaaggaaagcaggagaaaggaaggattaattgcctgtatgtgaggaccaaacaacctttgggaactaaacagtttt

SEQ ID NO: 148124 - DNA, 744 bp, Homo sapiens
  Payload ID: 9315
  Gene Symbol: LRRC49
  Gene Name: leucine rich repeat containing 49
  ENST ID: ENST00000559806
  CDS Start-End: 398-744
agtgctttttaccttgcgagtggtgcagcttgttctgcggatgtactgaaaccctcccatttaatctgcagtggaggagagtggagctcactgtccagtagaaatcagtgatgtagcaatgttgcagtaaatagaaatgattatatatttcaatagcttagcaagaagacatttataatatttttttctttcatctgattaagttttgctgtctattttcttccagagagatgtggataatttgccctgcctccaacatctctttctcagctttaacaatatatctagttttgacagtgtttcctgccttgctgactcttcttccctctcggacatcacctttgatggcaatcccatagctcaagagtcatggtacaaacacactgtccttcagaatatgatgcagctgcgccagctagatatgaagagaatcacggaagaagaaaggcgtatggcatctgttttagccaaaaaagaggaagagaagaagcgggaaagtcataaacaatctttgcttaaggagaagaaaaggttaacaattaacaacgtagctcgacagtgggacttgcaacaacaacgagtagccaatattgctacaaatgaagatagaaaagattctgactctcctcaggacccctgtcagattgatggaagcaccctctctgcattcccagaggaaacagggcctctagactcaggactcaacaatgctttacaaggtttatctgtcatagacacatacct

SEQ ID NO: 148125 - DNA, 570 bp, Homo sapiens
  Payload ID: 9315
  Gene Symbol: LRRC49
  Gene Name: leucine rich repeat containing 49
  ENST ID: ENST00000559069
  CDS Start-End: 298-570
agtgctttttaccttgcgagtggtgcagcttgttctgcggatgtactgaaaccctcccatttaatctgcagtggaggagagtggagctcactgtccagtagaaatcagtgatgtagcaatgttgcaagagatgtggataatttgccctgcctccaacatctctttctcagctttaacaatatatctagttttgacagtgtttcctgccttgctgactcttcttccctctcggacatcacctttgatggcaatcccatagctcaagagtcatggtacaaacacactgtccttcagaatatgatgcagctgcgccagctagatatgaagagaatcacggagaagaaaaggttaacaattaacaacgtagctcgacagtgggacttgcaacaacaacgagtagccaatattgctacaaatgaagatagaaaagattctgactctcctcaggacccctgtcagattgatggaagcaccctctctgcattcccagaggaaacagggcctctagactcaggactcaacaatgctttacaaggtttatctgtcatagacacataccttgttgaagtg

SEQ ID NO: 148126 - DNA, 546 bp, Homo sapiens
  Payload ID: 9315
  Gene Symbol: LRRC49
  Gene Name: leucine rich repeat containing 49
  ENST ID: ENST00000558032
  CDS Start-End: 51-239
agcgtcacctggaaggcagatctaacagagaacctggactgtctcctatcatgattcccgggaaatatcgctctgtttctggccgggctgcgaacaacgtgaactgcgggcttcatctggttattcaaacatcatcgcttcctgaaaaaaacaaacatttatacttacctactttctacacactatgtctcaagacacaacatgatttttcctcctttgaccaagttggaaacctctaaccatcacaattcaggtgtgtcctaaaaagttattaaataggcgtcactggaagaactctaaagtgaagggcagagttcacacataacagcatgaagaagggttgaattcaagctaaataaagacacatcgtcattccccggtagacttttacaacatgaccttgaaagaaactactcaagtaggcaagattttaccaagaatataaagaatgtaaaatgaggtccatcacccaaggagcttgtagatttatttgggaagacaagggctacatatctggtgatcatattaatttggtgagctcatcat

SEQ ID NO: 148127 - DNA, 3061 bp, Homo sapiens
  Payload ID: 9315
  Gene Symbol: LRRC49
  Gene Name: leucine rich repeat containing 49
  ENST ID: ENST00000561081
  CDS Start-End: 453-677
aatgggagggctctttgatatcttcctcctcctcctccctgcgctgctccccaggagccagtggacacaagcagagggatacaaatttcgcgcgggcagcgctgaggtgggccgtaaagaggaacggaccggaagtggtggtggttatagcaaccagtgtggccagcctcttccccagcttatcctcctcccaatactcccgctctgtttttatgaggctgggaaaatagaacgaggaagtggtgacgcactgggctctcacgaatacaactagaagctgcaacgactgtgtggctctatcgattcgggagaggtccagaccggaaatggtcgtttccatggtaaccctgagcaggttgcctgggagatgacctctttcgggtctctttgaatctccgctgtagcgtcacctggaaggcagatctaacagagaacctggactgtctcctatcatgattcccgggaaatatcgctctgtttctggccgggctgcgaacaacgtgaactgcgggcttcatctggttattcaaacatcatcgcttcctgaaaaaaacaaagttgaattcaagctaaataaagacacatcgtcattccccggtagacttttacaacatgaccttgaaagaaactactcaagtaggcaagattttaccaagaatataaagaatgtaaaatgaggtccatcacccaaggagcttgtagatttatttgggaagacaagggctacatatctggtgatcatattaatttggtgagctcatcattgtcatcatttcctattcttcaacgttcttctgaagagaaaattctttactcagacaggttgagcctagaaagacaaaagctgaccgtatgtcctatcatcaatggggaagaccaccttcgtttgttgaactttcaacacaattttataactcggatacaaaatatttctaatctacagaagttaatatcgttggatttatatgataaccagattgaagaaattagtgggctttcgactctgagatgtcttcgtgtccttctgttggggaaaaacagaatcaagaaaatctcaaatctggagaatctaaaaagcttagatgtcttggatcttcatggaaatcagattaccaaaattgaaaatattaatcatttgtgtgagttgagagttttaaatcttgccaggaactttttaagtcatgttgataatcttaatgggctggattcactaactgaacttaacttgcgacacaatcaaatcactttcgtgagagatgtggataatttgccctgcctccaacatctctttctcagctttaacaatatatctagttttgacagtgtttcctgccttgctgactcttcttccctctcggacatcacctttgatggcaatcccatagctcaagagtcatggtacaaacacactgtccttcagaatatgatgcagctgcgccagctagatatgaagagaatcacggaagaagaaaggcgtatggcatctgttttagccaaaaaagaggaagagaagaagcgggaaagtcataaacaatctttgcttaaggagaagaaaaggttaacaattaacaacgtagctcgacagtgggacttgcaacaacaacgagtagccaatattgctacaaatgaagatagaaaagattctgactctcctcaggacccctgtcagattgatggaagcaccctctctgcattcccagaggaaacagggcctctagactcaggactcaacaatgctttacaaggtttatctgtcatagacacataccttgttgaagtggacggggatacactttccctatatggctcaggagcactggaatctctggataggaattggagtgttcaaacagcaggaatgatcacaacagtctccttcactttcatagaatttgatgaaatcgtccaagtgcttcctaaactgaagattaagtttcctaattctctgcaccttaaattcaaggaaacaaatcttgtaatgctgcagcaatttaacgcactagcccaactccgtcgtattgaccagttgacaattgatcctcaaggaaatccagttgtcaattttacactctggaaatactatgtactgtttaggctaagccatttcagtatgcagaaaataaatggaacagaggtgacacagaatgatatgataatggctgaaaggctctttggaatcctagcacatgtagcatcttctgagttaccccagtatcgtctgatttccattctgggtgatgccaggaaaaagcaatttcggtatctactagaatccaaaggaaaaaaacctggtattatcaacgaagaaaataatgacagcaaaagacttgtaggagaaaacacaaatcgtgctacattaaattatactacaagagacttttataatgaaaagctagaggaaataaaggaaaagaagaaattctgtaaaacatatatagaagaccttgtgaaggaagccacagaaatcaacatgaaaaatgaggctttgcagaagctttggccacagatgttcattgagcttgttagggatgcagtcatagaaattcgcaataaaaattcctatatgaagctctgcctacagcagataacagaccaaaaataaaaatggcctttagttacagttgattttggcagttttattttttgaaggttgaaaatatgcaggttatacatgttaaaacaacaacaacactatcctataaactagaaagactagtataaaagcattattgcccactgttctcatagctaaaagttaagaaggaaggaaggaaagcaggagaaaggaaggattaattgcctgtatgtgaggaccaaacaacctttgggaactaaacagttttcagagatggcgtggcactgcatccttggttcttgctttgattggtgccctgctatagcccaaagcacgtagtatttgctgatgattcagcatgagctgcatctacctacttttagctgataattttcagttatttccctttttattttatgtcatgatttcaaagccaaaaatatgttctttttatgagtgaagaataaacttactaacaaattagtc

SEQ ID NO: 148128 - DNA, 527 bp, Homo sapiens
  Payload ID: 9315
  Gene Symbol: LRRC49
  Gene Name: leucine rich repeat containing 49
  ENST ID: ENST00000559670
  CDS Start-End: 100-303
aggttgcctgggagatgacctctttcgggtctctttgaatctccgctgtagcgtcacctggaaggcagatctaacagagaacctggactgtctcctatcatgattcccgggaaatatcgctctgtttctggccgggctgcgaacaacgtgaactgcgggcttcatctggttattcaaacatcatcgcttcctgaaaaaaacaaaacaaaagctgaccgtatgtcctatcatcaatggggaagaccaccttcgtttgttgaactttcaacacaattttataactcggatacaaaatatttctaatctacagaagttaatatcgttggatttatatgataaccagattgaagaaattagtgggctttcgactctgagatgtcttcgtgtccttctgttggggaaaaacagaatcaagaaaatctcaaatctggagaatctaaaaagcttagatgtcttggatcttcatggaaatcagattaccaaaattgaaaatattaatcatttgtgtgagttgagagttttaaatc

SEQ ID NO: 148129 - DNA, 2721 bp, Homo sapiens
  Payload ID: 9315
  Gene Symbol: LRRC49
  Gene Name: leucine rich repeat containing 49
  ENST ID: ENST00000560107
  CDS Start-End: 301-504
accagtgtggccagcctcttccccagcttatcctcctcccaatactcccgctctgtttttatgaggctgggaaaatagaacgaggaagtggtgacgcactgggctctcacgaatacaactagaagctgcaacgactgtgtggctctatcgattcgggagaggtccagaccggaaatggtcgtttccatggtaaccctgagcaggttgcctgggagatgacctctttcgggtctctttgaatctccgctgtagcgtcacctggaaggcagatctaacagagaacctggactgtctcctatcatgattcccgggaaatatcgctctgtttctggccgggctgcgaacaacgtgaactgcgggcttcatctggttattcaaacatcatcgcttcctgaaaaaaacaaagttgaattcaagctaaataaagacacatcgtcattccccggtagacttttacaacatgaccttgaaagaaactactcaagtaggcaagacaaaagctgaccgtatgtcctatcatcaatggggaagaccaccttcgtttgttgaactttcaacacaattttataactcggatacaaaatatttctaatctacagaagttaatatcgttggatttatatgataaccagattgaagaaattagtgggctttcgactctgagatgtcttcgtgtccttctgttggggaaaaacagaatcaagaaaatctcaaatctggagaatctaaaaagcttagatgtcttggatcttcatggaaatcagattaccaaaattgaaaatattaatcatttgtgtgagttgagagttttaaatcttgccaggaactttttaagtcatgttgataatcttaatgggctggattcactaactgaacttaacttgcgacacaatcaaatcactttcgtgagagatgtggataatttgccctgcctccaacatctctttctcagctttaacaatatatctagttttgacagtgtttcctgccttgctgactcttcttccctctcggacatcacctttgatggcaatcccatagctcaagagtcatggtacaaacacactgtccttcagaatatgatgcagctgcgccagctagatatgaagagaatcacggaagaagaaaggcgtatggcatctgttttagccaaaaaagaggaagagaagaagcgggaaagtcataaacaatctttgcttaaggagaagaaaaggttaacaattaacaacgtagctcgacagtgggacttgcaacaacaacgagtagccaatattgctacaaatgaagatagaaaagattctgactctcctcaggacccctgtcagattgatggaagcaccctctctgcattcccagaggaaacagggcctctagactcaggactcaacaatgctttacaaggtttatctgtcatagacacataccttgttgaagtggacggggatacactttccctatatggctcaggagcactggaatctctggataggaattggagtgttcaaacagcaggaatgatcacaacagtctccttcactttcatagaatttgatgaaatcgtccaagtgcttcctaaactgaagattaagtttcctaattctctgcaccttaaattcaaggaaacaaatcttgtaatgctgcagcaatttaacgcactagcccaactccgtcgtattgaccagttgacaattgatcctcaaggaaatccagttgtcaattttacactctggaaatactatgtactgtttaggctaagccatttcagtatgcagaaaataaatggaacagaggtgacacagaatgatatgataatggctgaaaggctctttggaatcctagcacatgtagcatcttctgagttaccccagtatcgtctgatttccattctgggtgatgccaggaaaaagcaatttcggtatctactagaatccaaaggaaaaaaacctggtattatcaacgaagaaaataatgacagcaaaagacttgtaggagaaaacacaaatcgtgctacattaaattatactacaagagacttttataatgaaaagctagaggaaataaaggaaaagaagaaattctgtaaaacatatatagaagaccttgtgaaggaagccacagaaatcaacatgaaaaatgaggctttgcagaagctttggccacagatgttcattgagcttgttagggatgcagtcatagaaattcgcaataaaaattcctatatgaagctctgcctacagcagataacagaccaaaaataaaaatggcctttagttacagttgattttggcagttttattttttgaaggttgaaaatatgcaggttatacatgttaaaacaacaacaacactatcctataaactagaaagactagtataaaagcattattgcccactgttctcatagctaaaagttaagaaggaaggaaggaaagcaggagaaaggaaggattaattgcctgtatgtgaggaccaaacaacctttgggaactaaacagttttcagagatggcgtggcactgcatccttggttcttgctttgattggtgccctgctatagcccaaagcacgtagtatttgctgatgattcagcatgagctgcatctacctacttttagctgataattttcagttatttccctttttattttatgtcatgatttcaaagccaaaaatatgttctttttatgagtgaagaataaacttactaacaaattagtcaaaa

SEQ ID NO: 148130 - DNA, 580 bp, Homo sapiens
  Payload ID: 9315
  Gene Symbol: LRRC49
  Gene Name: leucine rich repeat containing 49
  ENST ID: ENST00000558456
  CDS Start-End: 346-580
aaaagcatgcttaaagaggctagcggcagcgtctctccctgtctcctcagtgctttttaccttgcgagtggtgcagcttgttctgcggatgtactgaaaccctcccatttaatctgcagtggaggagagtggagctcactgtccagtagaaatcagtgatgtagcaatgttgcaagagatgtggataatttgccctgcctccaacatctctttctcagctttaacaatatatctagttttgacagtgtttcctgccttgctgactcttcttccctctcggacatcacctttgatggcaatcccatagctcaagagtcatggtacaaacacactgtccttcagaatatgatgcagctgcgccagctagatatgaagagaatcacggaagaagaaaggcgtatggcatctgttttagccaaaaaagaggaagagaagaagcgggaaagtcataaacaatctttgcttaaggagaagaaaaggttaacaattaacaacgtagctcgacagtgggacttgcaacaacaacgagtagccaatattgctacaaatgaagatagaaaagattctgactctcctcagg

SEQ ID NO: 148131 - DNA, 2531 bp, Homo sapiens
  Payload ID: 9315
  Gene Symbol: LRRC49
  Gene Name: leucine rich repeat containing 49
  ENST ID: ENST00000560691
  CDS Start-End: 1331-2509
ggtgcagccatcacctctatctagttccagaattttttcatcattccaaatggaatccctgtacccattaagcagttacttcccattccctgcttcccttaaatgcctggaagccacaaatatgctttccatctctatggatttgccaatgtggtattttgtgttgaattcaagctaaataaagacacatcgtcattccccggtagacttttacaacatgaccttgaaagaaactactcaagtaggcaagattttaccaagaatataaagaatgtaaaatgaggtccatcacccaaggagcttgtagatttatttgggaagacaagggctacatatctgtggctgaacttacaaagaaagagatgatgcgaggtttacatctgctatccaaaactactttttgtgtatttcctatgcatctcatccacaacaaatgtgacagaactatatgggctggaaatgaaaactgccacgaggtccttatcagcatttggagattcttccattaagacaccttcaaaatccagaatccagcagggctgtcatagtgctggcccaaatatatctggtgatcatattaatttggtgagctcatcattgtcatcatttcctattcttcaacgttcttctgaagagaaaattctttactcagacaggttgagcctagaaagacaaaagctgaccgtatgtcctatcatcaatggggaagaccaccttcgtttgttgaactttcaacacaattttataactcggatacaaaatatttctaatctacagaagttaatatcgttggatttatatgataaccagattgaagaaattagtgggctttcgactctgagatgtcttcgtgtccttctgttggggaaaaacaggggaaattggagaagtcacaaaccttattaccattggctctgtgattcctgagcagtaagcaattacaaaaagaatcaagaaaatctcaaatctggagaatctaaaaagcttagatgtcttggatcttcatggaaatcagattaccaaaattgaaaatattaatcatttgtgtgagttgagagttttaaatcttgccaggaactttttaagtcatgttgataatcttaatgggctggattcactaactgaacttaacttgcgacacaatcaaatcactttcgtgagagatgtggataatttgccctgcctccaacatctctttctcagctttaacaatatatctagttttgacagtgtttcctgccttgctgactcttcttccctctcggacatcacctttgatggcaatcccatagctcaagagtcatggtacaaacacactgtccttcagaatatgatgcagctgcgccagctagatatgaagagaatcacggaagaagaaaggcgtatggcatctgttttagccaaaaaagaggaagagaagaagcgggaaagtcataaacaatctttgcttaaggagaagaaaaggttaacaattaacaacgtagctcgacagtgggacttgcaacaacaacgagtagccaatattgctacaaatgaagatagaaaagattctgactctcctcaggacccctgtcagattgatggaagcaccctctctgcattcccagaggaaacagggcctctagactcaggactcaacaatgctttacaaggtttatctgtcatagacacataccttgttgaagtggacggggatacactttccctatatggctcaggagcactggaatctctggataggaattggagtgttcaaacagcaggaatgatcacaacagtctccttcactttcatagaatttgatgaaatcgtccaagtgcttcctaaactgaagattaagtttcctaattctctgcaccttaaattcaaggaaacaaatcttgtaatgctgcagcaatttaacgcactagcccaactccgtcgtattgaccagttgacaattgatcctcaaggaaatccagttgtcaattttacactctggaaatactatgtactgtttaggctaagccatttcagtatgcagaaaataaatggaacagaggtgacacagaatgatatgataatggctgaaaggctctttggaatcctagcacatgtagcatcttctgagttaccccagtatcgtctgatttccattctgggtgatgccaggaaaaagcaatttcggtatctactagaatccaaaggaaaaaaacctggtattatcaacgaagaaaataatgacagcaaaagacttgtaggagaaaacacaaatcgtgctacattaaattatactacaagagacttttataatgaaaagctagaggaaataaaggaaaagaagaaattctgtaaaacatatatagaagaccttgtgaaggaagccacagaaatcaacatgaaaaatgaggctttgcagaagctttggccacagatgttcattgagcttgttagggatgcagtcatagaaattcgcaataaaaattcctatatgaagctctgcctacagcagataacagaccaaaaataaaaatggcctttagttacagttg

SEQ ID NO: 148132 - DNA, 938 bp, Homo sapiens
  Payload ID: 9315
  Gene Symbol: LRRC49
  Gene Name: leucine rich repeat containing 49
  ENST ID: ENST00000559201
  CDS Start-End: 425-613
ctcctcctccctgcgctgctccccaggagccagtggacacaagcagagggatacaaatttcgcgcgggcagcgctgaggtgggccgtaaagaggaacggaccggaagtggtggtggttatagcaaccagtgtggccagcctcttccccagcttatcctcctcccaatactcccgctctgtttttatgaggctgggaaaatagaacgaggaagtggtgacgcactgggctctcacgaatacaactagaagctgcaacgactgtgtggctctatcgattcgggagaggtccagaccggaaatggtcgtttccatggtaaccctgagcaggttgcctgggagatgacctctttcgggtctctttgaatctccgctgtagcgtcacctggaaggcagatctaacagagaacctggactgtctcctatcatgattcccgggaaatatcgctctgtttctggccgggctgcgaacaacgtgaactgcgggcttcatctggttattcaaacatcatcgcttcctgaaaaaaacaaacatttatacttacctactttctacacactatgtctcaagacacaacatgatttttcctcctttgaccaagttggaaacctctaaccatcacaattcaggttgaattcaagctaaataaagacacatcgtcattccccggtagacttttacaacatgaccttgaaagaaactactcaagtaggcaaggtgatcatattaatttggtgagctcatcattgtcatcatttcctattcttcaacgttcttctgaagagaaaattctttactcagacaggttgagcctagaaagacaaaagctgaccgtatgtcctatcatcaatggggaagaccaccttcgtttgttgaactttcaacacaattttataactcggatacaaaatatttctaatctacagaagttaatatcgtt

SEQ ID NO: 148133 - DNA, 584 bp, Homo sapiens
  Payload ID: 9315
  Gene Symbol: LRRC49
  Gene Name: leucine rich repeat containing 49
  ENST ID: ENST00000557977
  CDS Start-End: 522-584
ttttaactgtgaagagaatttatcattagggactcccacctccttcacctgtctcattgagatgtttatttagacctgaatggcaaatgtcgaaagcctgaggtgaactgcgggcttcatctggttattcaaacatcatcgcttcctgaaaaaaacaaagttgaattcaagctaaataaagacacatcgtcattccccggtagacttttacaacatgaccttgaaagaaactactcaagtaggcaaggtgatcatattaatttggtgagctcatcattgtcatcatttcctattcttcaacgttcttctgaagagaaaattctttactcagacaggttgagcctagaaagacaaaagctgaccgtatgtcctatcatcaatggggaagaccaccttcgtttgttgaactttcaacacaattttataactcggatacaaaatatttctaatctacagaagttaatatcgttggatttatatgataaccagattgaagaaattagtgggctttcgactctgagatgtcttcgtgtccttctgttggggaaaaacagaatcaagaaaatctcaaatctggagaatct

SEQ ID NO: 148134 - DNA, 2958 bp, Homo sapiens
  Payload ID: 9316
  Gene Symbol: LRRC4B
  Gene Name: leucine rich repeat containing 4B
  Uniprot ID: Q9NT99
  ENST ID: ENST00000389201
  CDS Start-End: 138-2279
cccgcagcgggccttgcaccccaaattcctgagcctcattgggggggtcctccccccacgggccgggcatgctgccccccggaaggaacccctctcctcgctccccccagcgtccacgcggagcatgaacattgaggatggcgcgtgcccgcggctccccgtgccccccgctgccgcccggtaggatgtcctggccccacggggcattgctcttcctctggctcttctccccacccctgggggccggtggaggtggagtggccgtgacgtctgccgccggagggggctccccgccggccacctcctgccccgtggcctgctcctgcagcaaccaggccagccgggtgatctgcacacggagagacctggccgaggtcccagccagcatcccggtcaacacgcggtacctgaacctgcaagagaacggcatccaggtgatccggacggacacgttcaagcacctgcggcacctggagattctgcagctgagcaagaacctggtgcgcaagatcgaggtgggcgccttcaacgggctgcccagcctcaacacgctggagctttttgacaaccggctgaccacggtgcccacgcaggccttcgagtacctgtccaagctgcgggagctctggctgcggaacaaccccatcgagagcatcccctcctacgccttcaaccgcgtgccctcgctgcggcgcctggacctgggcgagctcaagcggctggaatacatctcggaggcggccttcgaggggctggtcaacctgcgctacctcaacctgggcatgtgcaacctcaaggacatccccaacctgacggccctggtgcgcctggaggagctggagctgtcgggcaaccggctggacctgatccgcccgggctccttccagggtctcaccagcctgcgcaagctgtggctcatgcacgcccaggtagccaccatcgagcgcaacgccttcgacgacctcaagtcgctggaggagctcaacctgtcccacaacaacctgatgtcgctgccccacgacctcttcacgcccctgcaccgcctcgagcgcgtgcacctcaaccacaacccctggcattgcaactgcgacgtgctctggctgagctggtggctcaaggagacggtgcccagcaacacgacgtgctgcgcccgctgtcatgcgcccgccggcctcaaggggcgctacattggggagctggaccagtcgcatttcacctgctatgcgcccgtcatcgtggagccgcccacggacctcaacgtcaccgagggcatggctgccgagctcaaatgccgcacgggcacctccatgacctccgtcaactggctgacgcccaacggcaccctcatgacccacggctcctaccgcgtgcgcatctccgtcctgcatgacggcacgcttaacttcaccaacgtcaccgtgcaggacacgggccagtacacgtgcatggtgacgaactcagccggcaacaccaccgcctcggccacgctcaacgtctcggccgtggaccccgtggcggccgggggcaccggcagcggcgggggcggccctgggggcagtggtggtgttggagggggcagtggcggctacacctacttcaccacggtgaccgtggagaccctggagacgcagcccggagaggaggccctgcagccgcgggggacggagaaggaaccgccagggcccacgacagacggtgtctggggtgggggccggcctggggacgcggccggccctgcctcgtcttctaccacggcacccgccccgcgctcctcgcggcccacggagaaggcgttcacggtgcccatcacggatgtgacggagaacgccctcaaggacctggacgacgtcatgaagaccaccaaaatcatcatcggctgcttcgtggccatcacgttcatggccgcggtgatgctcgtggccttctacaagctgcgcaagcagcaccagctccacaagcaccacgggcccacgcgcaccgtggagatcatcaacgtggaggacgagctgcccgccgcctcggccgtgtccgtggccgccgcggccgccgtggccagtgggggtggtgtgggcggggacagccacctggccctgcccgccctggagcgagaccacctcaaccaccaccactacgtggctgccgccttcaaggcgcactacagcagcaaccccagcggcgggggctgcgggggcaaaggcccgcctggcctcaactccatccacgaacctctgctcttcaagagcggctccaaggagaacgtgcaagagacgcagatctgaggcggcggggccgggcgggcgaggggcgtggagccccccacccaggtcccagcccgggcgcagcctgaccgggacccctccctcccacagcccagcccaccttctgggaccacgcagggaattggggagaggtggcttccagccccatctggggctcggacccccagtaaggacagggtggggctccaggagcggagtctctgggatcctcgcctcacccccgccaatccccggtgacgggaggggacgtgggacccaggagaagtggcctgagttctccgcgtttcctcctcgctctcccaccaagcgttccgggcccgccgccttccaggggagagaggagctttctccaggggtgtcctttcccctcggccccaaacaccttccttttacggttcagtttttgcagtttgacgcccgtccctccctcccactcctccgccctcaaaactgaagagatggacacgtcgccagagctcccgtcccagcgcccggctctgctcccggccggcggtccctgtcgtcggcgcgggggggagcctccacccgccccagccccacctgccccacagacacttttgatactgaagggaggtttgcgtcaacgactacctgctctgtaattactttaaaaaaaaaacatggaaaaagtaaaaaaatattttttttggtcatgaaa

SEQ ID NO: 148135 - DNA, 3019 bp, Homo sapiens
  Payload ID: 9316
  Gene Symbol: LRRC4B
  Gene Name: leucine rich repeat containing 4B
  Uniprot ID: Q9NT99
  ENST ID: ENST00000599957
  CDS Start-End: 199-2340
atgcggaggtagacatggcagcggcaggcctggaggccggggtgggtgccgtgggctcccacaggccctgcggggtcccccggcctcaaatccaggccctgcgctttgggccagccctttggctaagagggtgtgggctggatcatcgccagggtcttaagagccccccagcgtccacgcggagcatgaacattgaggatggcgcgtgcccgcggctccccgtgccccccgctgccgcccggtaggatgtcctggccccacggggcattgctcttcctctggctcttctccccacccctgggggccggtggaggtggagtggccgtgacgtctgccgccggagggggctccccgccggccacctcctgccccgtggcctgctcctgcagcaaccaggccagccgggtgatctgcacacggagagacctggccgaggtcccagccagcatcccggtcaacacgcggtacctgaacctgcaagagaacggcatccaggtgatccggacggacacgttcaagcacctgcggcacctggagattctgcagctgagcaagaacctggtgcgcaagatcgaggtgggcgccttcaacgggctgcccagcctcaacacgctggagctttttgacaaccggctgaccacggtgcccacgcaggccttcgagtacctgtccaagctgcgggagctctggctgcggaacaaccccatcgagagcatcccctcctacgccttcaaccgcgtgccctcgctgcggcgcctggacctgggcgagctcaagcggctggaatacatctcggaggcggccttcgaggggctggtcaacctgcgctacctcaacctgggcatgtgcaacctcaaggacatccccaacctgacggccctggtgcgcctggaggagctggagctgtcgggcaaccggctggacctgatccgcccgggctccttccagggtctcaccagcctgcgcaagctgtggctcatgcacgcccaggtagccaccatcgagcgcaacgccttcgacgacctcaagtcgctggaggagctcaacctgtcccacaacaacctgatgtcgctgccccacgacctcttcacgcccctgcaccgcctcgagcgcgtgcacctcaaccacaacccctggcattgcaactgcgacgtgctctggctgagctggtggctcaaggagacggtgcccagcaacacgacgtgctgcgcccgctgtcatgcgcccgccggcctcaaggggcgctacattggggagctggaccagtcgcatttcacctgctatgcgcccgtcatcgtggagccgcccacggacctcaacgtcaccgagggcatggctgccgagctcaaatgccgcacgggcacctccatgacctccgtcaactggctgacgcccaacggcaccctcatgacccacggctcctaccgcgtgcgcatctccgtcctgcatgacggcacgcttaacttcaccaacgtcaccgtgcaggacacgggccagtacacgtgcatggtgacgaactcagccggcaacaccaccgcctcggccacgctcaacgtctcggccgtggaccccgtggcggccgggggcaccggcagcggcgggggcggccctgggggcagtggtggtgttggagggggcagtggcggctacacctacttcaccacggtgaccgtggagaccctggagacgcagcccggagaggaggccctgcagccgcgggggacggagaaggaaccgccagggcccacgacagacggtgtctggggtgggggccggcctggggacgcggccggccctgcctcgtcttctaccacggcacccgccccgcgctcctcgcggcccacggagaaggcgttcacggtgcccatcacggatgtgacggagaacgccctcaaggacctggacgacgtcatgaagaccaccaaaatcatcatcggctgcttcgtggccatcacgttcatggccgcggtgatgctcgtggccttctacaagctgcgcaagcagcaccagctccacaagcaccacgggcccacgcgcaccgtggagatcatcaacgtggaggacgagctgcccgccgcctcggccgtgtccgtggccgccgcggccgccgtggccagtgggggtggtgtgggcggggacagccacctggccctgcccgccctggagcgagaccacctcaaccaccaccactacgtggctgccgccttcaaggcgcactacagcagcaaccccagcggcgggggctgcgggggcaaaggcccgcctggcctcaactccatccacgaacctctgctcttcaagagcggctccaaggagaacgtgcaagagacgcagatctgaggcggcggggccgggcgggcgaggggcgtggagccccccacccaggtcccagcccgggcgcagcctgaccgggacccctccctcccacagcccagcccaccttctgggaccacgcagggaattggggagaggtggcttccagccccatctggggctcggacccccagtaaggacagggtggggctccaggagcggagtctctgggatcctcgcctcacccccgccaatccccggtgacgggaggggacgtgggacccaggagaagtggcctgagttctccgcgtttcctcctcgctctcccaccaagcgttccgggcccgccgccttccaggggagagaggagctttctccaggggtgtcctttcccctcggccccaaacaccttccttttacggttcagtttttgcagtttgacgcccgtccctccctcccactcctccgccctcaaaactgaagagatggacacgtcgccagagctcccgtcccagcgcccggctctgctcccggccggcggtccctgtcgtcggcgcgggggggagcctccacccgccccagccccacctgccccacagacacttttgatactgaagggaggtttgcgtcaacgactacctgctctgtaattactttaaaaaaaaaacatggaaaaagtaaaaaaatattttttttggtcatgaaa

SEQ ID NO: 148136 - DNA, 853 bp, Homo sapiens
  Payload ID: 9316
  Gene Symbol: LRRC4B
  Gene Name: leucine rich repeat containing 4B
  ENST ID: ENST00000600381
  CDS Start-End: 138-853
cccgcagcgggccttgcaccccaaattcctgagcctcattgggggggtcctccccccacgggccgggcatgctgccccccggaaggaacccctctcctcgctccccccagcgtccacgcggagcatgaacattgaggatggcgcgtgcccgcggctccccgtgccccccgctgccgcccggtaggatgtcctggccccacggggcattgctcttcctctggctcttctccccacccctgggggccggtggaggtggagtggccgtgacgtctgccgccggagggggctccccgccggccacctcctgccccgtggcctgctcctgcagcaaccaggccagccgggtgatctgcacacggagagacctggccgaggtcccagccagcatcccggtcaacacgcggtacctgaacctgcaagagaacggcatccaggtgatccggacggacacgttcaagcacctgcggcacctggagattctgcagctgagcaagaacctggtgcgcaagatcgaggtgggcgccttcaacgggctgcccagcctcaacacgctggagctttttgacaaccggctgaccacggtgcccacgcaggccttcgagtacctgtccaagctgcgggagctctggctgcggaacaaccccatcgagagcatcccctcctacgccttcaaccgcgtgccctcgctgcggcgcctggacctgggcgagctcaagcggctggaatacatctcggaggcggccttcgaggggctggtcaacctgcgctacctcaacctgggcatgtgcaacctcaaggacatccccaacctgacggccctggtgcgcctggaggagctggagctgtcgggcaa

SEQ ID NO: 148137 - DNA, 4054 bp, Homo sapiens
  Payload ID: 9317
  Gene Symbol: LRRC4C
  Gene Name: leucine rich repeat containing 4C
  Uniprot ID: Q9HCJ2
  ENST ID: ENST00000278198
  CDS Start-End: 1965-3887
aagaaagaggggcagaggagggaaggcgactgcagtccgaaaggagcttttggaagctaggaccctaagcgtcaggacgtggcattggtcgagagaaagcctgggctggcaagagctgccgccggtgctgggagagcatttatttgggagaaaaagaggggagagagcagagggagggggaggaagagagttcaaaccgaagtggatggaaggggactggggtttctgccgcgcagggagccgtgagccagggcgatggcgctaagggcggcgcggagcagctgcgctcccgagaacgcgtctcctcgcagaggactagcagacatcgggaaggtctgcgccaacgggaaccaacttgtggctccaaaatgtacccaacgcagctggaaatgagatcaaagctgcagttgcatttgagaaggatgagaagagccagcgattagggaattttttttttacccgttttcttcctttttctttttttcttctttttctttttttctttcttttttcgtgtgtgttttttttaatttgcctaccaccctgtctgtcccctcacttcgccctccccatttgaaataaaagccccagtctcaacttccatcacctcggcgctcccggagccactaccggctgatggaggagaaggggacccgggggctggcaggggccaccggcgagggaccgcatcctgcgtctcccccgtgatcccggccccgaccgcggagttctgcaacacctggaggatctggaccgggtgctgggggtgggggcggggacagaggaaggaaaggcaccccgagccttaaaaagaaaaaaaaaaagtagcggggggaggaatgggtttcttcttgacagctgacggagccttgaaattttcctccactacctccgcccccgcccccgcccccgccccccgcactccatttaacgtgagattatgaaattgcagaggcggtggagggaaggagacaggatataaccggagtttggaggggagaggggaaggtggctggccgggtggctgaaatcaaaaattcaattgcgcactgggttgtgatgagaaatctaatcagatctttggcgaaggggccggccggaaggatggagagtgggggggaagttgctccccaaattcttcgaaggggaggctggggagaggaattgaccatgtaaaaggagacttttttttttggtggtggtggctgttgggtgccttgcaaaaatgaaggatgcaggacgcagctttctcctggaaccgaacgcaatggataaactgattgtgcaagagagaaggaagaacgaagctttttcttgtgagccctggatcttaacacaaatgtgtatatgtgcacacagggagcattcaagaatgaaataaaccagagttagacccgcgggggttggtgtgttctgacataaataaataatcttaaagcagctgttcccctccccccccccaaaaaaaaggatgattggaaatgaagaaccgaggattcacaaagaaaaaagtatgttcatttttctctataaaggagaaagtgagccaaggagatatttttggaatgaaaagtttggggcttttttagtaaagtaaagaactggtgtggtggtgttttcttttctttttgaatttcccacaagaggagaggaaattaataatacatctgcaaagaaatttcagagaagaaaagttgaccgcggcagattgaggcattgattgggggagagaaaccagcagagcacagttggatttgtgcctatgttgactaaaattgacggataattgcagttggatttttcttcatcaacctcctttttttttaatttttattccttttggtatcaagatcatgcgttttctcttgttcttaaccacctggatttccatctggatgttgctgtgatcagtctgaaatacaactgtttgaattccagaaggaccaacaccagataaattatgaatgttgaacaagatgaccttacatccacagcagataatgataggtcctaggtttaacagggccctatttgaccccctgcttgtggtgctgctggctcttcaacttcttgtggtggctggtctggtgcgggctcagacctgcccttctgtgtgctcctgcagcaaccagttcagcaaggtgatttgtgttcggaaaaacctgcgtgaggttccggatggcatctccaccaacacacggctgctgaacctccatgagaaccaaatccagatcatcaaagtgaacagcttcaagcacttgagacacttggaaatcctacagttgagtaggaaccatatcagaaccattgaaattggggctttcaatggtctggcgaacctcaacactctggaactctttgacaatcgtcttactaccatcccgaatggagcttttgtatacttgtctaaactgaaggagctctggttgcgaaacaaccccattgaaagcatcccttcttatgcttttaacagaattccttctttgcgccgactagacttaggggaattgaaaagactttcatacatctcagaaggtgcctttgaaggtctgtccaacttgaggtatttgaaccttgccatgtgcaaccttcgggaaatccctaacctcacaccgctcataaaactagatgagctggatctttctgggaatcatttatctgccatcaggcctggctctttccagggtttgatgcaccttcaaaaactgtggatgatacagtcccagattcaagtgattgaacggaatgcctttgacaaccttcagtcactagtggagatcaacctggcacacaataatctaacattactgcctcatgacctcttcactcccttgcatcatctagagcggatacatttacatcacaacccttggaactgtaactgtgacatactgtggctcagctggtggataaaagacatggccccctcgaacacagcttgttgtgcccggtgtaacactcctcccaatctaaaggggaggtacattggagagctcgaccagaattacttcacatgctatgctccggtgattgtggagccccctgcagacctcaatgtcactgaaggcatggcagctgagctgaaatgtcgggcctccacatccctgacatctgtatcttggattactccaaatggaacagtcatgacacatggggcgtacaaagtgcggatagctgtgctcagtgatggtacgttaaatttcacaaatgtaactgtgcaagatacaggcatgtacacatgtatggtgagtaattccgttgggaatactactgcttcagccaccctgaatgttactgcagcaaccactactcctttctcttacttttcaaccgtcacagtagagactatggaaccgtctcaggatgaggcacggaccacagataacaatgtgggtcccactccagtggtcgactgggagaccaccaatgtgaccacctctctcacaccacagagcacaaggtcgacagagaaaaccttcaccatcccagtgactgatataaacagtgggatcccaggaattgatgaggtcatgaagactaccaaaatcatcattgggtgttttgtggccatcacactcatggctgcagtgatgctggtcattttctacaagatgaggaagcagcaccatcggcaaaaccatcacgccccaacaaggactgttgaaattattaatgtggatgatgagattacgggagacacacccatggaaagccacctgcccatgcctgctatcgagcatgagcacctaaatcactataactcatacaaatctcccttcaaccacacaacaacagttaacacaataaattcaatacacagttcagtgcatgaaccgttattgatccgaatgaactctaaagacaatgtacaagagactcaaatctaaaacatttacagagttacaaaaaacaaacaatcaaaaaaaaagacagtttattaaaaatgacacaaatgactgggctaaatctactgtttcaaaaaagtgtctttacaaaaaaacaaaaaagaaaagaaatttatttattaaaaattctattgtgatctaaagcagac

SEQ ID NO: 148138 - DNA, 583 bp, Homo sapiens
  Payload ID: 9317
  Gene Symbol: LRRC4C
  Gene Name: leucine rich repeat containing 4C
  ENST ID: ENST00000533474
  CDS Start-End: 461-583
acttctcaggcaaagagcatgccaacagcctttctcttctgctttgcttgtctgtggtggatactagcaacctatgtggttctaaagtatcaagctgagattatagtatcaatgagttggaacatcaatagtgccaagtgccatttaaaaatcttttcatcttcttgtgtgttgcttttggagaggaaatgttttcagatgtggtttctagccttgcagaaaaatggcattttcaggctgtatgggactcttacatcatctagtttcaatcacctcattttgcagagcaagaaactgagagtgagaaagaagggactggccagagttactcagctagacagtgacagacaacagtggaacttctgattggcaaacgcactgcctacttacagcatagagacccccagtggagagctagactgtttgaattccagaaggaccaacaccagataaattatgaatgttgaacaagatgaccttacatccacagcagataatgataggtcctaggtttaacagggccctatttgaccccctgcttgtggtgctgctggctcttcaacttcttgtggtggctggtctg

SEQ ID NO: 148139 - DNA, 2669 bp, Homo sapiens
  Payload ID: 9317
  Gene Symbol: LRRC4C
  Gene Name: leucine rich repeat containing 4C
  Uniprot ID: Q9HCJ2
  ENST ID: ENST00000530763
  CDS Start-End: 670-2592
ggtatttcgtacagtaggagatttcaacaacgtgacaatattctctaggcacttgggctcactgtctgtagcccccaccccccgcctttcgccacctccttgcttccctactcccccttctgcttttgcctttgatgagtttttggcttactttttggcggagtctcttggacacgtttttgctggtgctggaagatcagatacatggaacctttgaaaactgattatttttctccgatatgacttaaaaaaaaataaaaagaagaaaagaaaatagagtagtgcacggcaagctagaggattgtaaattttccttggtgaactttgaggatccataaagaaggagttactggaaaagcaagaataacttatgcggattaacaatatggaaacatcctgagactactttggaatcgccataaattaagtgggttccagttttgcaaacagagaaacgggtccatgaacaatttgctacaggtataaagaagtatctgcagaaatccagagcacttattaaacttctttgagttttctcaggaagatcaatacctgttggagaaattttactaagattggcaaacgcactgcctacttacagcatagagacccccagtggagagctagactgtttgaattccagaaggaccaacaccagataaattatgaatgttgaacaagatgaccttacatccacagcagataatgataggtcctaggtttaacagggccctatttgaccccctgcttgtggtgctgctggctcttcaacttcttgtggtggctggtctggtgcgggctcagacctgcccttctgtgtgctcctgcagcaaccagttcagcaaggtgatttgtgttcggaaaaacctgcgtgaggttccggatggcatctccaccaacacacggctgctgaacctccatgagaaccaaatccagatcatcaaagtgaacagcttcaagcacttgagacacttggaaatcctacagttgagtaggaaccatatcagaaccattgaaattggggctttcaatggtctggcgaacctcaacactctggaactctttgacaatcgtcttactaccatcccgaatggagcttttgtatacttgtctaaactgaaggagctctggttgcgaaacaaccccattgaaagcatcccttcttatgcttttaacagaattccttctttgcgccgactagacttaggggaattgaaaagactttcatacatctcagaaggtgcctttgaaggtctgtccaacttgaggtatttgaaccttgccatgtgcaaccttcgggaaatccctaacctcacaccgctcataaaactagatgagctggatctttctgggaatcatttatctgccatcaggcctggctctttccagggtttgatgcaccttcaaaaactgtggatgatacagtcccagattcaagtgattgaacggaatgcctttgacaaccttcagtcactagtggagatcaacctggcacacaataatctaacattactgcctcatgacctcttcactcccttgcatcatctagagcggatacatttacatcacaacccttggaactgtaactgtgacatactgtggctcagctggtggataaaagacatggccccctcgaacacagcttgttgtgcccggtgtaacactcctcccaatctaaaggggaggtacattggagagctcgaccagaattacttcacatgctatgctccggtgattgtggagccccctgcagacctcaatgtcactgaaggcatggcagctgagctgaaatgtcgggcctccacatccctgacatctgtatcttggattactccaaatggaacagtcatgacacatggggcgtacaaagtgcggatagctgtgctcagtgatggtacgttaaatttcacaaatgtaactgtgcaagatacaggcatgtacacatgtatggtgagtaattccgttgggaatactactgcttcagccaccctgaatgttactgcagcaaccactactcctttctcttacttttcaaccgtcacagtagagactatggaaccgtctcaggatgaggcacggaccacagataacaatgtgggtcccactccagtggtcgactgggagaccaccaatgtgaccacctctctcacaccacagagcacaaggtcgacagagaaaaccttcaccatcccagtgactgatataaacagtgggatcccaggaattgatgaggtcatgaagactaccaaaatcatcattgggtgttttgtggccatcacactcatggctgcagtgatgctggtcattttctacaagatgaggaagcagcaccatcggcaaaaccatcacgccccaacaaggactgttgaaattattaatgtggatgatgagattacgggagacacacccatggaaagccacctgcccatgcctgctatcgagcatgagcacctaaatcactataactcatacaaatctcccttcaaccacacaacaacagttaacacaataaattcaatacacagttcagtgcatgaaccgttattgatccgaatgaactctaaagacaatgtacaagagactcaaatctaaaacatttacagagttacaaaaaacaaacaatcaaaaaaaaagacagtttattaaaaatgacacaaatgactgggcta

SEQ ID NO: 148140 - DNA, 3085 bp, Homo sapiens
  Payload ID: 9317
  Gene Symbol: LRRC4C
  Gene Name: leucine rich repeat containing 4C
  Uniprot ID: Q9HCJ2
  ENST ID: ENST00000527150
  CDS Start-End: 1034-2956
ggagtttggaggggagaggggaaggtggctggccgggtggctgaaatcaaaaattcaattgcgcactgggttgtgatgagaaatctaatcagatctttggcgaaggggccggccggaaggatggagagtgggggggaagttgctccccaaattcttcgaaggggaggctggggagaggaattgaccatgtaaaaggagacttttttttttggtggtggtggctgttgggtgccttgcaaaaatgaaggatgcaggacgcagctttctcctggaaccgaacgcaatggataaactgattgtgcaagagagaaggaagaacgaagctttttcttgtgagccctggatcttaacacaaatgtgtatatgtgcacacagggagcattcaagaatgaaataaaccagagttagacccgcgggggttggtgtgttctgacataaataaataatcttaaagcagctgttcccctccccccccccaaaaaaaaggatgattggaaatgaagaaccgaggattcacaaagaaaaaagtatgttcatttttctctataaaggagaaagtgagccaaggagatatttttggaatgaaaagtttggggcttttttagtaaagtaaagaactggtgtggtggtgttttcttttctttttgaatttcccacaagaggagaggaaattaataatacatctgcaaagaaatttcagagaagaaaagttgaccgcggcagattgaggcattgattgggggagagaaaccagcagagcacagttggatttgtgcctatgttgactaaaattgacggataattgcagttggatttttcttcatcaacctcctttttttttaatttttattccttttggtatcaagatcatgcgttttctcttgttcttaaccacctggatttccatctggatgttgctgtgatcagtctgaaatacaattggcaaacgcactgcctacttacagcatagagacccccagtggagagctagactgtttgaattccagaaggaccaacaccagataaattatgaatgttgaacaagatgaccttacatccacagcagataatgataggtcctaggtttaacagggccctatttgaccccctgcttgtggtgctgctggctcttcaacttcttgtggtggctggtctggtgcgggctcagacctgcccttctgtgtgctcctgcagcaaccagttcagcaaggtgatttgtgttcggaaaaacctgcgtgaggttccggatggcatctccaccaacacacggctgctgaacctccatgagaaccaaatccagatcatcaaagtgaacagcttcaagcacttgagacacttggaaatcctacagttgagtaggaaccatatcagaaccattgaaattggggctttcaatggtctggcgaacctcaacactctggaactctttgacaatcgtcttactaccatcccgaatggagcttttgtatacttgtctaaactgaaggagctctggttgcgaaacaaccccattgaaagcatcccttcttatgcttttaacagaattccttctttgcgccgactagacttaggggaattgaaaagactttcatacatctcagaaggtgcctttgaaggtctgtccaacttgaggtatttgaaccttgccatgtgcaaccttcgggaaatccctaacctcacaccgctcataaaactagatgagctggatctttctgggaatcatttatctgccatcaggcctggctctttccagggtttgatgcaccttcaaaaactgtggatgatacagtcccagattcaagtgattgaacggaatgcctttgacaaccttcagtcactagtggagatcaacctggcacacaataatctaacattactgcctcatgacctcttcactcccttgcatcatctagagcggatacatttacatcacaacccttggaactgtaactgtgacatactgtggctcagctggtggataaaagacatggccccctcgaacacagcttgttgtgcccggtgtaacactcctcccaatctaaaggggaggtacattggagagctcgaccagaattacttcacatgctatgctccggtgattgtggagccccctgcagacctcaatgtcactgaaggcatggcagctgagctgaaatgtcgggcctccacatccctgacatctgtatcttggattactccaaatggaacagtcatgacacatggggcgtacaaagtgcggatagctgtgctcagtgatggtacgttaaatttcacaaatgtaactgtgcaagatacaggcatgtacacatgtatggtgagtaattccgttgggaatactactgcttcagccaccctgaatgttactgcagcaaccactactcctttctcttacttttcaaccgtcacagtagagactatggaaccgtctcaggatgaggcacggaccacagataacaatgtgggtcccactccagtggtcgactgggagaccaccaatgtgaccacctctctcacaccacagagcacaaggtcgacagagaaaaccttcaccatcccagtgactgatataaacagtgggatcccaggaattgatgaggtcatgaagactaccaaaatcatcattgggtgttttgtggccatcacactcatggctgcagtgatgctggtcattttctacaagatgaggaagcagcaccatcggcaaaaccatcacgccccaacaaggactgttgaaattattaatgtggatgatgagattacgggagacacacccatggaaagccacctgcccatgcctgctatcgagcatgagcacctaaatcactataactcatacaaatctcccttcaaccacacaacaacagttaacacaataaattcaatacacagttcagtgcatgaaccgttattgatccgaatgaactctaaagacaatgtacaagagactcaaatctaaaacatttacagagttacaaaaaacaaacaatcaaaaaaaaagacagtttattaaaaatgacacaaatgactgggctaaatctactgtttcaaaaaagtgtctttacaaaaaaacaaaaaagaaaagaaa

SEQ ID NO: 148141 - DNA, 2650 bp, Homo sapiens
  Payload ID: 9317
  Gene Symbol: LRRC4C
  Gene Name: leucine rich repeat containing 4C
  Uniprot ID: Q9HCJ2
  ENST ID: ENST00000528697
  CDS Start-End: 651-2573
ctggaagatcagatacatggaacctttgaaaactgattatttttctccgatatgacttaaaaaaaaataaaaagaagaaaagaaaatagagtagtgcacggcaagctagaggattgtaaattttccttggtgaactttgaggatccataaagaagaaatggttctctttactgcgaggctgcaaggtcacccaatgagagaggggccaaataagctggaacatcatctaatacactgaatgtaggagttactggaaaagcaagaataacttatgcggattaacaatatggaaacatcctgagactactttggaatcgccataaattaagtgggttccagttttgcaaacagagaaacgggtccatgaacaatttgctacaggtataaagaagtatctgcagaaatccagagcacttattaaacttctttgagttttctcaggaagatcaatacctgttggagaaattttactaagagcaagaaactgagagtgagaaagaagggactggccagagttactcagctagacagtgacagacaacagtggaacttctgattggcaaacgcactgcctacttacagcatagagacccccagtggagagctagactgtttgaattccagaaggaccaacaccagataaattatgaatgttgaacaagatgaccttacatccacagcagataatgataggtcctaggtttaacagggccctatttgaccccctgcttgtggtgctgctggctcttcaacttcttgtggtggctggtctggtgcgggctcagacctgcccttctgtgtgctcctgcagcaaccagttcagcaaggtgatttgtgttcggaaaaacctgcgtgaggttccggatggcatctccaccaacacacggctgctgaacctccatgagaaccaaatccagatcatcaaagtgaacagcttcaagcacttgagacacttggaaatcctacagttgagtaggaaccatatcagaaccattgaaattggggctttcaatggtctggcgaacctcaacactctggaactctttgacaatcgtcttactaccatcccgaatggagcttttgtatacttgtctaaactgaaggagctctggttgcgaaacaaccccattgaaagcatcccttcttatgcttttaacagaattccttctttgcgccgactagacttaggggaattgaaaagactttcatacatctcagaaggtgcctttgaaggtctgtccaacttgaggtatttgaaccttgccatgtgcaaccttcgggaaatccctaacctcacaccgctcataaaactagatgagctggatctttctgggaatcatttatctgccatcaggcctggctctttccagggtttgatgcaccttcaaaaactgtggatgatacagtcccagattcaagtgattgaacggaatgcctttgacaaccttcagtcactagtggagatcaacctggcacacaataatctaacattactgcctcatgacctcttcactcccttgcatcatctagagcggatacatttacatcacaacccttggaactgtaactgtgacatactgtggctcagctggtggataaaagacatggccccctcgaacacagcttgttgtgcccggtgtaacactcctcccaatctaaaggggaggtacattggagagctcgaccagaattacttcacatgctatgctccggtgattgtggagccccctgcagacctcaatgtcactgaaggcatggcagctgagctgaaatgtcgggcctccacatccctgacatctgtatcttggattactccaaatggaacagtcatgacacatggggcgtacaaagtgcggatagctgtgctcagtgatggtacgttaaatttcacaaatgtaactgtgcaagatacaggcatgtacacatgtatggtgagtaattccgttgggaatactactgcttcagccaccctgaatgttactgcagcaaccactactcctttctcttacttttcaaccgtcacagtagagactatggaaccgtctcaggatgaggcacggaccacagataacaatgtgggtcccactccagtggtcgactgggagaccaccaatgtgaccacctctctcacaccacagagcacaaggtcgacagagaaaaccttcaccatcccagtgactgatataaacagtgggatcccaggaattgatgaggtcatgaagactaccaaaatcatcattgggtgttttgtggccatcacactcatggctgcagtgatgctggtcattttctacaagatgaggaagcagcaccatcggcaaaaccatcacgccccaacaaggactgttgaaattattaatgtggatgatgagattacgggagacacacccatggaaagccacctgcccatgcctgctatcgagcatgagcacctaaatcactataactcatacaaatctcccttcaaccacacaacaacagttaacacaataaattcaatacacagttcagtgcatgaaccgttattgatccgaatgaactctaaagacaatgtacaagagactcaaatctaaaacatttacagagttacaaaaaacaaacaatcaaaaaaaaagacagtttattaaaaatgacacaaatgactgggcta

SEQ ID NO: 148142 - DNA, 2286 bp, Homo sapiens
  Payload ID: 9317
  Gene Symbol: LRRC4C
  Gene Name: leucine rich repeat containing 4C
  Uniprot ID: Q9HCJ2
  ENST ID: ENST00000619527
  CDS Start-End: 199-2121
ttcctgcaggtataaagaagtatctgcagaaatccagagcacttattaaacttctttgagttttctcaggaagatcaatacctgttggagaaattttactaagattggcaaacgcactgcctacttacagcatagagacccccagtggagagctagactgtttgaattccagaaggaccaacaccagataaattatgaatgttgaacaagatgaccttacatccacagcagataatgataggtcctaggtttaacagggccctatttgaccccctgcttgtggtgctgctggctcttcaacttcttgtggtggctggtctggtgcgggctcagacctgcccttctgtgtgctcctgcagcaaccagttcagcaaggtgatttgtgttcggaaaaacctgcgtgaggttccggatggcatctccaccaacacacggctgctgaacctccatgagaaccaaatccagatcatcaaagtgaacagcttcaagcacttgagacacttggaaatcctacagttgagtaggaaccatatcagaaccattgaaattggggctttcaatggtctggcgaacctcaacactctggaactctttgacaatcgtcttactaccatcccgaatggagcttttgtatacttgtctaaactgaaggagctctggttgcgaaacaaccccattgaaagcatcccttcttatgcttttaacagaattccttctttgcgccgactagacttaggggaattgaaaagactttcatacatctcagaaggtgcctttgaaggtctgtccaacttgaggtatttgaaccttgccatgtgcaaccttcgggaaatccctaacctcacaccgctcataaaactagatgagctggatctttctgggaatcatttatctgccatcaggcctggctctttccagggtttgatgcaccttcaaaaactgtggatgatacagtcccagattcaagtgattgaacggaatgcctttgacaaccttcagtcactagtggagatcaacctggcacacaataatctaacattactgcctcatgacctcttcactcccttgcatcatctagagcggatacatttacatcacaacccttggaactgtaactgtgacatactgtggctcagctggtggataaaagacatggccccctcgaacacagcttgttgtgcccggtgtaacactcctcccaatctaaaggggaggtacattggagagctcgaccagaattacttcacatgctatgctccggtgattgtggagccccctgcagacctcaatgtcactgaaggcatggcagctgagctgaaatgtcgggcctccacatccctgacatctgtatcttggattactccaaatggaacagtcatgacacatggggcgtacaaagtgcggatagctgtgctcagtgatggtacgttaaatttcacaaatgtaactgtgcaagatacaggcatgtacacatgtatggtgagtaattccgttgggaatactactgcttcagccaccctgaatgttactgcagcaaccactactcctttctcttacttttcaaccgtcacagtagagactatggaaccgtctcaggatgaggcacggaccacagataacaatgtgggtcccactccagtggtcgactgggagaccaccaatgtgaccacctctctcacaccacagagcacaaggtcgacagagaaaaccttcaccatcccagtgactgatataaacagtgggatcccaggaattgatgaggtcatgaagactaccaaaatcatcattgggtgttttgtggccatcacactcatggctgcagtgatgctggtcattttctacaagatgaggaagcagcaccatcggcaaaaccatcacgccccaacaaggactgttgaaattattaatgtggatgatgagattacgggagacacacccatggaaagccacctgcccatgcctgctatcgagcatgagcacctaaatcactataactcatacaaatctcccttcaaccacacaacaacagttaacacaataaattcaatacacagttcagtgcatgaaccgttattgatccgaatgaactctaaagacaatgtacaagagactcaaatctaaaacatttacagagttacaaaaaacaaacaatcaaaaaaaaagacagtttattaaaaatgacacaaatgactgggctaaatctactgtttcaaaaaagtgtctttacaaaaaaacaaaaaagaaaagaaatttatttattaaaaattctattgtgatctaaagcag

SEQ ID NO: 148143 - DNA, 1369 bp, Homo sapiens
  Payload ID: 9318
  Gene Symbol: LRRC52
  Gene Name: leucine rich repeat containing 52
  Uniprot ID: Q8N7C0
  ENST ID: ENST00000294818
  CDS Start-End: 291-1232
acttgcaaacgcagggaaagggtgagacctttcaaagctgccaagtgggcaagcttccagcagcagtctgggagcgagcgacagagccaccaagctgggcggcagggcattgagcctcgcgtttcaatttctgttcagttctcctgtaatggaaaattgctttgcacaaagctaaagtgttacagttctttccagagcccctcccccgccccacccccccaccggcagccttcggatcagaggacagagcccgcaggaaggtgaaaggagggtggttgtggcttcttactatgtcccttgcttcaggccctggccctgggtggttactcttttcctttggaatggggctggtatcagggtcaaagtgtccaaataattgtctgtgtcaagcccaagaagtaatctgcacagggaagcagttaaccgaatacccccttgacatacccctgaacacccggaggctgttcctgaacgagaacagaatcactagtttgccagcaatgcatctaggactcctcagtgaccttgtttatttggactgtcagaacaaccggattcgagaggtgatggattataccttcatcggggtcttcaaactcatctaccttgacctcagctccaacaacctaacctcgatctccccattcactttctcggtgctcagcaacctggtgcagctgaacattgccaacaaccctcacctgttatcgcttcacaagttcacctttgccaacaccacctctttgaggtacctggacctcagaaataccggcttgcagaccctggacagtgctgccttataccacctcactactctggagaccctgtttctgagtggaaacccctggaagtgcaactgctctttcctggacttcgccatcttcttaatagtgttccatatggacccctcagatgatctaaatgccacatgtgtggagcccacagagctgacagggtggcccatcacccgggtggggaacccactccgatacatgtgcatcacgcacctggaccacaaagactacatcttcctgctgctcatcggcttctgcatcttcgccgcgggaactgtggctgcctggctcacaggtgtgtgtgctgtgctctaccagaacacccgccacaagtcgagtgaagaagatgaggacgaggccgggactagggtggaagtcagccggcggatttttcaaacccagacgagctcggtccaggagttccctcagcttatttagttgccagagaccactatcttatgtgcctcccccaggctccctgctttctctcttgccctccccatcccaccaccttggagctgtcatagagattgaaaccttctagtaaaataaataaaatctctgatggccatttc

SEQ ID NO: 148144 - DNA, 3859 bp, Homo sapiens
  Payload ID: 9319
  Gene Symbol: LRRC53
  Gene Name: leucine rich repeat containing 53
  Uniprot ID: A6NM62
  ENST ID: ENST00000294635
  CDS Start-End: 116-3859
gatgctggacagttaactcagtaggtctcagattcatcatccaccttttaatgtagagattcacaaactacaagctgtgagacctttgggtggatggctggtactctttgccatcatgttgcggttggtggcagcttgccctgagtcatgtgtggtgtgcaccaaagatgtaaccctctgtcaccagctaacctatatagtagcagcccctatgaccacgagggttttaatcatcaccgatggatatctctcctctattgagagcacaaacctgtctctcttgtttaatcttgccctgctctccctaagcagaaatggtatcgaggatgttcaggaagatgccctgcatgggcttacgatgttgcggaccttgttgctggagcacaaccaaatatccagctcttcgctcactgatcacaccttcagcaagcttcacagcctgcaggtactggtgctgagcaataatgctctccgcaccctacgagggtcttggttccgaaacacaagcggcctgacccggctccagctggatgggaatcagattactaatctcacagacagttctttcggaggcacgaatctccacagtctcaggtatctggatttatccaacaattttatttcctacattgggaaagatgccttccggcccctgcctcaactacaggaagtggacctttcccgaaataggttagcccacatgccggatgtgtttactccactgaagcagttaatccttctgagcttagataagaaccagtggagctgcacttgtgatctccatccccttgctcggtttttaagaaactacattaagtcttctgctcacacgctcaggaatgccaaggacctaaattgccagccatctaccgcagctgtggcagctgcacagagtgtgctgaggctgtctgagaccaactgtgattccaaagctcccaacttcactctggttctaaaggacagaagtcccctcctcccaggaccagatgtggccctgctgactgtccttggcttcgcaggagctgttggtctcacttgcctaggtttagttgtatttaactggaaactccaccaaggcaaagcaaatgaacacacatcagaaaacctttgttgcagaaccttcgatgaacccctgtgtgctcatgaggcaagaaattaccacactaagggatactgcaactgccacttaactcaggaaaacgagataaaggtcatgtccactgtggggtccagaaaagaaatgccacttttacaggaaaatagccatcaagcaacatcggcctctgagtctgcaacccttgacggatcatttagaaacctgaaaaagaaagaccgtggggtaggcagcactttattttgccaggatggtagattgctgcattcggaatgttcagagcctcctggaaatatgagagcttttaatgaagcaggcttacttacaacatataatccaaggaaagttcaaaagctatggaatcttgagcctggagaagtccagcctcaaactctgcaacaccatataataagaacagaagatatcagcagtgacatatttagaagaagatatgcaacacccgcttcagccttggcaggagaaagtcttgagaagcgtttaacaaatgaatcatggcagcctccaatagaaaaagaagacaatggcttacaccctcataggcaaagacattttattacaagctcatcatccaagccttgtgagcctgaggaacactatgtacaaaagatcgtacaaaaaaatagatcaaaatatgatgatccttgtggactgttaaaacagagcaaacctaggtattttcagccaaacaattctcttatctgtaaatatgtgccctgtgagcaatttgaagattacatgaaagaaaagaagccaaatcgtagacaacactcaaagcctgagaaagagcaaatccaaattaacagtgcaatagaaaaatttcttatgagtgaggacaacatagatttatcaggattatcaacaaaaaccaagaaagcatattccccaaagagggttatcttccatgatcctgatttagtagaaataaataggtcgatgatgtcacccaaaatatcaaccccttggaaacgacagaaaaatcaaagtaaccaactgactaagttggatgttaaaaaatttagcaacactggggagagaaacaaaggagaaaaatggtttactaattcatgggttctgaaaaggaagagaacccctcagtctgacctcaaagggaaaattaaaggacaaaacttaaaattaaatttacatccttttagaaaagtcagagtccatccagaaaaatccttgtcaagtctcccaaagcaatgcaagcaggtattgttgcctcctaagaaattatccaaaacttctgagacagaagccaaaataaatactgtgtgttctgcagattttcttcaacagtcagagagtagcaactatgttagactcacttcaaagaggctgcctctgaaacatgactcaaagcagaccccatattatcaacgaaacactaaacgtgcccccctgctcagtgctaacaacttgcgtgtagtcaaccagagctctatagaaagcagctgttactcagctggccacattcctgatggaaacacatcaaaattgccccaacctacacccactgatgctgagcacaggcactcacattctcaattctcaactgagcaaatggaagatgcaactcagcttgaatcaaaagtgcttagttatttagcaactacttgggaaaatacaggaagtgatgttttaccattccaacattccaggagggctactgaccaagggacaacggagtccactgagcacatgggacagaatgtatcaaagaccagtgagttaaatcagttttctttgtccccgaggaatcaaacacaacttttagatgctcacaagactgacagctacaacaaggaatacactttagaccaaaatgaagccttacaacacagagagcaaaattcaagtcatgcacagcttgaaaataaagaaaaaacattaatgacaaaaccccaaatatcacatcaaattgtggaaaattgtattatggataaggaagaaaatgatgtagaaaaaaaactttcaaaaacagaaacttatgattcctctctcattccccaaacacaatccaagaacaacctatcatttatgaagacaaattcaattccataccaaaatagaatagaacttcccaaggatatcagtacttctcctgttagtagtcaagccgtttggcacctaaccaatagtagcgaaaaaggaattgacagcacaaatgcattgcccagaaatgacggcactgaagcactagagataaaaatagtagggaaagaagagaaaaatatgcttgatgaaagcaagacagattctagtatgttaactcagatctcacaaatgaccttaaaaggcatcacaaaagaaaggcagcaaacttgggaaaatggaacaagtgaaaaatatatattacatgatgcaagctctgccgaggagaccattacagctaaagatttaagtatcacaagttcccatgaaacccaaaatagaatactttgcagtgaagtagatcctgaagttaacagtaatgtacataattttagagaagttcaaaatattcaaccagataaagatagtgcacataaagaaggcgcaatgacagtggagacacatgaagcgctttccttcttaccagggttaaaagacagttttgaggcagaaaatgaggtgtttttagttcctagcagaataaatgaagctgaaaactctgctccaaaacctgtactgtatccaccatctgctgaatatgctactacatcacctttagaaacagaataa

SEQ ID NO: 148145 - DNA, 5410 bp, Homo sapiens
  Payload ID: 9320
  Gene Symbol: LRRC55
  Gene Name: leucine rich repeat containing 55
  Uniprot ID: Q6ZSA7
  ENST ID: ENST00000497933
  CDS Start-End: 148-1173
ttctcaggttttgatcatcattccagaccctaggggacctcaactgggtgtcttgccccctaggctccggaaggggacctcccgtggatctcaggaagccctctggtgctcagaggctcctgggaaagtccctagccatgataccacatgctcagaagccccaccttcacagacgctggccccagatgtagctgccttcctgtgtcacagactctcgattccatggacacagtcctcatgggctccctccagcactgctgttgcctgctgcctaagatgggtgacacttgggcccagcttccctggcccgggccaccccacccagcaatgctgctgatctccctcctcttggcagccgggttgatgcactcggatgccggcaccagctgccccgtcctttgcacatgccgtaaccaggtggtggattgtagcagccagcggctattctccgtgcccccagacctgccaatggacacccgaaacctcagcctggcccacaaccgcatcacagcagtgccgcctggctacctcacatgctacatggagctccaggtgctggatttgcacaacaactccttaatggagctgccccggggcctcttcctccatgccaagcgcttggcacacttggacctgagctacaacaatttcagccatgtgccagccgacatgttccaggaggcccatgggctagtccacatcgacctgagccacaacccctggctgcggagggtgcatccccaggcctttcagggcctcatgcagctccgagacctggacctcagttatgggggcctggccttcctcagcctggaggctcttgagggcctaccggggctggtgaccctgcagatcggtggcaatccctgggtgtgtggctgcaccatggaacccctgctgaagtggctgcgaaaccggatccagcgctgtacagcagattctcagctggctgagtgccggggccctcctgaagtcgagggcgccccgctcttctcactcactgaggagagcttcaaggcctgccacctgaccctgaccctggatgattacctattcattgcgttcgtgggcttcgtggtctccattgcttctgtggccaccaacttcctcctgggcatcactgccaactgctgccaccgctggagcaaggccagtgaagaggaagagatctgacatgcctgcctctcatccctccatgctgctgaccgccacagctgctggccaccagacgccctccctgactgctcactctggttccatggtgacctggctgcctcagtcatggttcaagcaaggtggggacactcattttgtatgagcatctgctttgggccaggcggcacgctaggaattgggaacatcagatgaactgactcagtccctgccctcaaggcacttccctctggtcaaggagagagatccaaaaactattccctttaagactatatgtcaggactctgagcacgtcattatggaggcccagaggaggagccatcatctgtatctagcaatgtccatgagaattataagattagagtgatttgtgaactgggtcatcaggaaatatctactttgtcaggtaggcaaagaagggtgtctgcacatggcagaggccagaatatgcatagtgtgctgtgttgagaagagtgaacagttcctggtcacttacttgtatagagggggtgtggcacagaactcaaacctacccctcacctcctgacaccaaaactgtcagctctcagcaatgccagccactgcctacagggagtaagaacacctctatgacagcccctggcctccttccaccagcagctaccaggtgagaccacctcccagtgactgcccccatatgaccaaatgtcaccagttggtgaggtcccaggcagcaggctgaggatggacactttcaatgcccttgctcctgcctctcactcaagttttgcttcagaagagagaggcaggaggcccagcaactggggcagcaagagtcctggcaccttgggatcctaatcatgtgactgttcttgccacagtgctcatgccacagggtctcaccaggaaagtgcactgtgggccacagacccacagcctggcagcacccagagctaaaaggggacaaaggcagcacagttatgaccatatgaggctttgcattttcttctaagcaacttacccacgttaagcatgagggtgagagagctattaaatactaagcccttgccagtgtcaggtactttgaaaagctctctgcacaaaccattccctttgacacacacacacacaaatcttttgaggtgaacgctgttgttcccattttacggatgaggcaactaaggctcagagaggttaaagtcacatgccactatgagcaagataaagtctgtgctctttctactgccccatccaagttggggaacatcaccattccctctagagttatataaattcaaattcaactagagctgacaaagttcctcataaggtccaggcactcctctgggcacttttatatctattgactcacttctttcaattctcacagcaacactgcctggtggtttttattatccccatttgacagatgaattaatcgtagagagttgagtgacttacccaaggttgtctggataagccctagaaggaaggcggtaggcagctccattcagggaaactgcatctaatcagtcagtcaaaaatcaagtaactttacgagcaaagcacaattatcatcatcgtggtcttcttcatcagtttcgtcagcagcatcattatcttccctctatttgttcagcaccggatagttcatgagtatttttgcatcattctccttgacttttcacatccctgtgcaggaggtaaatcaaacatcagtaatcctgttttacagatggggaaaaaagtctcaaggttggatatgacttgctatgtggcaaggttggggctcaaccctaacacagttctctttccagtgctttctcaagtgcttggggaagagaatgcctcagaaggctgggtagtggggccctggaattcagcatccatgaatgtgctagtggataagctaaatagaaggcagccaaacccatctgctgtacagattgaactatgctcacggtagggcaaattgcaggctctgaaacagagactacacaggtaacacctgaataggagactcctgctttacaatgtgtagataaaacatcagcaatggtggccatggtggcagtcatgtgaaaagtaagatctttgggaatcaagaaaggaagctgtgttaaccactcctgctcaagccctgctgcgtgtgttgcaagagatactaagagagcaagaaagctataggtgagaacctctgcagtttaggagaagaacatcaaggcacagtccaacatgctgataagtctggccaggaggagaattaaaacaggggctttccacacctcccttgccccaagctccagcggtattctatcagcccatcctcctggaaagcctgaaaggaatgaaggaggctaataagtcatcttccaggaaggcatccctcactcgtgcttccctgagctagtcaaccaaaagagtcttcagaaactttgctagacctgaagtacttgaacctgtgtcccctgaatctttcttacaacatctgggacaaatccctggccctgtgacatccgaagcagaactgtgccctgctctctccttctgtgatgaccaaggatggtgaactcaagttgttctctacaagccaggccagcaacctaaatacttggagaggaacttttagaaactataatcctgacaaaatagaaaagtttcccataggggcataccataatactataataacctcccaggaactattgtttgccaaaatgtagttaatatattttaagatatatgcttttttgcataggactagaaccagaaaagacaccaaatgcccccttgacatcaatgtcctttctagtgggacaatttggtctccattaatgccaagcctttctgaacaggatacatggcttttaaaggacagatgtttctcctgctgctagaagttcctcagtttactagagcacaatgaggaaagtattcaacctccctactgccaaggaattccctgcttctcccccaccgccatcatcttgtccaagctatcagaagcaaccttctagagataatctaacaatcctgattagaattgctcccatatccctggtgaccacaggcttcattcaaattgtccaaactggttaacatgtatgtgatggggtatctctgcatctgtatgtctgtctgcgaggttccttgtatattggctgtccgctgacttgggacagatctctctagaacttgggttcagttctctgacatagtccactcagccataggctgagtggctaaatatgcataaataagcatgcctaaataggcatatataggttggtgcaaaagtaattgcggtttttgccattaaaaatgatagcaaaaatcccaattacttttgcgtcaatctaatattacattgcttgatagattaagatggaatcccaccaggtttagggtaggactggatgctcaaaaaataaagaaggagaaaaatctgtggcagaggcatcctaatgagaacctgacttctccttgcttccctctgctctctcctgcgcctcagagacttgtccccattgcagaagcttcctccatgctaggccagaggatatcaaagtttagtttggtcaagatttgggccaagaaaattcctttttagaagagccctcatatctgaatcacatcactttgggccagttatctctggtcaccctcagacaaaccctcgtctctttttctcccttcctagaggaattcccagggaactttgcagaaataggtctccagagttgctacagaggttcatggctcctttcgaggagggacatgtatgaaatttgaacagatcaagacaggtgtttgtcttcaaccatgggggaagacctccagcttccattttcccctatacgtgtctgtgctgacatcctttccagcagtagaagactaaaaagatatatcttaacccattcctcaaaaggacatcttcctaaagccagagaaaattgtctgcgcttccccaccccaggaagaggcaaaagggaagtgagggcgtcacaaggtcttttgtaaatcactattgtgtttgtcacagcactgggcggagagctggatccacagagctctcagtttttctaagcactgtcctgtaatgtgctaatgtctgggggtgggagggctggggaggggtggggttagagggaagatgccaacctttgtatggagatgattttataaccatgcacttttgtaactgtgcagaatttttcataaatgtacattaataataaagagtgtatagtttaacaaa

SEQ ID NO: 148146 - DNA, 2769 bp, Homo sapiens
  Payload ID: 9321
  Gene Symbol: LRRC56
  Gene Name: leucine rich repeat containing 56
  Uniprot ID: Q8IYG6
  ENST ID: ENST00000270115
  CDS Start-End: 501-2129
ggagtaggagacagcgcctggaggtggagggcgcccagggccgagctgccagggccggacacctaggctgagccctcagccggccaactcgcctggcacaggggcagctctagacgggatggagaggatgcatcttcagtgtccacacgtggtcaacagataaaagccatggccagaacgttctaagtggctacatgtgcatctgcctgttcacggattccttcgacaaatatttgagcatcccctcctgcgactgtggacagcagaggagcacgcaggccacgtgcaggccacgtgcagcccacagctctggggcgaggcaggccctcaaccgaacacgtatagagacagggtttcaccgtgttagccaggatggtctcaatctcctgacctcgtgatctgcccgccgcggcctcccaaagtgctgggattacaggcgtgagccactgcgccccgccagacgtctgcatctttaaggggcaacaccaggtgacatgtgaatggatctgggctgggacagatcccgtgggcctcggcggagcacctccagcgtccgggtgcgggagctgagctggcaaggcctgcacaacccctgcccacagagcaagggccctggcagtcagagggacagacttggagagcagctggtggaagagtacctgtcccctgcccggctgcaggccctggcccgggtggatgaccttcggctggtgaggacgctggagatgtgtgtggacactcgtgagggcagcctggggaactttggggtgcacctgcccaacctggaccaactgaagctgaacggcagccacctgggctccctgagggacttgggcacgtctctgggccacctgcaggtgctgtggctggctcgctgtggcctcgctgacctggatggcatcgcctctttgccagcacttaaggaactctacgcctcctacaacaacatctcggacctgagcccactgtgcctgctggaacaattggaggtgctggacctggagggcaacagcgtggaggacctggggcaggtgcgctacttgcagctgtgcccacgcctggccatgctcaccctggagggcaacctggtgtgcctacagccggcccctggccccaccaacaaggtgcccaggggctacaactacagggcagaggtgaggaagctcattccccagctgcaggtcctggacgaagtgccggccgcacacacaggcccaccggcccccccgcggctgagccaggactggcttgcggtgaaggaggccatcaagaagggcaacggccttcccccgctggactgtccccgtggagcccccatccggagacttgaccccgagctgtccctgcctgagacgcagtcccgggcctccaggccctggcccttctccctgctggtccgtgggggccccctgcctgaaggcctgctttctgaggacctggccccagaagataacaccagcagcctcacccatggtgctggccaagtcctctgtgggaaccccaccaagggcctgcgggagcgtaggcaccagtgccaggccagggagccccccgagcagctgccccaacacaggccaggagatccggccgccagcacttccaccccagagcctgaccctgcagacagctctgacttcctggccttggctgggctcagggcctggagggaacatggcgtgcgccccctcccctataggcacccggagtcccaacaggaaggggctgtagccccctggggcccacggagggtccctgaagagcaagtgcaccaggcagagcccaagactccctccagccccccaagcctggcctcagagccctccgggacctcgagccagcacctggtcccttcacctcccaagcacccaaggccacgagattctggcagcagctccccgcggtggtcgacagacctgcagtccagggggcgtcggctccgagtcctgggcagctgggggcctggcctgggtgatggggtggctgcagtgcctgtcctgagagccctggaggtggcctcacgcctgagccctcgagcccagggatgtcctggcccaaagccagcaccagatgcagcagctagacctcccagggcagctgaactctctcaccccagccccgtccccacttaatatagcccccactgccaggcttccctgtgctggggccacgacttgcccacatatgtggtcacagagcacagaatacctgggcgggtgtgttggggggtggaaggagtgcctggccctggggaggaccctcttggtggaggggagtgggggactgggaccagccagggaggcagcagaggctggaacccagtttaggcccccaactgggtttggcctggggagggagggtccggctccccagcccttccttagggccaggctttcccgcgggcacgggggtggggggtggtcacccgagcaggcctgtgagaggcctctcctgctagaattgggcatggccgaggggcaggggctggagctgcgagtccaccactcccttgccggccccagggtaagagccacctcctaggccgcagtggcccaaggtcccagctgctcgcctgaggccgccgggggtgcggtccaggcctcccgtctccgggggatctgtagggttcccgcactgcgatagggcggcccgttccctcctcttggcgcaggacgccccggaacccaaaccaacatttccagctctcaggtgtacagaaatgcggtttactttgtaggccacgttggttcaataaatgatgcagcggacaca

SEQ ID NO: 148147 - DNA, 2769 bp, Homo sapiens
  Payload ID: 9321
  Gene Symbol: LRRC56
  Gene Name: leucine rich repeat containing 56
  ENST ID: ENST00000611111
  CDS Start-End: 501-2129
ggagtaggagacagcgcctggaggtggagggcgcccagggccgagctgccagggccggacacctaggctgagccctcagccggccaactcgcctggcacaggggcagctctagacgggatggagaggatgcatcttcagtgtccacacgtggtcaacagataaaagccatggccagaacgttctaagtggctacatgtgcatctgcctgttcacggattccttcgacaaatatttgagcatcccctcctgcgactgtggacagcagaggagcacgcaggccacgtgcaggccacgtgcagcccacagctctggggcgaggcaggccctcaaccgaacacgtatagagacagggtttcaccgtgttagccaggatggtctcaatctcctgacctcgtgatctgcccgccgcggcctcccaaagtgctgggattacaggcgtgagccactgcgccccgccagacgtctgcatctttaaggggcaacaccaggtgacatgtgaatggatctgggctgggacagatcccgtgggcctcggcggagcacctccagcgtccgggtgcgggagctgagctggcaaggcctgcacaacccctgcccacagagcaagggccctggcagtcagagggacagacttggagagcagctggtggaagagtacctgtcccctgcccggctgcaggccctggcccgggtggatgaccttcggctggtgaggacgctggagatgtgtgtggacactcgtgagggcagcctggggaactttggggtgcacctgcccaacctggaccaactgaagctgaacggcagccacctgggctccctgagggacttgggcacgtctctgggccacctgcaggtgctgtggctggctcgctgtggccttgctgacctggatggcatcgcctctttgccagcacttaaggaactctacgcctcctacaacaacatctcggacctgagcccactgtgcctgctggaacaattggaggtgctggacctggagggcaacagcgtggaggacctggggcaggtgcgctacttgcagctgtgcccacgcctggccatgctcaccctggagggcaacctggtgtgcctacagccggcccctggccccaccaacaaggtgcccaggggctacaactacagggcagaggtgaggaagctcattccccagctgcaggtcctggacgaagtgccggccgcacacacaggcccaccggcccccccgcggctgagccaggactggcttgcggtgaaggaggccatcaagaagggcaacggccttcccccgctggactgtccccgtggagcccccatccggagacttgaccccgagctgtccctgcctgagacgcagtcccgggcctccaggccctggcccttctccctgctggtccatgggggccccctgcctgaaggcctgctttctgaggacctggccccagaagataacaccagcagcctcacccatggtgctggccaagtcctctgtgggaaccccaccaagggcctgcgggagcgtaggcaccagtgccaggccagggagccccccgagcagctgccccaacacaggccaggagatccggccgccagcacttccaccccagagcctgaccctgcagacagctctgacttcctggccttggctgggctcagggcctggagggaacatggcgtgcgccccctcccctataggcacccggagtcccaacaggaaggggctgtagccccctggggcccacggagggtccctgaagagcaagtgcaccaggcagagcccaagactccctccagccccccaagcctggcctcagagccctccgggacctcgagccagcacctggtcccttcacctcccaagcacccaaggccacgagattctggcagcagctccccgcggtggtcgacagacctgcagtccagggggcgtcggctccgagtcctgggcagctgggggcctggcctgggtgatggggtggctgcagtgcctgtcctgagagccctggaggtggcctcaggcctgagccctcgagcccagggatgtcctggcccaaagccagcaccacatgcagcagctagacctcccagggcagctgaactctctcaccccagccccgtccccacttaatatagcccccactgccaggcttgcctgtgctggggccacgacttgcccacatatgtggtcacagagcacagaatacctgggcgggtgtgttggggggtggaaggagtgcctggccctggggaggaccctcttggtggaggggagtgggggactgggaccagccagggaggcagcagaggctggaacccagtttaggcccccaactgggtttggcctggggagggagggtccggctccccagcccttccttagggccaggctttcccgcgggcacgggggtggggggtggtcacccgagcaggcctgtgagaggcctctcctgctagaattgggcatggccgaggggcaggggctggagctgcgagtccaccactcccttgccagccccagggtaagagccacctcctaggccgcagtggcccaaggtcccagctgctcgcctgaggccgccgggggtgcggtccaggcctcccgtctccgggggatctgtagggttcccgcactgcgatagggcggcccgtcccctcctcttggcgcaggacgccccggaacccaaaccaacatttccagctctcaggtgtacagaaatgcggtttactttgtaggccacgttggttcaataaatgatgcagcggacaca

SEQ ID NO: 148148 - DNA, 7351 bp, Homo sapiens
  Payload ID: 9322
  Gene Symbol: LRRC57
  Gene Name: leucine rich repeat containing 57
  Uniprot ID: Q8N9N7
  ENST ID: ENST00000323443
  CDS Start-End: 369-1088
gatgacgtcacagggcgttcccgcccgggactaagccggggagcgcatcccggctactgcgggtcctgggtcttcacctgcggagccttacggcagctgagcggtgggaggcgagtccggggctccctgatcttccgtaggctcccagaggcgcctggcctccgcagagctgcaaaggcggcagggcttggtggtcgggctgtgtgttcttccgtttcttccttgtcgctcttgggtcgggccccaggagccagggatcggcgggagttgagagctggggcaggagccccagccgggaggccgaccgggtggactgggcggtgacagcagcgcttccttcccgcagggacctgagccgcggcgctaggatgggaaacagtgcgctccgcgctcatgtggaaacggcgcagaaaactggtgtctttcagcttaaggaccgagggctgaccgagttccccgcagacttgcagaagctgacgagcaatctcaggaccatcgacttgtccaacaacaagatcgaaagcctaccgcctttgctgataggaaagttcactctgctgaagagcctctccctgaacaacaacaaactgactgttctgcctgatgagatatgcaatctgaaaaaactagagacgctaagcctaaacaacaatcaccttagagagctgccgtctacctttgggcaactctctgccctcaagaccctgagcctctctgggaaccaactgggagcattacctccccaactttgtagcctacggcacctggatgtgatggatctctctaagaaccagattcgaagtatacctgactcagtgggagagctgcaagtcatcgaactcaacctcaaccagaatcagatatctcagatctcagtgaagatatcttgctgtccacgccttaaaattcttcgcctggaagagaattgtcttgagctcagcatgcttccccagagcatcctcagtgattcccagatctgtctgcttgctgtggaaggcaatctttttgaaataaagaaacttcgagaactggaaggctatgataagtacatggagaggttcacagccaccaagaagaagtttgcgtgaagttctccaggactatggaaaccttacaggatactgacttagaacctctgttggaatgtggctgagtcaaagcctcctgttgttgttaggggtatctacagtaaggagatgatacttcaggagattatatttcactcaatgatcttttctcatttcagggctcttctcaaataagctaaaagaaaaaggatcaggagacaggaaaagtcttccgttttgagtcatgagtagggcaatagacaaggttctcttcaaaaccatcattagtttggctttaagaaaccagtagctagctgctatttatatggtgagggggtgctgcctggtaacagaatagctccacaccacagcttgagattttgtttagtttcactgtgtgagctttcataaagtctgttgccattccatctctgtgttaacacttcatatttttatgaaattcagataatttgtgagaggctggcatggatctaaggatttattatttttattctagtccatcagttcagtcgcagtttttatactaggactttaggatgtacataaatgtgtgactgtttgtcttgattaaaagtgcactttggcctgggcatggtggctcatgcctataatcccagcactttgggaggccaaggcgggtggctcacttgaggctaggagttcaagactagcgtggccaacatgaggaaaccctgtctctactaaaaatacaaaaattagctgggtgtgttggtgcatgcttataatcccagctacttgggaggctgaggcaggagaatcgcttgaacccaggaggtggaggttgcagtgagccgagattatgccactgtactccagcgtgggtgacagagtgagactctgtctcaaattaaaaaaataaaaaataattttttttttttaaagtacgctttgttggctgggcacggcgactcacgcctgtaatcccagcacattgggaggccaaggcaggcagatcacgaggttaggagttcgagaccagcctggccaacatggtgaaaccctgtctctactgaaaatacaaaaattagctgggcgtggtggtgggtacctgtaatcccagctacttgggaggctgaggcaggagaattgcttgaacccaggaggcagaggttgcagtgagccgagatcatgccattgcactccgactctgggcaacagagcaagactctgtctcgggggaaacaaaaaaaaagtgtgctttgtcaagagaagcaccagcagacctctaagaactgctctctaaggctgcggtagcaaattatctactattgcaggtgccttattggtagagggctctgaagagccaaaactgtatatgcaacacttgtaagataaaagggactttaataatcaagattttcttgaagatttgttagaaataatgtcttatttctggtaacctttccctttttgtatttataactctactaaccaaattacctatcaataaaccattactataatattttaaaacaacctatgtttatcaagcttactctctgagtgacagaatatactaaataaagaattttttaatgaactttggctggaagcaaggttaatcctttaaaggaggaggacaggagaacttaaacctataaatagattaggaagacatgtttcatgcttatgttcagattgtatgagtagtgaaatgccttcatgtgacataaacattttgtgatactagaactatgcttattaagagaatctgaggttgggcgcggtggctcacgcctgtaatcccagcactttgggaggctgaggtgggtggatcacgaggtcaggagttcaagaccagcctgaccaatgtggtgataccccatctctactaaaaatacaaaaattagctgggtgtggtggcacgtgcctgtaatcccagatactcaggaggctgaggcaggagaattgcttgaaaccgggaggcggagcttgcagtgagggtgccattgaactccagcctgggcaatagagtgagactgcgtctcaaaaaaaaaaaaaaaggccgggcgcggtggctcacgcctgtaatcccagcactttgggaggccgaggcgggcagatcacgaggtcaagagatcgagaccatcctggctaacacggtgaaaccctgtcactactaaaaatacaaaaaattagccgggcgtagtggtgggcgcctgtagtctcagctacatgggaggctgaggcaggagaatggcgtgaacccgggaggcggagcttgcagtgagcggagatcttgccactgcactccagcctgggtgacagagccagactccatctcaaaaaaaaaaaaaaaagaatctgaaggtacaaaggtagaggatttcagactaccactaacatcaacatttagaaagctaccattttggtcattttctgattttatcttagtcacaaagctattactaactatatatcaacagttctcaataatggttaaacctagcttatccattaagtcaagagatcacacaaacctactatttaacctccacgacaaaatctttctgacgtaaatctggtctaggtgttctctttttcccatatgttactttcttttttgagacagaatttcattccagactggagcgcagtagcactatcttggctcactgcaacctccacctaccaggttcaactgattcttgtgcctcattctcctgagtaattgggattacaggcatgcaccaccacacccagctcatttttgtatttttagtagagacagggtttcaccgtgttggccagactggtcttgaactcctggcttcaggtgatccacccacctcagcctcccaaagtgctgggattacaggtgggagccaacacacccagcctcccatatgtcattttctatttctcactttgaaaggggtactagtttatccataccagtttaggagttttgttttttctaaattttaatgtttattaatcttattgatctactgaacaattaacatttctgtgttttatcagtacttctcatctaataaatcagaacttatacattttttttttttttctgagacggagtctcattctttcacccaggctggagtgcagtggtgcgatcttggctcattgcaacctctgcctcccaggttcaagcaattctcctgcctcagcctcctgagtagctggtactacaggcaggcgcacgccaccacgccctgctaattttttgtattttagtagagatggggtttcaccatgttggccaggctagtctcgaactcctgacctcaggtgatccacccgccttggtctcccaaagggctgggattacaggcgtgagccaccacgcctggccagaacttatacatttaacaatttaaatgttcccatttaattattaattggagtttaatccacactcttatcagaatccacaactaccacccttcacaatttgggcctagacttattgccctttcttcactctcatttgcctgcccacccatatcagattattctctctaaacccacagtgcagtcttttctgacctcctttatacagcttgtccctcagtgtccatggaggattggtttcaatacctccatggataccaagtccatgatgctcaagtcccttatacaaaatgacatagtatcttcctgatactttaaattatctctagattacttataatacctaatatgcctacacataacttcatttgcatagattcaacatagtatttgatgcatgctaaattaaggttttgttttttagaaatttgaggcattttcccgctcaaatatttctgacctgcagttgaatccacagatgtggaacccatggatacttagggccaactgtattgttcactcagttgggaatgccctttttttttttttttttggtccagaggctcactcttgcccacgctggagtacaatggcgcgatcttggctcactgcaacctccgcctcccgggttcaagtgattctcctgcctcagcctcctgagtagctgggattacaggcaggtgccaccacacctggctaatttttgtatttttagtagagacggggtttcaccatgttggtcaggctgatctcaaactcctgacctcagttgatccacctgccttggcctcccaaaatgctgggaattgcaggcgtgagctaacgtgcccagcctgccctctcttaattaatatgctcattctgtatgtctaagcctctttcctgcgtctaagccgaattaactgctcacccatctgttactatagcacttctcacattctatatttatctttcatgatagactaactctttgagggcaagggctatatacagtaatatgcccaaagttacagcaaacaagatttagatttaaatatgagctaatcaagtaaactagcttgtggtctaaagacccagatttgaatctggccactagtccaagtcacctaattttttttttctttttttgcgacagatcttgctgtgttgcctgggctagtcttaaactggactcaagtgatcctcccatcttggcctcccaaagtattgagattacaggtgtgagccactgcctggcttttaagtctctttttttttttttttttttttgagacagaggctgtctgtttcgcccaggttggaatgcagtggcacaatctcgggtcactgcaacctccacttcctgagttctagcaattctcctgcctcagcctcctgaatagctgggattacaggtgcccaccaccacgcccagctaatttttgtatttttagtaaaatggggtttcactatgttagccaggcttatctcagactcctggcctcaggtgatccccctgccttggcttcccatagtgctgggattacaggtgttagccaccacgcccagcctatatgtattttttgagacagggtcttgctctattgcccaggctgaagtgcagtggcatgatcacagctcacaaatgccttgatctcctgggctcaagctatctcctcccacctcagcctcttaagtagctggagctacaggttatctgccaccacactcagctaatttttaattttttagaaagacggggtcttcctgtgttccccaggctggccccaaactcctgggctcaagcaatcctgccttacctcccaaagtgctgggattacaggtgtgagccaccacatctggcccaagtcacccaaattttttacagcttggtttggaaggcaatgtagtatattaaaattatgggccctggagtcagaaagatccaggtttgaatacagagtccgtcatttattagctttatgaatttgagcaatttcgtctcacttgtaaatatagggaatagctcctacctctcaggtatgttgcaaaaaactatataaaagcacttagcatagtggccatgacagagtaagcactcagtaaatcatgccatttatctcatctataaggcatgaaagtagaattttacaagttgtacagaaatagaaggcttggagtggacactacattaaaaggataaaaaaatggagccaggcagaggcaggcatctatagtcccagctattgaggaggcctgaggctggaggatcccttgaacctaggagtttgaggccagcctggacaacaatgtgagattgtggctccaaaaaaataataaaaaataggctgctctgcctatggagtagccattcttttattcctttacttttttaataaacttgcttttactttatggaaaaaataaatttttaaatgactagatgagaaacttgaatatcaatctgagaaataaaatctgattaggaatgtaattgggataacctgaagttttggtaagagtgacctaaagaaaacagcacttagataagctactttgttttcctttttcactttactatttttctgatatatatttgttcatatttatggggtacttgtgatattctgagacatgcatagaatgtataatgatcaagtcaggatatttatgttattcattatctcaaacatttatcatttgtttgtgttgggaacatttcaaatcttctagccattttgaaacttacattaagtatagtcaccgtactatgctatcaagcattaaaacttattccttctatctaactgtatgtttgtatctacccattaacctaccttccttcatcgccccaccctgtacacccactacccagcctctggtaactatcattctactctctacctccatgaaataaattttttagctcacatgagtaagaacatgca

SEQ ID NO: 148149 - DNA, 2384 bp, Homo sapiens
  Payload ID: 9322
  Gene Symbol: LRRC57
  Gene Name: leucine rich repeat containing 57
  Uniprot ID: Q8N9N7
  ENST ID: ENST00000397130
  CDS Start-End: 104-823
actaagccggggagcgcatcccggctactgcgggtcctgggtcttcacctgcggagccttacggcagctgagcggtgggagggacctgagccgcggcgctaggatgggaaacagtgcgctccgcgctcatgtggaaacggcgcagaaaactggtgtctttcagcttaaggaccgagggctgaccgagttccccgcagacttgcagaagctgacgagcaatctcaggaccatcgacttgtccaacaacaagatcgaaagcctaccgcctttgctgataggaaagttcactctgctgaagagcctctccctgaacaacaacaaactgactgttctgcctgatgagatatgcaatctgaaaaaactagagacgctaagcctaaacaacaatcaccttagagagctgccgtctacctttgggcaactctctgccctcaagaccctgagcctctctgggaaccaactgggagcattacctccccaactttgtagcctacggcacctggatgtgatggatctctctaagaaccagattcgaagtatacctgactcagtgggagagctgcaagtcatcgaactcaacctcaaccagaatcagatatctcagatctcagtgaagatatcttgctgtccacgccttaaaattcttcgcctggaagagaattgtcttgagctcagcatgcttccccagagcatcctcagtgattcccagatctgtctgcttgctgtggaaggcaatctttttgaaataaagaaacttcgagaactggaaggctatgataagtacatggagaggttcacagccaccaagaagaagtttgcgtgaagttctccaggactatggaaaccttacaggatactgacttagaacctctgttggaatgtggctgagtcaaagcctcctgttgttgttaggggtatctacagtaaggagatgatacttcaggagattatatttcactcaatgatcttttctcatttcagggctcttctcaaataagctaaaagaaaaaggatcaggagacaggaaaagtcttccgttttgagtcatgagtagggcaatagacaaggttctcttcaaaaccatcattagtttggctttaagaaaccagtagctagctgctatttatatggtgagggggtgctgcctggtaacagaatagctccacaccacagcttgagattttgtttagtttcactgtgtgagctttcataaagtctgttgccattccatctctgtgttaacacttcatatttttatgaaattcagataatttgtgagaggctggcatggatctaaggatttattatttttattctagtccatcagttcagtcgcagtttttatactaggactttaggatgtacataaatgtgtgactgtttgtcttgattaaaagtgcactttggcctgggcatggtggctcatgcctataatcccagcactttgggaggccaaggcgggtggctcacttgaggctaggagttcaagactagcgtggccaacatgaggaaaccctgtctctactaaaaatacaaaaattagctgggtgtgttggtgcatgcttataatcccagctacttgggaggctgaggcaggagaatcgcttgaacccaggaggtggaggttgcagtgagccgagattatgccactgtactccagcgtgggtgacagagtgagactctgtctcaaattaaaaaaataaaaaataattttttttttttaaagtacgctttgttggctgggcacggcgactcacgcctgtaatcccagcacattgggaggccaaggcaggcagatcacgaggttaggagttcgagaccagcctggccaacatggtgaaaccctgtctctactgaaaatacaaaaattagctgggcgtggtggtgggtacctgtaatcccagctacttgggaggctgaggcaggagaattgcttgaacccaggaggcagaggttgcagtgagccgagatcatgccattgcactccgactctgggcaacagagcaagactctgtctcgggggaaacaaaaaaaaagtgtgctttgtcaagagaagcaccagcagacctctaagaactgctctctaaggctgcggtagcaaattatctactattgcaggtgccttattggtagagggctctgaagagccaaaactgtatatgcaacacttgtaagataaaagggactttaataatcaagattttcttgaagatttgttagaaataatgtcttatttctggtaacctttccctttttgtatttataactctactaaccaaattacctatcaataaaccattactataatattttaaaacaacctatgtttatcaagcttactctctgagtgacagaatatactaaataaagaattttttaatgaa

SEQ ID NO: 148150 - DNA, 2407 bp, Homo sapiens
  Payload ID: 9322
  Gene Symbol: LRRC57
  Gene Name: leucine rich repeat containing 57
  Uniprot ID: Q8N9N7
  ENST ID: ENST00000563454
  CDS Start-End: 129-848
ctaagccggggagcgcatcccggctactgcgggtcctgggtcttcacctgcggagccttacggcagctgagcggtgggaggcgagtccggggctccctgatcttccggacctgagccgcggcgctaggatgggaaacagtgcgctccgcgctcatgtggaaacggcgcagaaaactggtgtctttcagcttaaggaccgagggctgaccgagttccccgcagacttgcagaagctgacgagcaatctcaggaccatcgacttgtccaacaacaagatcgaaagcctaccgcctttgctgataggaaagttcactctgctgaagagcctctccctgaacaacaacaaactgactgttctgcctgatgagatatgcaatctgaaaaaactagagacgctaagcctaaacaacaatcaccttagagagctgccgtctacctttgggcaactctctgccctcaagaccctgagcctctctgggaaccaactgggagcattacctccccaactttgtagcctacggcacctggatgtgatggatctctctaagaaccagattcgaagtatacctgactcagtgggagagctgcaagtcatcgaactcaacctcaaccagaatcagatatctcagatctcagtgaagatatcttgctgtccacgccttaaaattcttcgcctggaagagaattgtcttgagctcagcatgcttccccagagcatcctcagtgattcccagatctgtctgcttgctgtggaaggcaatctttttgaaataaagaaacttcgagaactggaaggctatgataagtacatggagaggttcacagccaccaagaagaagtttgcgtgaagttctccaggactatggaaaccttacaggatactgacttagaacctctgttggaatgtggctgagtcaaagcctcctgttgttgttaggggtatctacagtaaggagatgatacttcaggagattatatttcactcaatgatcttttctcatttcagggctcttctcaaataagctaaaagaaaaaggatcaggagacaggaaaagtcttccgttttgagtcatgagtagggcaatagacaaggttctcttcaaaaccatcattagtttggctttaagaaaccagtagctagctgctatttatatggtgagggggtgctgcctggtaacagaatagctccacaccacagcttgagattttgtttagtttcactgtgtgagctttcataaagtctgttgccattccatctctgtgttaacacttcatatttttatgaaattcagataatttgtgagaggctggcatggatctaaggatttattatttttattctagtccatcagttcagtcgcagtttttatactaggactttaggatgtacataaatgtgtgactgtttgtcttgattaaaagtgcactttggcctgggcatggtggctcatgcctataatcccagcactttgggaggccaaggcgggtggctcacttgaggctaggagttcaagactagcgtggccaacatgaggaaaccctgtctctactaaaaatacaaaaattagctgggtgtgttggtgcatgcttataatcccagctacttgggaggctgaggcaggagaatcgcttgaacccaggaggtggaggttgcagtgagccgagattatgccactgtactccagcgtgggtgacagagtgagactctgtctcaaattaaaaaaataaaaaataattttttttttttaaagtacgctttgttggctgggcacggcgactcacgcctgtaatcccagcacattgggaggccaaggcaggcagatcacgaggttaggagttcgagaccagcctggccaacatggtgaaaccctgtctctactgaaaatacaaaaattagctgggcgtggtggtgggtacctgtaatcccagctacttgggaggctgaggcaggagaattgcttgaacccaggaggcagaggttgcagtgagccgagatcatgccattgcactccgactctgggcaacagagcaagactctgtctcgggggaaacaaaaaaaaagtgtgctttgtcaagagaagcaccagcagacctctaagaactgctctctaaggctgcggtagcaaattatctactattgcaggtgccttattggtagagggctctgaagagccaaaactgtatatgcaacacttgtaagataaaagggactttaataatcaagattttcttgaagatttgttagaaataatgtcttatttctggtaacctttccctttttgtatttataactctactaaccaaattacctatcaataaaccattactataatattttaaaacaacctatgtttatcaagcttactctctgagtgacagaatatactaaataaagaattttttaatg

SEQ ID NO: 148151 - DNA, 561 bp, Homo sapiens
  Payload ID: 9322
  Gene Symbol: LRRC57
  Gene Name: leucine rich repeat containing 57
  ENST ID: ENST00000570160
  CDS Start-End: 117-561
acagggcgttcccgcccgggactaagccggggagcgcatcccggctactgcgggtcctgggtcttcacctgcggagccttacggcagctgagcgggacctgagccgcggcgctaggatgggaaacagtgcgctccgcgctcatgtggaaacggcgcagaaaactggtgtctttcagcttaaggaccgagggctgaccgagttccccgcagacttgcagaagctgacgagcaatctcaggaccatcgacttgtccaacaacaagatcgaaagcctaccgcctttgctgataggaaagttcactctgctgaagagcctctccctgaacaacaacaaactgactgttctgcctgatgagatatgcaatctgaaaaaactagagacgctaagcctaaacaacaatcaccttagagagctgccgtctacctttgggcaactctctgccctcaagaccctgagcctctctgggaaccaactgggagcattacctccccaactttgtagcctacggcacctggatgtgatggatctctctaagaaccagattcgaagtatacctgact

SEQ ID NO: 148152 - DNA, 7903 bp, Homo sapiens
  Payload ID: 9323
  Gene Symbol: LRRC58
  Gene Name: leucine rich repeat containing 58
  Uniprot ID: Q96CX6
  ENST ID: ENST00000295628
  CDS Start-End: 97-1212
ctcggttcaggttccggggcgccgcagagctcccggcctctggaccgcgcgcggcgctctggggaatccggcgccacgcgccgtgcggtggccaggatggaggaggccggagcagcggtggtcacggccggggaggccgaactgaactggtcccgcctcagcgtgtccaccgagacgctggagtctgagctggaggcgcggggggaggagcggcgcggggcgcgggaggcgctgctgcggctgctgctgcctcacaaccgtctggtgtcgctgccacgggcgctgggcagcggcttcccgcacctccagctgctggacgtgagcggcaacgcgttgaccgcgctcgggccggagctgctcgctctgcgcggcctgcgcacgctgctggccaagaacaaccggctcggcgggcccagtgcgctgcccaagggcctggcccagtcgccgctctgccgcagcctccaggtgctcaacctcagcggcaactgtttccaggaggtgcctgcctcgctcttagagctgcgcgcgctgcagaccctgagcctgggcggcaaccaactgcagagcatcccggctgagatcgagaacttgcagagtttagagtgtttatatcttggaggaaatttcattaaagaaatcccaccagaattaggaaatctgccttctctgaattatttggtattatgtgacaacaaaatccaaagcatacctcctcaactttcacagttacattcacttcgttccctaagtcttcacaataacttgctgacatatctgcctcgagagatcctcaaccttattcatttggaagagttgagtttacgaggaaatccattggttgttcgttttgttagagatttaacctatgatcctccaactctcctggaattagctgcacggaccattaagattcgaaatatttcctacactccctatgatcttcctggaaatcttcttagatacttgggttcagccagcaattgcccaaacccaaagtgtggaggagtctactttgactgctgtgtcagacaaattaaatttgtggacttctgtgggaagtatcgcctcccactgatgcactacttgtgttcaccagaatgttcttccccttgcagttctgcctctcacagctccacttcccagagtgaatctgactcagaagatgaagctagtgttgctgcacgcagaatgcagaaagttcttcttggttgaacaggagtgcacagtgttgtgaaatacttaaaaaactgagcaaaatggttagacaagaaaatagagcttgaagttcactagaaatcttatcttcatcttaagtgttcatcaaagagtctgggatgatataaaacattttgtgtttcatctacccattcagcaagaatgagtccagtcccatgtttagattattttaacataatttgtgaatgatagtttcacatttggctgatggtttgcagttttcactcaagttttgcatgaatcacaaagcagaatggtaccttttgaagagcagttctgcaataagtcatgagtagtataacttttggacattgagatggagaaagtgagaaattatcaaagctataattgccagagttgcccttgggtttaggtagaacactgtataccatatatactatataccatatatactatatataccatatatattatatgccataaacaggattaaccctcccttttctaattgcctgtatgtctagattacagaactattcaaagaagctcacagatggttacatgggacaaacctttctgacaaactaactggtaaagtaaggcatataacatttacatgagatattaaaactttttcattattatcctttgttctatatgattgctattaaccttatgtaatctagcaatgactgttatagtgccttaatccagcaaggatataaaaatgtattcaagaagtaatgccagagcaacctataacctgacataccatgcagaacattgtaaaatattctttaacagaactaggtaaataactgtgtatctaatatccgatctcatggccctcttaacatttttttgtttaaatgtgcactcatcccttataagcacattacttttacacttaatggtaggccacaatcttcatcaatctgttcatcataagacagagtaagaatttttaacagaaaattctaaaagagatagaagctaggaaagcttctttatatcttgcattaaatgggtagggaaaaaatatgactctcacccatgtcatgtactggaccatctttctctactttttaaagaaaaactaatacaactagaaaaacatcacaacaagccaaataaaaatggagaaaaggagtcattgtccttatacctaatggaacagtttccagaactactttaactatggaagcatttttgaaaataaagtattaataaaatagaaaaaaattattaaatatattgtatccttaatgtatagcaggaaaatagtttcacaaattaattgctattagaaattaccaaatttttattaagtactttaatatgcaatacaaattgaataatagtacaactataagttgatataaagtaagtgcttactggtaatcattaaataactaataacatgacttgttggttaatgttaaacctacagtaagaaatgttatacagatcagataggcattagaacatcaggtgtaccttttctgatttctggcattcatggcacaccatttcttaaaagcagattgttgtataataacatatacatgtattagggtttttttcatatatattttttattttagaagaaactagcataattcagggtttatgtgtttatttgtatattaattcatgaaacatgagagtttcatgaactgcagatgtgaaacgctgctatagaatgaatcccttcacctttaccttgttataatgtagtaagattttgttttccttttgactcagaaattttctatgtctatagaggtaatctaatatgttcctactgcctagaagagtaatacataggtgattatatcataaaatagaggtataaagtctttgcttacttctccatgtgggccacagcaagctgcagactgtacagttatgaaaggtaaagatgacttaggctgtgcctaagtgacaaatgtaaaatgttttgtaaataagtgacttacctaagatacataagatattttcatagaaaataatgtattcatagtaaaatactcaaattgataggaccaattttttctggcctaaatgcttatgcctacttcctaatcaattaccagcttgacttaagtaactgcttgagtagtcttctaagagttagtcttcgtaaaataaatggataggtatgtaaatatataatcttacataccctttccagcttcctagaaaggtctactgcttcatcttttacagatgtaaataggtccaaccagagacagtttctggcctttgcatataagaatatagatgtataccacagtattatttcaacaaaatgttatggttctatgtatagttgaaaactctatgatcagcatacaactgtcttttggtaatttttaatgaagtctacatttagccgtcggttttatctttcttaaatctttgacctaaacttttgtaagagcagctaataatttctaagattttccctgtttctttttcctacctttccttttctcataactgattggagaaattaatcagaagtcaaatacaagggacttcataatctagaaaccagataatcagctcccaagtcatgtagctaactatgcatttaaaataagtctgtctctttagttcttaagtcatatatttgtttgttaattacagtaaatgaactttaattggggtttttaaaagacagaattagcgaagtctaatttttataatgaaataagtttttgatattgctctacttggacgattttagtgaccaaaactatggataaaactgcctaagcataacattaatatatttagaatggcattcttcagtgctagtatttgaaattggaattagtacattgtgcattcttagtagtctttatccctagaatcaattctctcagcatcaccaaactgaattggtgaaatagtgctaagattctgggcaataggaagattagtgaatatgatacattgattccagggtgccagggattggctgacattaaggaccagctggctatggtcctcaggctacggtcctcagtattctagtatttgagtagtggaggtaaatccaaaggcgactggttatattttacttctaaatgtgtgctgaagtgtctcttgttcaaaaattcttgatatttagagcttcaagttaccacatttaaaagtaaagacttggcacggtggcacacacctataatcttagcactttgggaggccgaagtggatggatcatatgcagtcaggaatttgagaccagcctggccaacatggtgaaacctcatctttactaaaaatacaaaaattagccgggcgttgtgacgcacacccatagtcccagctaactccggaggctaagacaagagaatcacttgaacttgggagacagaggttgcagtaatctgagatcactccgctgcactccagcctgagtgagagtgagactgtgtctcaaacaaacaaacaaaaaacaaacaaaaaaatttgcattgtaaattgtacctcaaatttgagcagtttttgtgtttgtgtaaattaaagtaaaaagcagtccacaataatgttttgtaatactgcacaccagttctaccagattttgtaactatcagatttaaatgaaaaaagagaaggaagaggctgattgctggagtgttaaagaaatcttggccgggcgtggtggctcacgcttgtaatcccagcactttgggaggccgaggcgggtggatcacgaggtcaggagatcgagaccatcctggctaacacggtgaaaccccgtctctactaaaaatacaaaaaaaaattagccgggcgtgatggcgggcgcctgtagtcccagctactcgggaggctgaggcaagagaatggcgtgaacccgggaggcggagcttgcagtgagccgagattgcgccactgcactcccgcctgggccacagagcgagactccgtctcaaaaaaaaaaaaaaaaaaaaaagaaatctttagaagccacagggctagaagagaagtcaccaaacacctagggacagtcctaggcctagaaagccctttaaagtaatagtgaattgttttaaaattaagttattgagtggcctactgactaccatccaaaaacctttatcaccaaatttgttcagtgtttgctattgggagattgtccatatccctccgtaattaagggccagcaagtaatacgatcttcttacagccaaccttgctcttcccaaagggagaaagtaatacatcattaacctggaatttgtgatataacaggtagccttggttaatgtttaccttttcactatgtaaaaaagaaaaaacacacagcaaatagtgcaaataaaatttggtcttttaaagcattttagcagtagctatgtaaaaaaagttaatggttattattcctaaattttcataagacccttggtagacaaaactatcggttatattatgtatatatgaggttagttaagctgcatttagttaggaacatttaatttttacctaaatgatccttttttcatccagaggtagagattttattgtcattatgaatgttactccccatttagtccaaaatagtgagcttttaagttgtgccaggtacttaacaatagtaaaagctattgtatagatttttattcaatgtgacctataatacatttctgattccttctgtattgaatgtcccagtttccatattaagtgctatgccctgtataacattaatgaatttaatagtgtacaattttgggccaggcatggtggctcacgccagtaatcctggcactttgggaggcagaggcaggcagatcacctgaggtcaggggttcgagatcagcctggccaacatggcaaaatcacatctctactaaaaatacaaaaattagccaggcgtggtggtgcatgcctgtagtcccagctactcaggaggctgaggcaggagaatcgcttgaacccaggaggcggaggttgcagtgagccgagatcatgccattgcactccagcctgggagacagagcaagactctatctcaaaaataaaaataaaaaaaaaattgcgtgcaattttgtattttcatagtcgtatctttttaaaggtatcatgatttcagttgtggtcaggaagtatgtgccttaaatcctctactctagacccaaagtttggagagctatattatttaataagttgtttgtgacagccttgttacctttttcatttgatttgagggagaaagactgtgatcctgacagattccttctcataaaatggcctaatgtgtatcagtctaggacttctggggagggaacctctaccatgcattctgtcccaggatgtcaaagtcataagaatcagggtcccctgaaataaaatcactgaaaagatatgttctgttatatattatttaaaaaatttatctggtgccaccaaagaatgacagcagtttctaaccaacttcatatttatagcatcttatgaagatattgtaaggcttagcatattttgccactggttttctttgtaatataggttgaaagtgagacatgtttgaatacttttgtatgtaaatatctcccattctttttctatctcttcttggtctatatttactaagaattgatatttaaaaaacagttcactaatgaactctacatattattgaacactcacagggcaatattgatttgggtgctactagacttttacctaacattagtctttctcaatagttgttgtaaaggatagtattcaatccagtaaatattaaagtgtattagtttaatgaaggttatttatatactgtcataccacaaacctatggtggaaagaacatctgcattcaccagaatgtacttgttcctttggctgtgaataaattggataagacttttttattgtaagttccagctgttggaagatacggggataagattgacattgctgttgcagtattgcaaaaacatgactaaattggttaattatgtctaccgcttatgtttaagagaatcctttcactaacttaaattgttaacattgttgtgatattgagaaagaatattaacctaaacagtcactttacaacaatcatgtaaagacgtgtgcctgcagttgaggttttttgcatttctgagcctgctttgtattcatgagaaacaaaaacataatgggagaaaagttttagataagcagcattgtaagtttttgtaaagtttgggatgtcaaagtattaacgaagggtactgaaaacatacttttacttgggtcaaattactttttatgatctgatttcttaattttctgtatttgaaatcttgcaaattaggaatatctacatctatagataaataagtaaaacttaatggtagaaataagtgtaattcagcaacatgattcaacaatttttatatttaggataagttattgtttattatattaatatcaaatttatatattgccttgtaatgctaaatgctcttaaaagaatatatgggctacttcaattctaccaccttcttccccctcccccaggacgtacaaaagatcttatattaaccaatcctctgtgaattttgccatatcaaacattgtgccttattttaataaaactgttttgttggaatccagttctatattaaagtctctataatgttgatatttgcctgattacttgttacatcattgaatacatacattaaatatgtactaacattga

SEQ ID NO: 148153 - DNA, 2910 bp, Homo sapiens
  Payload ID: 9324
  Gene Symbol: LRRC59
  Gene Name: leucine rich repeat containing 59
  Uniprot ID: Q96AG4
  ENST ID: ENST00000225972
  CDS Start-End: 237-1160
atctcagtggtcgcggaaggtgacgtggacacggaagtggtcgtcgtcgcggcaccggtgggagctaggcgcgaggctcggagtgcggccagcgggcggaggcggtctcgcatcggcggcgacggagggctcaggcgtcgtcgtttgggtggggggccgctgaactgacaagcgacatttcagctcctttcacccgccggaaccccggagccggggcccgctcagccggcgttaccatgaccaaggccggtagcaagggcgggaacctccgcgacaagctggacggcaacgaactggacctgagcctcagcgacctgaatgaggtcccggtgaaggagctggctgcccttccaaaggccaccatcctggatctgtcttgtaataaactgactactctaccgtcggatttctgtggcctcacacacctggtgaagctagacctgagtaagaacaagctgcagcagctgccagcagactttggccgtctggtcaacctccagcacctggatctcctcaacaacaagctggtcaccttgcctgtcagctttgctcagctcaagaacctgaagtggttggacctgaaggataaccccctggatcctgtcctggccaaggtggcaggtgactgcttggatgagaagcagtgtaagcagtgtgcaaacaaggtgttacagcacatgaaggccgtgcaggcagatcaggagcgggagaggcagcggcggctggaagtagaacgtgaggcagagaagaagcgtgaggctaagcagcgagctaaggaagctcaggagcgggaactgcggaagcgggagaaggcggaagagaaggagcgccggagaaaggagtatgatgccctcaaagcagccaagcgggagcaggagaagaaacctaagaaggaagcaaatcaggccccgaaatctaagtctggctcccgtccccgcaagccaccaccccggaagcacactcgttcctgggctgtgctgaagctgctgctgctgctgctgctatttggtgtggcgggagggctggttgcttgtcgggtgacagagctgcagcagcagcccctctgcaccagcgtgaacaccatctatgacaatgcggtccagggtctacgccgccatgagatcctccagtgggtcctccagaccgactctcagcagtgagcttgtccccagcacctgctgcctcccagccttggagtttggattcctatggaattgggttctgctggacacaacctctttttagcatcagacctacctgccatcatcaaatggctgcagattggtacatgagacctcctctttgtaggacttcttcattccttagtcagggttccctgaaggaatgaggagaaatgggaggtggcgggggggcgtggggggcagttacctgcatgcctaaaggagtaggcttgggggtggggagagagaaaacatagccttttctagttgttatataaagctgtgtaaaggcaaggctcgtttctactaaatggtcagctgtcactacatttatacttttgtatgccacaaaccctttcattcctccctgggaatcagggtagatcaggaggaactgggggggactagaacaccacgctcagtaaatccagtctaaactgggaggtaggggtattcctgttttctttaggacctcagagatgtaagcattttagcagccacacaaaatctctggctatgaaagggacttcatgaccatccagtccaatataacacttgcagacagagaaactgaggtcttccatgacttgcctagtctcccagctagtttgaggcaaaactggattcccactctggtattctttcttccctttacatcattttccctcctttataatgtcctgagagaccagaactcacaccagaatcgattattcctcaggtgaagcatagactctttcatggtagacagatttcacgactcagagatagaaatctcttgctatcatcaggtcacgggcagctcctgtggagtcctgcccaacttatgtggcttccataaaatggcaacagtccaggctccttgcctaattttagagcattaactccctaattgccagtaagcaaggaggtggatctctgcaaacctacactgtctatgacagctctagttgtacttggtgtgactaaatacctcaaaggcaacctgcttctgcaggttttgaagtgtcagcttcataagacactgaggtttagaattgtttgattctagaccataactgaagggcataaatggaaacaggatatgaagggaaacaagtagcatcatggagctgaaaagtggtgcatcacccaatggctagcacaaacaaggatcacactgtccattctcttgtctgctaaattaagcattttcttgcctcctttgcttcatcttttcacaacagctggatagagggatcagaaatgactgtgtcatggtgctcattcactgcaaactcccagttgcaagctccttggctcccccggagggagcaagaatctcatagttcagagacacagagggccttttagccctaatgaccttttggatgggactgcaactcatgactatcctgatattggaagaaaggactttgttaatcttctcccccatagctctgctgcgtaggtctacatcttactcagaatcactacacattcctttagtcttcctccaagctccagagccattggtacaaatgctttattgaaactaaatacataatacacacaatgagatgaagacaatatagaagtccgcatagtcatcataatcccgttccttggccggttgaggcagctcagtggctgagcccagtcaagccaacccgcagcttcactcacgacttcaagatttgatgctaattcttttggatttctacagttattaaataagtgtctgagtgga

SEQ ID NO: 148154 - DNA, 1531 bp, Homo sapiens
  Payload ID: 9324
  Gene Symbol: LRRC59
  Gene Name: leucine rich repeat containing 59
  ENST ID: ENST00000576448
  CDS Start-End: 188-376
cggcaccggtgggagctaggcgcgaggctcggagtgcggccagcgggcggaggcggtctcgcatcggcggcgacggagggctcaggcgtcgtcgtttgggtggggggccgctgaactgacaagcgacatttcagctcctttcacccgccggaaccccggagccggggcccgctcagccggcgttaccatgaccaaggccggtagcaagggcgggaacctccgcgacaagctggacggcaacgaactggacctgagcctcagcgacctgaatgaggtcccggtgaaggagctggtcagtatcgtcccgcgaggcccaggcgcccaccttcgccgggcgctggcccctacgtgggccacttactttcctcttctctaaaagcatcagtttccttttctttaaaaagaagcggggtggtgggactaagtcccctaggaggccgcgtccagcccaaggttcttcccgggatgtacacgtgtcactttggcgcagttccagaacatagggaagatctgcttctctggccctaggctttttacaggctaagaagcgaatctgtcacctttgcggggctttcacagcgcccacctccgtgcccgactctgagtaggagcacacggagcagttactggatgtattcgagaatgaatgagtgacttgttccaggggagtaggcctcctggtagacctgggtgtggcccagaacctggctcttctaggaagctggcaattccagctggctgcccgagccctgaggcagcctaactcgaagaaagtaaagtctccccccagcttggctggtaaactgtcatctgaattccgctgaaactggcgggagtccctttcgcccctctctcccccaacctttcccctgtaaactgaagcttacagctccagagagatagcaggcatctagttttgtcagcgtggagctagttcccacatccctccttttcccactccgttccccctcccacccgcgccaacgccctactagactcactttgggtgacccacactttgctttctgccgttgataaattacatttgccttgggcgctgggcccagtctttcttccaccgtggacgggtattacagtggttagaaccgggttcctagctcctcccagctccattgcttaatagccgagtgcccttggcaagctagttagcctttatgcctagatctcctcatctatacaatggtgataatagtttccatctcatacgcttattgggaggttaaataccattgtaatggaaaatgcttggaaggagcaaatactgatacttgtagctgttgttgtgtttttcccgctgtagtatttaaaacttttttaggtggtcaaacttcacttttacgactttgtgacagaaagtgcaggttgccagaggatccttaactgaatatatgcctccttttctaccccaggaagatagatggccagccttatttcaccctgccctaggactgctctctgaaaccatatactccaggcatctgaacagtccagcattaaccttagggagaaa

SEQ ID NO: 148155 - DNA, 438 bp, Homo sapiens
  Payload ID: 9324
  Gene Symbol: LRRC59
  Gene Name: leucine rich repeat containing 59
  ENST ID: ENST00000503118
  CDS Start-End: 1-172
agcaaatcaggccccgaggtgctttccttctgccttgcttgtctctgctgccggcatccgtgtgagcctcttccctggaccttctgactcggcttggttttcttctggggtggaaggatgtcagaatttgttttggttactgccaagctgctgctctggccagggcaggtagacaggctgtctcctctttgttgaagatggttccttcttcagaaaggcaaatgttggcaactcctcagagtcactatcaccagaatccagtgagggtgatgacttctttagagccatcagtatgtgctatcaaataattccctaaaaggaaaagagacatatgacacagactggagcattcaattcagtccactagctgtgttccatagccaggctttatgacataaatataagatatagagaatacagaaacagagaaatatgaca

SEQ ID NO: 148156 - DNA, 1672 bp, Homo sapiens
  Payload ID: 9325
  Gene Symbol: LRRC6
  Gene Name: leucine rich repeat containing 6
  ENST ID: ENST00000250173
  CDS Start-End: 67-1302
gaagggtgaaaagcgtcattcgaggtccgggtccggcttgcggggtcagcgaactggagaggcgccatgggctggatcacagaagatcttattagacggaatgctgaacacaacgactgtgtcattttttccctggaggaactctcgttgcatcagcaagaaatagaaagactagaacacattgataaatggtgccgggatttaaaaattctctatcttcaaaataatcttattgggaaaattgaaaatgttagcaaactcaagaaacttgaatatttgaatttagctttaaacaacattgaaaaaatagaaaacttggaaggatgtgaagagctggcaaaacttgacctgactgtgaatttcattggagagctgagcagcattaaaaacttgcagcacaatatccatctgaaggagctctttctcatggggaacccatgtgcttcctttgaccactatagggagttcgtggtagcaactcttccacaattaaagtggttggatggtaaagaaatagagccttcagaaaggattaaggcattgcaggactattcagtaattgaaccacaaatcagagagcaggaaaaagatcactgtcttaaacgagccaaactcaaggaagaggctcagaggaaacaccaagaagaggataaaaatgaagacaagagaagtaacgcaggctttgatggacgttggtacacagacatcaatgctactctttcctctttagagagcaaagaccacctacaggcaccagacacagaggaacacaacacaaagaaattagacaacagtgaagatgacttggaattctggaataagccctgtttgtttactcctgaatcaagattggaaactcttagacacatggaaaaacaacggaagaaacaggaaaaattaagtgaaaaaaagaagaaagtgaaaccacccaggactttgatcactgaagatgggaaagccctaaatgtgaatgagcccaaaattgacttctctttgaaagataacgaaaagcagatcatcctggaccttgctgtctataggtatatggatacctctttaatcgatgttgatgtgcaaccaacttacgtgcgagtaatgatcaaaggaaagcttgtccttcctgcagaagtgaaacccgatagtagttctgctaaaagatctcagacaacgggtcatttggtcatctgcatgcccaaggtaggagaagtaatcacaggtggtcagcgagcattcaaatctatgaaaactacctcggacaggagcagagaacaaacaaatacaagctattctactggattctagaggtgatgtttctgacagtcaggtcgtgggtaagaccagtgatgggcgtccgtcctagaggcctctgacattaaggcggggaaagcaaagaagcaagcacatggagaaactagaagtagaccctagcaagcactcattccctgatgtgactaacatagttcaagagaaaaaacacacacccagaagacgacctgaacccaaaattataccaagtgaggaagacccaacctttgaagacaaccctgaagtgcctccgctgatttgaaacatctggctgcgttgccattggctgagacccaccaggtccagttttggttggtgtagagaccatatgcatattattcctgggataaacacagagttatttgtc

SEQ ID NO: 148157 - DNA, 728 bp, Homo sapiens
  Payload ID: 9325
  Gene Symbol: LRRC6
  Gene Name: leucine rich repeat containing 6
  ENST ID: ENST00000522789
  CDS Start-End: 1-621
gacaacagtgaagatgacttggaattctggaataagccctgtttgtttactcctgaatcaagattggaaactcttagacacatggaaaaacaacggaagaaacaggaaaaattaagtgaaaaaaagaagaaagtgaaaccacccaggactttgatcactgaagatgggaaagccctaaatgtgaatgagcccaagtatatggatacctctttaatcgatgttgatgtgcaaccaacttacgtgcgagtaatgatcaaaggaaagccatttcagcttgtccttcctgcagaagtgaaacccgatagtagttctgctaaaagatctcagacaacgggtcatttggtcatctgcatgcccaaggtaggagaagtaatcacaggtggtcagcgagcattcaaatctatgaaaactacctcggacaggagcagagaacaaacaaatacaagaagcaagcacatggagaaactagaagtagaccctagcaagcactcattccctgatgtgactaacatagttcaagagaaaaaacacacacccagaagacgacctgaacccaaaattataccaagtgaggaagacccaacctttgaagacaaccctgaagtgcctccgctgatttgaaacatctggctgcgttgccattggctgagacccaccaggtccagttttggttggtgtagagaccatatgcatattattcctgggataaacacagagttatttgtcaa

SEQ ID NO: 148158 - DNA, 1674 bp, Homo sapiens
  Payload ID: 9325
  Gene Symbol: LRRC6
  Gene Name: leucine rich repeat containing 6
  ENST ID: ENST00000518642
  CDS Start-End: 67-1302
gaagggtgaaaagcgtcattcgaggtccgggtccggcttgcggggtcagcgaactggagaggcgccatgggctggatcacagaagatcttattagacggaatgctgaacacaacgactgtgtcattttttccctggaggaactctcgttgcatcagcaagaaatagaaagactagaacacattgataaatggtgccgggatttaaaaattctctatcttcaaaataatcttattgggaaaattgaaaatgttagcaaactcaagaaacttgaatatttgaatttagctttaaacaacattgaaaaaatagaaaacttggaaggatgtgaagagctggcaaaacttgacctgactgtgaatttcattggagagctgagcagcattaaaaacttgcagcacaatatccatctgaaggagctctttctcatggggaacccatgtgcttcctttgaccactatagggagttcgtggtagcaactcttccacaattaaagtggttggatggtaaagaaatagagccttcagaaaggattaaggcattgcaggactattcagtaattgaaccacaaatcagagagcaggaaaaagatcactgtcttaaacgagccaaactcaaggaagaggctcagaggaaacaccaagaagaggataaaaatgaagacaagagaagtaacgcaggctttgatggacgttggtacacagacatcaatgctactctttcctctttagagagcaaagaccacctacaggcaccagacacagaggaacacaacacaaagaaattagacaacagtgaagatgacttggaattctggaataagccctgtttgtttactcctgaatcaagattggaaactcttagacacatggaaaaacaacggaagaaacaggaaaaattaagtgaaaaaaagaagaaagtgaaaccacccaggactttgatcactgaagatgggaaagccctaaatgtgaatgagcccaaaattgacttctctttgaaagataacgaaaagcagatcatcctggaccttgctgtctataggtatatggatacctctttaatcgatgttgatgtgcaaccaacttacgtgcgagtaatgatcaaaggaaagcttgtccttcctgcagaagtgaaacccgatagtagttctgctaaaagatctcagacaacgggtcatttggtcatctgcatgcccaaggtaggagaagtaatcacaggtggtcagcgagcattcaaatctatgaaaactacctcggacaggagcagagaacaaacaaatacaagctattctactggattctagaggtgatgtttctgacagtcaggtcgtgggtaagaccagtgatgggcgtccgtcctagaggcctctgacattaaggcggggaaagcaaagaagcaagcacatggagaaactagaagtagaccctagcaagcactcattccctgatgtgactaacatagttcaagagaaaaaacacacacccagaagacgacctgaacccaaaattataccaagtgaggaagacccaacctttgaagacaaccctgaagtgcctccgctgatttgaaacatctggctgcgttgccattggctgagacccaccaggtccagttttggttggtgtagagaccatatgcatattattcctgggataaacacagagttatttgtcaa

SEQ ID NO: 148159 - DNA, 453 bp, Homo sapiens
  Payload ID: 9325
  Gene Symbol: LRRC6
  Gene Name: leucine rich repeat containing 6
  ENST ID: ENST00000519085
  CDS Start-End: 1-421
tgaaaaaaagaagaaagtgaaaccacccaggactttgatcactgaagatgggaaagccctaaatgtgaatgagcccaaaattgacttctctttgaaagataacgaaaagcagatcatcctggaccttgctgtctataggtatatggatacctctttaatcgatgttgatgtgcaaccaacttacgtgcgagtaatgatcaaaggaaagccatttcagcttgtccttcctgcagaagtgaaacccgatagtagttctgctaaaagatctcagacaacgggtcatttggtcatctgcatgcccaagggtgccaaccaattgatgagaaaagctctactgtcactgtttatgagtcttaaacaactgcagcattcttttccccttttcctttatgtttttaatctgtctaaatttttcacatgaaaataataataaatggcttatgaggaaaaagc

SEQ ID NO: 148160 - DNA, 1736 bp, Homo sapiens
  Payload ID: 9325
  Gene Symbol: LRRC6
  Gene Name: leucine rich repeat containing 6
  Uniprot ID: Q86X45
  ENST ID: ENST00000519595
  CDS Start-End: 100-1500
aattccgacggggacgcgctgaggagcaggggtgaagggtgaaaagcgtcattcgaggtccgggtccggcttgcggggtcagcgaactggagaggcgccatgggctggatcacagaagatcttattagacggaatgctgaacacaacgactgtgtcattttttccctggaggaactctcgttgcatcagcaagaaatagaaagactagaacacattgataaatggtgccgggatttaaaaattctctatcttcaaaataatcttattgggaaaattgaaaatgttagcaaactcaagaaacttgaatatttgaatttagctttaaacaacattgaaaaaatagaaaacttggaaggatgtgaagagctggcaaaacttgacctgactgtgaatttcattggagagctgagcagcattaaaaacttgcagcacaatatccatctgaaggagctctttctcatggggaacccatgtgcttcctttgaccactatagggagttcgtggtagcaactcttccacaattaaagtggttggatggtaaagaaatagagccttcagaaaggattaaggcattgcaggactattcagtaattgaaccacaaatcagagagcaggaaaaagatcactgtcttaaacgagccaaactcaaggaagaggctcagaggaaacaccaagaagaggataaaaatgaagacaagagaagtaacgcaggctttgatggacgttggtacacagacatcaatgctactctttcctctttagagagcaaagaccacctacaggcaccagacacagaggaacacaacacaaagaaattagacaacagtgaagatgacttggaattctggaataagccctgtttgtttactcctgaatcaagattggaaactcttagacacatggaaaaacaacggaagaaacaggaaaaattaagtgaaaaaaagaagaaagtgaaaccacccaggactttgatcactgaagatgggaaagccctaaatgtgaatgagcccaaaattgacttctctttgaaagataacgaaaagcagatcatcctggaccttgctgtctataggtatatggatacctctttaatcgatgttgatgtgcaaccaacttacgtgcgagtaatgatcaaaggaaagccatttcagcttgtccttcctgcagaagtgaaacccgatagtagttctgctaaaagatctcagacaacgggtcatttggtcatctgcatgcccaaggtaggagaagtaatcacaggtggtcagcgagcattcaaatctatgaaaactacctcggacaggagcagagaacaaacaaatacaagaagcaagcacatggagaaactagaagtagaccctagcaagcactcattccctgatgtgactaacatagttcaagagaaaaaacacacacccagaagacgacctgaacccaaaattataccaagtgaggaagacccaacctttgaagacaaccctgaagtgcctccgctgatttgaaacatctggctgcgttgccattggctgagacccaccaggtccagttttggttggtgtagagaccatatgcatattattcctgggataaacacagagttatttgtcaatatcgctgctccagtgttttaactcttactttgcatagtaatatccttaagatagcttaaaattaaaatgtatgtcttaaatgctataactcatcatttacctataataaagggttggtattgaaaatg

SEQ ID NO: 148161 - DNA, 548 bp, Homo sapiens
  Payload ID: 9325
  Gene Symbol: LRRC6
  Gene Name: leucine rich repeat containing 6
  ENST ID: ENST00000522584
  CDS Start-End: 66-335
aagggtgaaaagcgtcattcgaggtccgggtccggcttgcggggtcagcgaactggagaggcgccatgggctggatcacagaagatcttattagacggaatgctgaacacaacgactgtgtcattttttccctggaggaactctcgttgcatcagcaagaaatagaaagactagaacacattgataaatggtgccgggatttaaaaattctctatcttcaaaataatcttattgggaaaattgaaaatgttagcaaactcaagaaacttgaatatttgaatttagctttaaacaacattgaaaaaatagaaaacttggaagatgtcatctattgacttcctgatgtggacgatgcagattttgttctctcacaccatctgcaagctggtctctccatctccacctgtgtcatgaattccaggcaggatgtgaagagctggcaaaacttgacctgactgtgaatttcattggagagctgagcagcattaaaaacttgcagcacaatatccatctgaaggagctctttctcatggggaacccatgtgctt

SEQ ID NO: 148162 - DNA, 1878 bp, Homo sapiens
  Payload ID: 9325
  Gene Symbol: LRRC6
  Gene Name: leucine rich repeat containing 6
  Uniprot ID: Q86X45
  ENST ID: ENST00000620350
  CDS Start-End: 125-1525
agagtccccgttgccatggctcctgaattccgacggggacgcgctgaggagcaggggtgaagggtgaaaagcgtcattcgaggtccgggtccggcttgcggggtcagcgaactggagaggcgccatgggctggatcacagaagatcttattagacggaatgctgaacacaacgactgtgtcattttttccctggaggaactctcgttgcatcagcaagaaatagaaagactagaacacattgataaatggtgccgggatttaaaaattctctatcttcaaaataatcttattgggaaaattgaaaatgttagcaaactcaagaaacttgaatatttgaatttagctttaaacaacattgaaaaaatagaaaacttggaaggatgtgaagagctggcaaaacttgacctgactgtgaatttcattggagagctgagcagcattaaaaacttgcagcacaatatccatctgaaggagctctttctcatggggaacccatgtgcttcctttgaccactatagggagttcgtggtagcaactcttccacaattaaagtggttggatggtaaagaaatagagccttcagaaaggattaaggcattgcaggactattcagtaattgaaccacaaatcagagagcaggaaaaagatcactgtcttaaacgagccaaactcaaggaagaggctcagaggaaacaccaagaagaggataaaaatgaagacaagagaagtaacgcaggctttgatggacgttggtacacagacatcaatgctactctttcctctttagagagcaaagaccacctacaggcaccagacacagaggaacacaacacaaagaaattagacaacagtgaagatgacttggaattctggaataagccctgtttgtttactcctgaatcaagattggaaactcttagacacatggaaaaacaacggaagaaacaggaaaaattaagtgaaaaaaagaagaaagtgaaaccacccaggactttgatcactgaagatgggaaagccctaaatgtgaatgagcccaaaattgacttctctttgaaagataacgaaaagcagatcatcctggaccttgctgtctataggtatatggatacctctttaatcgatgttgatgtgcaaccaacttacgtgcgagtaatgatcaaaggaaagccatttcagcttgtccttcctgcagaagtgaaacccgatagtagttctgctaaaagatctcagacaacgggtcatttggtcatctgcatgcccaaggtaggagaagtaatcacaggtggtcagcgagcattcaaatctatgaaaactacctcggacaggagcagagaacaaacaaatacaagaagcaagcacatggagaaactagaagtagaccctagcaagcactcattccctgatgtgactaacatagttcaagagaaaaaacacacacccagaagacgacctgaacccaaaattataccaagtgaggaagacccaacctttgaagacaaccctgaagtgcctccgctgatttgaaacatctggctgcgttgccattggctgagacccaccaggtccagttttggttggtgtagagaccatatgcatattattcctgggataaacacagagttatttgtcaatatcgctgctccagtgttttaactcttactttgcatagtaatatccttaagatagcttaaaattaaaatgtatgtcttaaatgctataactcatcatttacctataataaagggttggtattgaaaatgtttagtaagatcatagaactattgcataaaacactgattataaatactgtctacttatgcaaagtattaattcatagataaaaggactgagtattaaattggtacttcagcaaagtg

SEQ ID NO: 148163 - DNA, 1754 bp, Homo sapiens
  Payload ID: 9325
  Gene Symbol: LRRC6
  Gene Name: leucine rich repeat containing 6
  ENST ID: ENST00000618342
  CDS Start-End: 1-1401
atggggacagtcacagaagatcttattagacggaatgctgaacacaacgactgtgtcattttttccctggaggaactctcgttgcatcagcaagaaatagaaagactagaacacattgataaatggtgccgggatttaaaaattctctatcttcaaaataatcttattgggaaaattgaaaatgttagcaaactcaagaaacttgaatatttgaatttagctttaaacaacattgaaaaaatagaaaacttggaaggatgtgaagagctggcaaaacttgacctgactgtgaatttcattggagagctgagcagcattaaaaacttgcagcacaatatccatctgaaggagctctttctcatggggaacccatgtgcttcctttgaccactatagggagttcgtggtagcaactcttccacaattaaagtggttggatggtaaagaaatagagccttcagaaaggattaaggcattgcaggactattcagtaattgaaccacaaatcagagagcaggaaaaagatcactgtcttaaacgagccaaactcaaggaagaggctcagaggaaacaccaagaagaggataaaaatgaagacaagagaagtaacgcaggctttgatggacgttggtacacagacatcaatgctactctttcctctttagagagcaaagaccacctacaggcaccagacacagaggaacacaacacaaagaaattagacaacagtgaagatgacttggaattctggaataagccctgtttgtttactcctgaatcaagattggaaactcttagacacatggaaaaacaacggaagaaacaggaaaaattaagtgaaaaaaagaagaaagtgaaaccacccaggactttgatcactgaagatgggaaagccctaaatgtgaatgagcccaaaattgacttctctttgaaagataacgaaaagcagatcatcctggaccttgctgtctataggtatatggatacctctttaatcgatgttgatgtgcaaccaacttacgtgcgagtaatgatcaaaggaaagccatttcagcttgtccttcctgcagaagtgaaacccgatagtagttctgctaaaagatctcagacaacgggtcatttggtcatctgcatgcccaaggtaggagaagtaatcacaggtggtcagcgagcattcaaatctatgaaaactacctcggacaggagcagagaacaaacaaatacaagaagcaagcacatggagaaactagaagtagaccctagcaagcactcattccctgatgtgactaacatagttcaagagaaaaaacacacacccagaagacgacctgaacccaaaattataccaagtgaggaagacccaacctttgaagacaaccctgaagtgcctccgctgatttgaaacatctggctgcgttgccattggctgagacccaccaggtccagttttggttggtgtagagaccatatgcatattattcctgggataaacacagagttatttgtcaatatcgctgctccagtgttttaactcttactttgcatagtaatatccttaagatagcttaaaattaaaatgtatgtcttaaatgctataactcatcatttacctataataaagggttggtattgaaaatgtttagtaagatcatagaactattgcataaaacactgattataaatactgtctacttatgcaaagtattaattcatagataaaaggactgagtattaaattggtacttcagcaaagtg

SEQ ID NO: 148164 - DNA, 1684 bp, Homo sapiens
  Payload ID: 9326
  Gene Symbol: LRRC61
  Gene Name: leucine rich repeat containing 61
  Uniprot ID: Q9BV99
  ENST ID: ENST00000323078
  CDS Start-End: 443-1222
gcaggctgcgcttccggaagtaacccctggcgcatcccggaatccagagcgcccactacggcctttggccaggccccctgggcgcgttccgggagctcaggcctgcggcgctgggagaagcacgctggccaacaagttgggtggtgggcacgcggcccaggggtcaggggccgccaggcggcgggcggcggggctgcggctcttacctgccgaggaggcgccggctctgcggtgcggagttgcgccggacttcccagcttggccagtggctccgcaggctgccggctccacccctcagggactggctggcttcgagcagggcatcggaaccaggcctcctggcactggcctgggtagagccagggcgagcaccagctgacccccagtggaaccctgtgacagtcctgccagggcccaggccatcccaaccgacttccatctcatggaccctccagcggagaagccgggagaggctggcggactgcagatcacaccccagctgctgaagtcacgcacaggcgagttctccctggagtccatcctgctactgaagctgcgtggcttgggactggctgacctgggctgcctgggagagtgcctgggcctggagtggctggacctatcaggcaacgcgctcacccacctgggcccgctggcctccttgcgccagctagctgtgctcaatgtctccaacaatcggctgacgggcctggagccactggccacctgtgagaacttgcagagtctcaatgccgcaggcaacctactggccaccccgggccagctgcagtgtctggctgggctaccgtgcctggagtacctgcggctccgagaccctttggcccggctcagcaacccgctctgtgccaacccctcctactgggctgcagtccgggagctgctgcctggcctgaaagtcatcgacggtgagcgtgtgattgggcgtggtagtgagttctaccagctgtgccgagacctggacagctccttgcgtcccagctccagtccaggccccagagccaccgaggcccagccctgggtggagccaggctactgggagtcctggcccagccggagcagctccatcctggaggaggcctgccggcagttccaggacacactgcaggagtgctgggacctggaccgccaggccagcgacagcctggcccaggcggagcaggtactcagctctgcgggccccacctcttccttcgtcttctgaacgtggcctatggcccaggacagcctggcaggtggcctcgctgcccccagttcccctctctgcccccacactcgtcttagttgcttcacactggtcactggccctgcacactgggctattgctttatccctatcctgagagcagcccctccccaccatccctccacatgctgcaaggacagactgaagggctgtgagcaggtgtaagggctcccacatccgtgagcctgtgtccgcagctgctgccactctgggctgctccagcctgcaacttagtggaaggaattacttcctcctgaggctacaggcgagaaaggtagggatgggccagcctcccgtctcagctgttgggagacagtaggcaggctgagtggcccagagcactcctggaagtgggactcccctgccttgcaaatgtgcctctccagactgctcctgcacttaccccctccccgcagcacct

SEQ ID NO: 148165 - DNA, 1877 bp, Homo sapiens
  Payload ID: 9326
  Gene Symbol: LRRC61
  Gene Name: leucine rich repeat containing 61
  Uniprot ID: Q9BV99
  ENST ID: ENST00000359623
  CDS Start-End: 589-1368
ccctggcgcatcccggaatccagagcgcccactacggcctttggccaggccccctgggcgcgttccgggagctcaggcctgcggcgctgggagaagcacgctggccaacaagttgggtggtgggcacgcggcccaggggtcaggggccgccaggcggcgggcggcggggctgcggctcttacctgccgaggaggcgccggctctgcggtgcggagttgcgccggacttcccagcttggccagtggctccgcaggctgccggctccacccctcagattcatttggattcaaggttggctctcaacagtgccagctgcactgtcatcctaaagtacttctgtggaagagaacatggtggtgtcactgttgtaccagtgatgacacaaaatcccagatctacctgacgggcctgcgagggttgaagattgtgaagcaatagcctaagggactggctggcttcgagcagggcatcggaaccaggcctcctggcactggcctgggtagagccagggcgagcaccagctgacccccagtggaaccctgtgacagtcctgccagggcccaggccatcccaaccgacttccatctcatggaccctccagcggagaagccgggagaggctggcggactgcagatcacaccccagctgctgaagtcacgcacaggcgagttctccctggagtccatcctgctactgaagctgcgtggcttgggactggctgacctgggctgcctgggagagtgcctgggcctggagtggctggacctatcaggcaacgcgctcacccacctgggcccgctggcctccttgcgccagctagctgtgctcaatgtctccaacaatcggctgacgggcctggagccactggccacctgtgagaacttgcagagtctcaatgccgcaggcaacctactggccaccccgggccagctgcagtgtctggctgggctaccgtgcctggagtacctgcggctccgagaccctttggcccggctcagcaacccgctctgtgccaacccctcctactgggctgcagtccgggagctgctgcctggcctgaaagtcatcgacggtgagcgtgtgattgggcgtggtagtgagttctaccagctgtgccgagacctggacagctccttgcgtcccagctccagtccaggccccagagccaccgaggcccagccctgggtggagccaggctactgggagtcctggcccagccggagcagctccatcctggaggaggcctgccggcagttccaggacacactgcaggagtgctgggacctggaccgccaggccagcgacagcctggcccaggcggagcaggtactcagctctgcgggccccacctcttccttcgtcttctgaacgtggcctatggcccaggacagcctggcaggtggcctcgctgcccccagttcccctctctgcccccacactcgtcttagttgcttcacactggtcactggccctgcacactgggctattgctttatccctatcctgagagcagcccctccccaccatccctccacatgctgcaaggacagactgaagggctgtgagcaggtgtaagggctcccacatccgtgagcctgtgtccgcagctgctgccactctgggctgctccagcctgcaacttagtggaaggaattacttcctcctgaggctacaggcgagaaaggtagggatgggccagcctcccgtctcagctgttgggagacagtaggcaggctgagtggcccagagcactcctggaagtgggactcccctgccttgcaaatgtgcctctccagactgctcctgcacttaccccctccccgcagcaccttctctgcccgttcttgtccacacatctattaaatgcttctgttttca

SEQ ID NO: 148166 - DNA, 1456 bp, Homo sapiens
  Payload ID: 9326
  Gene Symbol: LRRC61
  Gene Name: leucine rich repeat containing 61
  Uniprot ID: Q9BV99
  ENST ID: ENST00000493307
  CDS Start-End: 646-1425
ggcgcatcccggaatccagagcgcccactacggcctttggccaggccccctgggcgcgttccgggagctcaggcctgcggcgctgggagaagcacgctggccaacaagttgggtggtgggcacgcggcccaggggtcaggggccgccaggcggcgggcggcggggctgcggctcttacctgccgaggaggcgccggctctgcggtgcggagttgcgccggacttcccagcttggccagtggctccgcaggctgccggctccacccctcaggcacaagagaagtagaagagtggccgctttccttctgggcacgcacttgggaaaaggcttgattcatttggattcaaggttggctctcaacagtgccagctgcactgtcatcctaaagtacttctgtggaagagaacatggtggtgtcactgttgtaccagtgatgacacaaaatcccagatctacctgacgggcctgcgagggttgaagattgtgaagcaatagcctaagggactggctggcttcgagcagggcatcggaaccaggcctcctggcactggcctgggtagagccagggcgagcaccagctgacccccagtggaaccctgtgacagtcctgccagggcccaggccatcccaaccgacttccatctcatggaccctccagcggagaagccgggagaggctggcggactgcagatcacaccccagctgctgaagtcacgcacaggcgagttctccctggagtccatcctgctactgaagctgcgtggcttgggactggctgacctgggctgcctgggagagtgcctgggcctggagtggctggacctatcaggcaacgcgctcacccacctgggcccgctggcctccttgcgccagctagctgtgctcaatgtctccaacaatcggctgacgggcctggagccactggccacctgtgagaacttgcagagtctcaatgccgcaggcaacctactggccaccccgggccagctgcagtgtctggctgggctaccgtgcctggagtacctgcggctccgagaccctttggcccggctcagcaacccgctctgtgccaacccctcctactgggctgcagtccgggagctgctgcctggcctgaaagtcatcgacggtgagcgtgtgattgggcgtggtagtgagttctaccagctgtgccgagacctggacagctccttgcgtcccagctccagtccaggccccagagccaccgaggcccagccctgggtggagccaggctactgggagtcctggcccagccggagcagctccatcctggaggaggcctgccggcagttccaggacacactgcaggagtgctgggacctggaccgccaggccagcgacagcctggcccaggcggagcaggtactcagctctgcgggccccacctcttccttcgtcttctgaacgtggcctatggcccaggacagcctggcag

SEQ ID NO: 148167 - DNA, 1864 bp, Homo sapiens
  Payload ID: 9327
  Gene Symbol: LRRC63
  Gene Name: leucine rich repeat containing 63
  Uniprot ID: Q05C16
  ENST ID: ENST00000378805
  CDS Start-End: 346-1864
ggaccccggttgctagggtgtgtctccttggcctcctagagggtggggatccgtggtgcttcttcgggaacagcctcctgcaggaagaccctcgctggacctttacctcgctgcctagattccgaggaaaaggagataggagacgaaaagccagttggtttggaaagcggccgattatcctaaagggtagtgtgggagtccagcacttccatgcccctctttgggtactacggaagggagatttccagcatcgtgtggaacatatgaccagggagtacaccttgagcgcttgtgtgcagttatcttttggcggattatgaaaaacagcacttattattcattaaaatgcaaaagcccccactgcttcttcgaagacccttacctccaaaattcactaagctgtctttacatgagaaaaaaacccatacagctaaaactggtaaaattgagtcactacatgtagcattcactgaagatgaaaccacttccattaaaatggatagaactcgttttcctgatgttttaagaaatcaatcactaacacctatcaatatccaaaatatctttcttgatcactgtgtacaagaaagagtgactgcaatttcatcaccccagaaatctactaagcatgtccgtgagcagattccagatactgctactggttccatattttttccacattgtaattcagcttctactcgaatttttgggaaacaaacaaacaaaatggaaagttcaagaaagtttaaaactatgaaagatgtttatactgaaaaaaggctagaaaacattttaattctttcttccaagttttccaaacctaaaagtactcctggctcagttatcgctcaaaaacttgagaaaatgcaccctaagcatcaacctttaccagagagtccaggctatacttatcagcacatctcgagagacttaagtgcaacagtgccaagccctccacctatgactgtatctatgaaaccagaaggacagtggcctgaacattttaaatcaactgctacattgacactaagagttactgaatttccaggttttgtttccttgccaacaccagttttaccaagaaaacctcacaggcagtctgtgatagaaactcttgtaacagaaaatggaaatatagaaagtgtcccaaagcaaatcccaccaagaccacctgaaggtctcaccaaaactgaaaaaatagaatcagagatacacgttgtacgtggtgaaggttttaagactgttgcagcaacacgatatgaaacaataacagccatgaccaacctggccatagtaaactgtcaagtatatgggagaaatgcacttaatctgaagggcttttttatcctaaattgtccagacttaacacctttggctttccagttgatatatcttaatttatcatttaatgatcttcattactttcccacagaaatattatgtcttaaaaatttacaaatactgaaattgagaaataatcctatcaaagaaattccttctgaaattcaacaacttgagttccttagaattttcaccattgcttttaatttaattactgttcttccaattgggttattttccttgtcttatcttgaagaacttgatgtttcctataatgaacttacttttattccaaatgaaattcagaaactcagatcacttgaaaaactgactgttgatgggaatgaactgagttttttcccccatggaattttgaagcttaacctgacaaaaattcagtttgagaataatttcactcatccttgtttttggagagataattatttgaataatccacaacaacttactcaaattatttctttgttcattgtccaaaataaactacataaattttatgataaga

SEQ ID NO: 148168 - DNA, 2114 bp, Homo sapiens
  Payload ID: 9327
  Gene Symbol: LRRC63
  Gene Name: leucine rich repeat containing 63
  ENST ID: ENST00000446175
  CDS Start-End: 351-2114
ttagcggaccccggttgctagggtgtgtctccttggcctcctagagggtggggatccgtggtgcttcttcgggaacagcctcctgcaggaagaccctcgctggacctttacctcgctgcctagattccgaggaaaaggagataggagacgaaaagccagttggtttggaaagcggccgattatcctaaagggtagtgtgggagtccagcacttccatgcccctctttgggtactacggaagggagatttccagcatcgtgtggaacatatgaccagggagtacaccttgagcgcttgtgtgcagttatcttttggcggattatgaaaaacagcacttattattcattaaaatgcaaaagcccccactgcttcttcgaagacccttacctccaaaattcactaagctgtctttacatgagaaaaaaacccatacagctaaaactggtaaaattgagtcactacatgtagcattcactgaagatgaaaccacttccattaaaatggatagaactcgttttcctgatgttttaagaaatcaatcactaacacctatcaatatccaaaatatctttcttgatcactgtgtacaagaaagagtgactgcaatttcatcaccccagaaatctactaagcatgtccgtgagcagattccagatactgctactggttccatattttttccacattgtaattcagcttctactcgaatttttgggaaacaaacaaacaaaatggaaagttcaagaaagtttaaaactatgaaagatgtttatactgaaaaaaggctagaaaacattttaattctttcttccaagttttccaaacctaaaagtactcctggctcagttatcgctcaaaaacttgagaaaatgcaccctaagcatcaacctttaccagagagtccaggctatacttatcagcacatctcgagagacttaagtgcaacagtgccaagccctccacctatgactgtatctatgaaaccagaaggacagtggcctgaacattttaaatcaactgctacattgacactaagagttactgaatttccaggttttgtttccttgccaacaccagttttaccaagaaaacctcacaggcagtctgtgatagaaactcttgtaacagaaaatggaaatatagaaagtgtcccaaagcaaatcccaccaagaccacctgaaggtctcaccaaaactgaaaaaatagaatcagagatacacgttgtacgtggtgaaggttttaagactgttgcagcaacacgatatgaaacaataacagccatgaccaacctggccatagtaaactgtcaagtatatgggagaaatgcacttaatctgaagggcttttttatcctaaattgtccagacttaacacctttggctttccagttgatatatcttaatttatcatttaatgatcttcattactttcccacagaaatattatgtcttaaaaatttacaaatactgaaattgagaaataatcctatcaaagaaattccttctgaaattcaacaacttgagttccttagaattttcaccattgcttttaatttaattactgttcttccaattgggttattttccttgtcttatcttgaagaacttgatgtttcctataatgaacttacttttattccaaatgaaattcagaaactcagatcacttgaaaaactgactgttgatgggaatgaactgagttttttcccccatggaattttgaagcttaacctgacaaaaattcagtttgagaataatttcactcatccttgtttttggagagataattatttgaataatccacaacaacttactcaaattatttctttgttcattgtccaaaataaactacataaattttatgataagatcccagtagaagttcagaagttactaaaatgcacatccaggtgtgaatggtgtcatggtcccaagtttggtgaaggttttcgtgtcatccgatcctgtgatatttttggagcatcacagcttccagttatgttttatgtctgttctccttcttgctatagaagaataaaggaaagcagttttgttttagatggtagtcctagtagaagaatagctctagatgtggagttgtcaaaagaattatag

SEQ ID NO: 148169 - DNA, 2327 bp, Homo sapiens
  Payload ID: 9327
  Gene Symbol: LRRC63
  Gene Name: leucine rich repeat containing 63
  ENST ID: ENST00000595396
  CDS Start-End: 1-1764
atgcaaaagcccccactgcttcttcgaagacccttacctccaaaattcactaagctgtctttacatgagaaaaaaacccatacagctaaaactggtaaaattgagtcactacatgtagcattcactgaagatgaaaccacttccattaaaatggatagaactcgttttcctgatgttttaagaaatcaatcactaacacctatcaatatccaaaatatctttcttgatcactgtgtacaagaaagagtgactgcaatttcatcaccccagaaatctactaagcatgtccgtgagcagattccagatactgctactggttccatattttttccacattgtaattcagcttctactcgaatttttgggaaacaaacaaacaaaatggaaagttcaagaaagtttaaaactatgaaagatgtttatactgaaaaaaggctagaaaacattttaattctttcttccaagttttccaaacctaaaagtactcctggctcagttatcgctcaaaaacttgagaaaatgcaccctaagcatcaacctttaccagagagtccaggctatacttatcagcacatctcgagagacttaagtgcaacagtgccaagccctccacctatgactgtatctatgaaaccagaaggacagtggcctgaacattttaaatcaactgctacattgacactaagagttactgaatttccaggttttgtttccttgccaacaccagttttaccaagaaaacctcacaggcagtctgtgatagaaactcttgtaacagaaaatggaaatatagaaagtgtcccaaagcaaatcccaccaagaccacctgaaggtctcaccaaaactgaaaaaatagaatcagagatacacgttgtacgtggtgaaggttttaagactgttgcagcaacacgatatgaaacaataacagccatgaccaacctggccatagtaaactgtcaagtatatgggagaaatgcacttaatctgaagggcttttttatcctaaattgtccagacttaacacctttggctttccagttgatatatcttaatttatcatttaatgatcttcattactttcccacagaaatattatgtcttaaaaatttacaaatactgaaattgagaaataatcctatcaaagaaattccttctgaaattcaacaacttgagttccttagaattttcaccattgcttttaatttaattactgttcttccaattgggttattttccttgtcttatcttgaagaacttgatgtttcctataatgaacttacttttattccaaatgaaattcagaaactcagatcacttgaaaaactgactgttgatgggaatgaactgagttttttcccccatggaattttgaagcttaacctgacaaaaattcagtttgagaataatttcactcatccttgtttttggagagataattatttgaataatccacaacaacttactcaaattatttctttgttcattgtccaaaataaactacataaattttatgataagatcccagtagaagttcagaagttactaaaatgcacatccaggtgtgaatggtgtcatggtcccaagtttggtgaaggttttcgtgtcatccgatcctgtgatatttttggagcatcacagcttccagttatgttttatgtctgttctccttcttgctatagaagaataaaggaaagcagttttgttttagatggtagtcctagtagaagaatagctctagatgtggagttgtcaaaagaattatagtacaatgatttatcgtatgtgtgtgtatatatatatatatatatatatttatatatatatatatttatatatatatattcatatatatatataaactttactggcttttactgcatatatatctgcatatagtaattcatctctttgaaagtagaggttctgtttggaagacataagtgtcttctcatacgaattatctttgtaattctagctccttatgaaagtttgtgattgtttgggaattgttgcagaataattactcaaggaggattagtaaagcctttagatttgaataaagctctagaaaatttctttcagagcctgtttactataaaaggaaaaatgttggaatcctttgcaaaatgggttatgtcttacaactggtcttttcatgcatccatactaagtgatgagatagcattgcagagtcatcagtggggtatgtgctgcatagagcttcaatgtcacacatccaagtgctcaatgcttgtgcatttctgtggaaatctgaccagcaccttccatctcaattgtaggttgttttggggaataaaagattaatt

SEQ ID NO: 148170 - DNA, 3327 bp, Homo sapiens
  Payload ID: 9328
  Gene Symbol: LRRC66
  Gene Name: leucine rich repeat containing 66
  Uniprot ID: Q68CR7
  ENST ID: ENST00000343457
  CDS Start-End: 8-2650
aggcattatgaaaaacctctatttcagagtcattaccatagttataggtctttattttactggaataatgacaaatgcatcaagaaaaagcaatattttattcaattctgaatgccaatggaatgaatatattctgacaaattgttcttttaccggaaagtgtgatatacctgtggacatatcacagacagcagccactgtggatgtaagtttcaatttctttagagttctcttacagtctcacacgaaaaaagaagagtggaaaataaaacatctggacctcagtaacaatctcatatcaaaaataaccttaagcccttttgcatatttacatgctttggaagtgttaaacctcagcaacaatgccatccactccctctcattggatctactcagtcctaagtcctcatgggtgaaacgccacagaagcagcttcagaaacaggtttccattgctgaaggtgctcattcttcaaagaaataaactcagtgacactcccaagggactgtggaaactgaagtcattgcagagtttggatctgtcattcaatgggatattgcaaatagggtggtctgattttcacaactgcctgcaactggagaatctctgtttaaagagcaacaagatattcaaaattcccccacaagccttcaaggacctcaaaaaattacaggtcatagaccttagcaacaatgctctgattaccatcctaccaatgatgatcatagctctagaatttccccatctagtggttgacttggctgataataactggcagtgtgatgatagtgtggcagtctttcaaaattttatttctgaatcctggaggaaaaagtggaatgtcatttgcaacaggtctatagggagtgaggaggccaacgggggcactccccagagcaggatttccagggaaacccgccttcctcccattcatctgcatcgcatgaaaagcctcataaggagcaaagcagagaggccccagggaggaaggcacacgggcatttctactctggggaagaaggcaaaggccggctctggtctcaggaagaagcagagacggctgccaaggagtgttagaagcacccgcgatgtgcaggctgccggcaaaaaagaggacgctccccaggacctggctctggcggtgtgcctgtcagtgttcatcacattccttgtcgccttcagcctgggggctttcacaaggccttatgttgacagactgtggcaaaaaaagtgccagagcaaaagccctggcctggacaacgcgtattcaaacgagggcttctacgatgacatggaagctgcggggcacacaccacacccagagacccatctgcgccaagtatttcctcatctaagcctctacgagaaccagacccctttctgggtgacacagccacacccacacgccaccgtaattcctgatagaactctgggaaggagcagaaaggatcctggcagttcgcagagcccaggacagtgcggggacaacaccggggcaggaagtggaaatgatggtgcagtctattccattctccagagacatccacatgccggtaaccgtgaactaatgtcagcagcgcaggaccacatccataggaatgatattctcggagaatggacttatgaaactgtggcccaggaagagcctctcagtgcacattcagtgggcgtctcttctgtagctggcacgtctcacgctgtctctggctcaagccgttatgattccaatgaattagacccttccctctccggagaaataacagcttccctctgtaaaatgctaacacatgcagaagcacagaggactggagatagtaaggaaagagggggcactgaacagtcactttgggactcgcagatggaattttctaaggaaaggcaagtgagttcatccattgatttgctgagcatacagcagccaaggctgtccggggcaagggctgaggaagcgctttcagcccactacagcgaggttccatacggtgacccaagagacacaggcccatcagtctttcctccaagatgggacagtggcctggatgtcactcctgctaacaaggaaccagtgcagaaatccactccttctgacacttgctgtgagttggagagtgactgtgactctgatgaggggtctctgttcactctgagctccataagttcagagagtgcaaggagcaagactgaagaggcagtgcctgatgaggagtccctgcaggacgagagctcaggggcaagcaaggacaatgtgacggctgtagacagtcttgaggaaaatgttaccttccaaacaattccagggaaatgcaagaatcaagaagatccctttgaaaaacctctcatttctgctccagactctggcatgtacaagactcatctggaaaatgcctctgacactgatagatctgagggcctgtcaccctggcccaggtcaccagggaatagtcccttaggggatgagtttccgggcatgttcacttatgattatgacacagctcttcaatccaaggcagcagaatggcattgctcacttagagacttagaattttcaaatgtggacgttttacagcaaacaccaccatgttctgctgaagttccctcagatcctgataaggctgccttccatgaaagagactcagacattttaaaataagaatctttcattaaggaaatattcacagctctaaacaatattcttttaaagatcatggcaggggaaaactaaagccttcacaacaagatcctgaaggagacaacatgaattccaaccaagtggacactgatgcaaatgagggttttgtgggcccacttgagggcgatgattctagaagggttataagctaaacacacttgttaacatcctatggggatgaacctgctcttcagtgtgaaagagaaagaggggaatattttgagatcattccaagaaccatgcaccattattacaagagctccaaacaaaaccagttcactgagaacacaggagcacttcatcaataggttggggtaaatattcagaagagaatctgttgcagttagacgaagtggttctaactttccttctcaaatacagacctggagcaatctgatgggatttggctctctgaaaagaacagctttaggatgacaaagacaaggatgttcaacttgatcatcaaagagaattcaaatgacattttttcatacatattgaagcacttaagtggaaatgctggatagattttaatgaattctgaacacacactagcacaactttttggaggctgatcgtgaaactgcaaaattggaaaagttctgagtaaatataaatgtttttaaataagttatgtt

SEQ ID NO: 148171 - DNA, 720 bp, Homo sapiens
  Payload ID: 9329
  Gene Symbol: LRRC69
  Gene Name: leucine rich repeat containing 69
  Uniprot ID: Q6ZNQ3
  ENST ID: ENST00000343709
  CDS Start-End: 18-593
acttcttttccaagatcatgactgagagattgttaataaaagcattgagtggtggtaaaaatacgaagatcattactttgaatgggaagaagatgacaaagatgccctcagcattaggaaaactgcctggcctgaagactctagtccttcagaataacctaatccccaaagtgtgtccagagttatgcaacttgacccagtttcaggatctgaagctgagggaattctactgtgagggaaacccactgttcctgcagcagccagtgatttctacacagcaggagaacgtctggagtctacaggaaataacatcaagatttgtaatgaatcagctagcagaaaataaccctttcctaatggatgacatagaacggtacccacaagtcaggagcatgatctctcagggaaaaacatgtgcaatatgtggacagtactttataaccgtatggctggaatgtgttcgatttgttcctccaccaaaggactggaagataagcaagaatctgaagctggtgcctctccaagtattaatttgttcttacaaatgttttactcaacgtgaccctaacctctttggaattgctcaggtgtagaacaggtgaggtgctcattcatagcctcactccacttgccctgtcagctctgcatacacagattatgccctacttaagataccatgcctgttctctttgtcaacacattaaataaaggaagaaaaat

SEQ ID NO: 148172 - DNA, 1044 bp, Homo sapiens
  Payload ID: 9329
  Gene Symbol: LRRC69
  Gene Name: leucine rich repeat containing 69
  Uniprot ID: Q6ZNQ3
  ENST ID: ENST00000448384
  CDS Start-End: 1-1044
atgactgagagattgttaataaaagcattgagtggtggtaaaaatacgaagatcattactttgaatgggaagaagatgacaaagatgccctcagcattaggaaaactgcctggcctgaagactctagtccttcagaataacctaatccccaaagtgtgtccagagttatgcaacttgacccagttgacaacactaaatctgggaaacaaccttttagaagaagttccggaagagatgaaatatcttacatctctgaagaatctccatttatctggaaataggatctgtagatttgcacctggagcctgtgatggcttacaaaatttaatcctgcttaatctgaacaacaatcatcttacgcagcttcctcaagaagtcagcagattaaaaagtcttacttatatgagtataaattataaccaactagccagcattcctagagaactttgttttcttgagaatcttgttgaacttcaacttaactacaatcagctgatatgcatacctgaagagattaaattcttgaagaagcttcagaagcttttgctagccagaaacaacattggagttttgccggaggaactttgtgatcttaaaaaactaagaatcctagacatagctggaaatattattcagatatttccatcaggatttcaggatctgaagctgagggaattctactgtgagggaaacccactgttcctgcagcagccagtgatttctacacagcaggagaacgtctggagtctacaggaaataacatcaagatttgtaatgaatcagctagcagaaaataaccctttcctaatggatgacatagaacggtacccacaagtcaggagcatgatctctcagggaaaaacatgtgcaatatgtggacagtactttataaccgtatggctggaatgtgttcgatttgttcctccaccaaaggactggaagataagcaagaatctgaagctggtgcctctccaagtattaatttgttcttacaaatgttttactcaacgtgaccctaacctctttggaattgctcaggtgtag

SEQ ID NO: 148173 - DNA, 571 bp, Homo sapiens
  Payload ID: 9329
  Gene Symbol: LRRC69
  Gene Name: leucine rich repeat containing 69
  ENST ID: ENST00000518304
  CDS Start-End: 420-571
tcagatttaatttttggacaggaacatttcataggtggtgctgctgtgtactttttaattcattacttcataaggcttataatgtgattgtctcaattttattgatgctaaaatgattagtgggttattaacctgatcacttgattataaagttcctcatcaacctttcatctaatactttcagtctccaattatgatttttgcatagctccattattttattagaatttgcaaaaattgtgattattctagttattttgtctttctcatttattagtttcaattcttgtgaataagaactttattaactattaagttatatttaagtgcagtttgtactggaaaagcagaataaatgcttatattttttcctttatcaattttcagactgagttggtgcgctagtaattcccaggatcatgactgagagattgttaataaaagcattgagtggtggtaaaaatacgaagatcattactttgaatgggaagaagatgacaaagatgccctcagcattaggaaaactgcctggcctgaagactctagtccttcagaataacctaatccccaa

SEQ ID NO: 148174 - DNA, 1861 bp, Homo sapiens
  Payload ID: 9329
  Gene Symbol: LRRC69
  Gene Name: leucine rich repeat containing 69
  ENST ID: ENST00000520099
  CDS Start-End: 44-253
gaactctaatggttaccttgttttctacttcttttccaagatcatgactgagagattgttaataaaagcattgagtggtggtaaaaatacgaagatcattactttgaatgggaagaagatgacaaagatgccctcagcattaggaaaactgcctggcctgaagactctagtccttcagaataacctaatccccaaagtgtgtccagagttatgcaacttgacccaggccgggtgcggtggctcatgcctgtaatcccagcactttgggaggctgaggcaggcggatcacttgaaaccaggagttcgagaccagcctggccaacatggcaaaaatcccatctctactaaaaatgcaaaaaaaaaaaaaaaaaaaaaaaaaaaaaaaaaaaaaaaaaaagccaggcgtggtggcacatacctactacttgggaagctgaatgagaatcacttcaacccaggaggcagaggttgcagtgagccgagatcatgccaatgcacgccagcctgggtgacagagtgagactgtctcaaaaggaaaaaaaaattcttctaattatggcttacaaaatttaatcctgcttaatctgaacaacaatcatcttacgcagcttcctcaagaagtcagcagagtctggccctactcacccaggctggagtgcaatggcatgatctcggctcactgcaacctccgccttccaggttcaaatgattctcctgcctcagcctcccgagtagctggtattacaggagtaaaacagaaatttatttctcatagttctggaagttgggaagtgaagaccaaggtgctggcagatgtgatgtctgattaaaaagtcttacttatatgagtataaattataaccaactagccagcattcctagagaactttgttttcttgagaatcttgttgaacttcaacttaactacaatcagctgatatgcatacctgaagagattaaattcttgaagaagcttcagaagcttttgctagccagaaacaacattggagttttgccggaggaactttgtgatcttaaaaaactaagaatcctagacatagctggaaatattattcagatatttccatcaggatttcaggatctgaagctgagggaattctactgtgagggaaacccactgttcctgcagcagccagtgatttctacacagcaggagaacgtctggagtctacaggaaataacatcaagatttgtaatgaatcagctagcagaaaataaccctttcctaatggatgacatagaacggtacccacaagtcaggagcatgatctctcagggaaaaacatgtgcaatatgtggacagtactttataaccgtatggctggaatgtgttcgatttgttcctccaccaaagaaactacaacctaatacaagcaacaacagccagaatttatttggtactgagtgtgcatctggtgctctgctaaatatgtcacctggaatacctcaattaatgtccaaaataaccccatgacaccagtaagaaatccaaggactggaagataagcaagaatctgaagctggtgcctctccaagtattaatttgttcttacaaatgttttactcaacgtgaccctaacctctttggaattgctcaggtgtagaacaggtgaggtgctcattcatagcctcactccacttgccctgtcagctctgcatacacagattatgccctacttaagataccatgcctgttctctttgtcaacacattaaataaaggaagaaaaataattccattataacgttcccaatctaagcactacaatctgccttcagcttgcttagattctaggtgtgctttttttggcttaaaaaagtacaaaaaaaaattgaaaaat

SEQ ID NO: 148175 - DNA, 5000 bp, Homo sapiens
  Payload ID: 9330
  Gene Symbol: LRRC7
  Gene Name: leucine rich repeat containing 7
  Uniprot ID: Q96NW7
  ENST ID: ENST00000035383
  CDS Start-End: 31-4644
ttctgcgtttctctagtgcagtgcctggagatgaccaccaaacggaaaatcatcggccgtctggtgccatgccgatgtttccgaggtgaagaagaaatcatctcagttttagattactcccactgcagtcttcagcaggtgccaaaggaggtctttaacttcgaacgaacattagaggagctttatctagatgccaatcaaattgaagaactacccaagcaattgttcaactgtcaagctctacgaaaactaagtattcctgataacgacctttcaaatctgccaaccactattgctagtttagttaatcttaaagaactcgacatcagtaaaaatggtgtacaagaatttccagaaaacataaagtgctgtaagtgtttaacaattattgaagccagtgtcaatcccatttctaaactacctgatggcttcacacagctcctaaacctgacccagctctacctgaatgacgcctttcttgaatttcttccagccaattttggaagacttgtcaaattgcggatcttggagttaagagaaaatcacttgaaaactctaccaaagtcaatgcacaaactggcccagttggaaagacttgacctaggcaataatgaattcggtgagctgcctgaagttctggatcaaatacaaaatttgagggagttatggatggataataatgcattacaagtgttacctgggtctatagggaagttaaagatgttggtatacctggatatgtcaaaaaacagaatagaaacagttgacatggacatttctggatgtgaagcccttgaggacctcttattgtcatccaatatgttgcaacaattgcctgattctataggacttttgaaaaaactaacaactctaaaagtagatgacaatcaacttacaatgctacccaatacaattggaaatttatctttattagaagaatttgactgtagctgtaatgaactggagtcactaccttctactattggctaccttcatagtcttcggacattagcagttgatgagaatttccttccagaattacccagagaaattggaagttgtaagaatgtaacagtcatgtctctacgctccaacaaattagaatttcttcctgaagagattggacagatgcagaaactaagagtcctaaatttgagtgacaacagattgaagaatttaccattctcatttaccaaacttaaagagcttgcagctttgtggctttctgacaatcagtccaaagcccttatccctttacaaacagaagcccatccagaaacaaagcaaagagtattgactaactacatgtttccccagcagcctcgtggtgatgaagatttccagtcagacagtgacagctttaaccctacactgtgggaagagcagagacaacaacgcatgactgttgcctttgaatttgaagacaaaaaagaagatgacgaaaatgctgggaaagttaaggatctctcctgccaagccccctgggaaaggggccagcgtgggattactctccaacctgccagactgtctggcgattgctgcacaccatgggccaggtgtgatcagcagatccaagatatgcccgtcccccagaatgacccacagctggcatggggttgtataagtggcctccagcaggaaaggagcatgtgtactccattgccagttgcagcacaatccaccactcttccctctctaagtggcagacaggttgaaataaacctaaaacgatatccaactccttacccagaggatttaaagaatatggtaaaatctgttcaaaatttggtgggtaagccaagccatggagtgcgtgttgagaattcaaatccaactgctaacacggagcaaactgtgaaagaaaaatatgaacacaagtggccggtagccccaaaggagattacagtggaggattcttttgttcatccagctaatgaaatgaggattggggaacttcacccttcattagctgagacccctctgtacccacccaaacttgttctgctagggaaggacaaaaaagaatcaactgatgagtctgaagttgacaaaactcactgtctgaataacagtgtttcctcaggcacttactcagactactcgccttcccaggcttcctcaggatcctctaatacccgggttaaagtggggtccttgcagacaacagctaaagatgcagtacataattctttgtggggtaacaggattgcaccatctttcccacagcctcttgattcaaagccattactcagccagcgggaggctgttcccccaggcaatataccacagcgtcctgaccggctgcccatgagtgatactttcactgacaactggactgatggctcgcattatgacaacacagggtttgttgctgaggaaaccacagccgagaatgccaacagtaatcctctcttaagttcgaaatctagaagcacatcttcgcatggacgcaggcctttgatcaggcaagacaggattgttggtgttcccctggaactcgagcagtctacacacagacacacaccagaaacagaagtgcctccttccaatccttggcagaattggaccagaacccctagtccgtttgaagacaggaccgcttttccttccaaattagagacaacccccactaccagcccattgcctgaaaggaaagaacatataaaggaatctactgaaatacctagtcctttttctccaggcgtaccatgggagtatcatgattccaatcccaacaggagtcttagtaatgtcttttctcaaatccactgccgcccggaatcttctaaaggtgttatttcaattagcaaaagcacagagaggctttcccccctaatgaaagatatcaagtctaataaattcaaaaagtcacagagtatcgatgagattgacattggtacatataaggtgtataacataccattagaaaactatgcttctgggagtgatcacttaggaagccacgaacgaccggataagatgctgggaccagagcatggtatgtccagtatgtctcgaagccagtcagtcccaatgctggatgatgagatgctcacctacggaagtagtaaggggccacaacaacaaaaagcttctatgacaaaaaaagtctatcagtttgaccaaagcttcaatcctcaaggatcagtggaagtgaaagccgaaaagaggataccacccccttttcaacacaatcccgagtacgtgcaacaggccagcaaaaacatcgccaaggatttgattagtcctagagcttacagaggatacccaccgatggagcaaatgttttcattttctcagccatctgtgaatgaggatgctgtggtgaatgcccagttcgcaagccaaggggccagggcgggcttcctgagaagggccgactccctggtgagcgccacagaaatggccatgtttagaagggtcaatgagcctcatgagctgcccccaactgataggtacggcagacccccatataggggagggctggatcgccaaagcagcgttacagtgactgagtcccagttcctgaaaaggaatggcaggtatgaagatgaacacccttcatatcaagaagtgaaagctcaggcgggaagttttccggttaaaaaccttacccaaaggaggccattgtctgcgagaagctacagtacagagagttacggtgcctcccaaaccaggccagtttcagctaggcctactatggcagctcttttggaaaaaataccatctgactataacttgggtaactatggtgacaagccatcagataacagtgatttaaagacgaggcctactcctgtgaagggagaggagagctgtggtaaaatgcctgcagactggagacaacagctgcttagacatatagaagctagacggttagacaggaatgctgcttacaaacacaatacagttaaccttggcatgctgccctatggaggtatttcagcaatgcatgcaggcagaagcatgactttaaacttgcagactaagtctaaatttgatcatcaagaactacctcttcagaaaaccccgtcccagcaaagcaacattttagacaatggacaagaagatgtatctcctagtggccaatggaatccttatccacttgggaggcgggatgtacctccggacaccattactaagaaggcaggcagccacatccagacgttgatggggtcccaaagccttcagcatcgcagccgggagcagcagccgtatgaaggaaatataaacaaagtgaccatccagcaatttcagtcaccattgcctattcagatcccctcttcacaggccacccggggacctcagcctggacggtgcttaattcaaactaaagggcaaaggagtatggatggatatccagagcagttttgtgtgagaatagaaaagaatcctggccttggatttagtatcagtggtggaattagtggacaaggaaatccattcaaaccttctgacaagggtatctttgttactagggttcagcctgatgggccagcatcaaacctactgcagcctggtgataagatccttcaggcaaatggacacagttttgtacatatggaacatgaaaaagctgtattactactgaagagtttccagaacacagtagacctagttattcaacgtgagcttactgtctaaatattttttataaatagtgaagatacgtctagccagacctaatgttcaaaaataaatttatacatagaaacaaattttgccaattgctggaccaatggcaaacattagtgccaaatgtataatactatatgttagcactgaccatccttaaaaaatgttaactctataaatatgatgttcatgtggttatgtattagttttaattgtcagcctctggctgtgcattggtgcagttttgtttctgtttttgtttttgtttttaatcaaataagtttcttctcaaaatggatttcatataatttcggagcacggaagcacacacaagctctttatgaattctgctctccatcagaaac

SEQ ID NO: 148176 - DNA, 6507 bp, Homo sapiens
  Payload ID: 9330
  Gene Symbol: LRRC7
  Gene Name: leucine rich repeat containing 7
  ENST ID: ENST00000310961
  CDS Start-End: 419-4906
gcttcccgcgggaacctctccagccgtccacctgaagggcactggcatcatggtctaacgtggcaccttcctggattcccctctatctcctgttcttcctaccttctactccttccctcctcttctcctccgaagaccctggcgcccactccactgcggacccctgaacacttaaggaataacccttggcagctgcacgactacgctctccgaaacctcatgggcagtttctcccgccggcgatgatggagaacctaataaggggaaggaatcccccgcaataccagagaagtccttgtaaagaggttcgtgcagcacttcggaagaggcctgaagaggagtgagcccgctacatgaaaaaaaatgcaagtcaaagtggtcacaacctagaagtctgcagagacaggaataactagcaatgcagtgcctggagatgaccaccaaacggaaaatcatcggccgtctggtgccatgccgatgtttccgaggtgaagaagaaatcatctcagttttagattactcccactgcagtcttcagcaggtgccaaaggaggtctttaacttcgaacgaacattagaggagctttatctagatgccaatcaaattgaagaactacccaagcaattgttcaactgtcaagctctacgaaaactaagtattcctgataacgacctttcaaatctgccaaccactattgctagtttagttaatcttaaagaactcgacatcagtaaaaatggtgtacaagaatttccagaaaacataaagtgctgtaagtgtttaacaattattgaagccagtgtcaatcccatttctaaactacctgatggcttcacacagctcctaaacctgacccagctctacctgaatgacgcctttcttgaatttcttccagccaattttggaagacttgtcaaattgcggatcttggagttaagagaaaatcacttgaaaactctaccaaagtcaatgcacaaactggcccagttggaaagacttgacctaggcaataatgaattcggtgagctgcctgaagttctggatcaaatacaaaatttgagggagttatggatggataataatgcattacaagtgttacctgggtctatagggaagttaaagatgttggtatacctggatatgtcaaaaaacagaatagaaacagttgacatggacatttctggatgtgaagcccttgaggacctcttattgtcatccaatatgttgcaacaattgcctgattctataggacttttgaaaaaactaacaactctaaaagtagatgacaatcaacttacaatgctacccaatacaattggaaatttatctttattagaagaatttgactgtagctgtaatgaactggagtcactaccttctactattggctaccttcatagtcttcggacattagcagttgatgagaatttccttccagaattacccagagaaattggaagttgtaagaatgtaacagtcatgtctctacgctccaacaaattagaatttcttcctgaagagattggacagatgcagaaactaagagtcctaaatttgagtgacaacagattgaagaatttaccattctcatttaccaaacttaaagagcttgcagctttgtggctttctgacaatcagtccaaagcccttatccctttacaaacagaagcccatccagaaacaaagcaaagagtattgactaactacatgtttccccagcagcctcgtggtgatgaagatttccagtcagacagtgacagctttaaccctacactgtgggaagagcagagacaacaacgcatgactgttgcctttgaatttgaagacaaaaaagaagatgacgaaaatgctgggaaagttaaggatctctcctgccaagccccctgggaaaggggccagcgtgggattactctccaacctgccagactgtctggcgattgctgcacaccatgggccaggtgtgatcagcagatccaagatatgcccgtcccccagaatgacccacagctggcatggggttgtataagtggcctccagcaggaaaggagcatgtgtactccattgccagttgcagcacaatccaccactcttccctctctaagtggcagacaggttgaaataaacctaaaacgatatccaactccttacccagaggatttaaagaatatggtaaaatctgttcaaaatttggtgggtaagccaagccatggagtgcgtgttgagaattcaaatccaactgctaacacggagcaaactgtgaaagaaaaatatgaacacaagtggccggtagccccaaaggagattacagtggaggattcttttgttcatccagctaatgaaatgaggattggggaacttcacccttcattagctgagacccctctgtacccacccaaacttgttctgctagggaaggacaaaaaagaatcaactgatgagtctgaagttgacaaaactcactgtctgaataacagtgtttcctcaggcacttactcagactactcgccttcccaggcttcctcaggatcctctaatacccgggttaaagtggggtccttgcagacaacagctaaagatgcagtacataattctttgtggggtaacaggattgcaccatctttcccacagcctcttgattcaaagccattactcagccagcgggaggctgttcccccaggcaatataccacagcgtcctgaccggctgcccatgagtgatactttcactgacaactggactgatggctcgcattatgacaacacagggtttgttgctgaggaaaccacagccgagaatgccaacagtaatcctctcttaagttcgaaatctagaagcacatcttcgcatggacgcaggcctttgatcaggcaagacaggattgttggtgttcccctggaactcgagcagtctacacacagacacacaccagaaacagaagtgcctccttccaatccttggcagaattggaccagaacccctagtccgtttgaagacaggaccgcttttccttccaaattagagacaacccccactaccagcccattgcctgaaaggaaagaacatataaaggaatctactgaaatacctagtcctttttctccaggcgtaccatgggagtatcatgattccaatcccaacaggagtcttagtaatgtcttttctcaaatccactgccgcccggaatcttctaaaggtgttatttcaattagcaaaagcacagagaggctttcccccctaatgaaagatatcaagtctaataaattcaaaaagtcacagagtatcgatgagattgacattggtacatataaggtgtataacataccattagaaaactatgcttctgggagtgatcacttaggaagccacgaacgaccggataagatgctgggaccagagcatggtatgtccagtatgtctcgaagccagtcagtcccaatgctggatgatgagatgctcacctacggaagtagtaaggggccacaacaacaaaaagcttctatgacaaaaaaagtctatcagtttgaccaaagcttcaatcctcaaggatcagtggaagtgaaagccgaaaagaggataccacccccttttcaacacaatcccgagtacgtgcaacaggccagcaaaaacatcgccaaggatttgattagtcctagagcttacagaggatacccaccgatggagcaaatgttttcattttctcagccatctgtgaatgaggatgctgtggtgaatgcccagttcgcaagccaaggggccagggcgggcttcctgagaagggccgactccctggtgagcgccacagaaatggccatgtttagaagggtcaatgagcctcatgagctgcccccaactgataggtacggcagacccccatataggggagggctggatcgccaaagcagcgttacagtgactgagtcccagttcctgaaaaggaatggcaggtatgaagatgaacacccttcatatcaagaagtgaaagctcaggcgggaagttttccggttaaaaaccttacccaaaggaggccattgtctgcgagaagctacagtacagagagttacggtgcctcccaaaccaggccagtttcagctaggcctactatggcagctcttttggaaaaaataccatctgactataacttgggtaactatggtgacaagccatcagataacagtgatttaaagacgaggcctactcctgtgaagggagaggagagctgtggtaaaatgcctgcagactggagacaacagctgcttagacatatagaagctagacggttagacaggaccccgtcccagcaaagcaacattttagacaatggacaagaagatgtatctcctagtggccaatggaatccttatccacttgggaggcgggatgtacctccggacaccattactaagaaggcaggcagccacatccagacgttgatggggtcccaaagccttcagcatcgcagccgggagcagcagccgtatgaaggaaatataaacaaagtgaccatccagcaatttcagtcaccattgcctattcagatcccctcttcacaggccacccggggacctcagcctggacggtgcttaattcaaactaaagggcaaaggagtatggatggatatccagagcagttttgtgtgagaatagaaaagaatcctggccttggatttagtatcagtggtggaattagtggacaaggaaatccattcaaaccttctgacaagggtatctttgttactagggttcagcctgatgggccagcatcaaacctactgcagcctggtgataagatccttcaggcaaatggacacagttttgtacatatggaacatgaaaaagctgtattactactgaagagtttccagaacacagtagacctagttattcaacgtgagcttactgtctaaatattttttataaatagtgaagatacgtctagccagacctaatgttcaaaaataaatttatacatagaaacaaattttgccaattgctggaccaatggcaaacattagtgccaaatgtataatactatatgttagcactgaccatccttaaaaaatgttaactctataaatatgatgttcatgtggttatgtattagttttaattgtcagcctctggctgtgcattggtgcagttttgtttctgtttttgtttttgtttttaatcaaataagtttcttctcaaaatggatttcatataatttcggagcacggaagcacacacaagctctttatgaattctgctctccatcagaaacactgcctcaaagttgtatatgcctttatatagaaaatacaaatataaagaattgtaattcccataaaatatttctagcacaaggtatatgttggcatatatacaaaaagaatatagagaaaaacaatattttcataaactaaacatctcagatagagaaaaaatatatcttaaaataagactttactatattgaatctttttcaataaaaattacatgataatgccttatgaaagtaactgtacatatggtataaagtgtttatatttggttccatattcatttgctaaattctcatgacacagagtgaaatatttcataaattagccatttatctctgggacccaaataaaaataggatgaactaatttgttcaatgcctttagctaattacaatacatgcagagtttagaaacagactaaaggtcattgtagttaagtctttttcaccacaaatttaagcagtggatgatgggtggcaggaaaggtattgctttatttctttcaagttcatgttgattataaactgtagcccctgtgatttctttacttgtaaatgtggaatttatttgtgtgttgcttaatctaatttgctgctttttaaattatttaaaacgaattttggaaattgataaaatttatcattacgaaagactgctgttagaaagttatggtaggtgattttaaatccttggtatttaaatatgaaacttcaaatataatttctcagagctgtggtctacctgtatcattaatttcaatggctgtttttctgggcagaaatagataaaatactttttttccaaaaacagtttcaaggtatgtaaaatcctgaatgctttttcactgaagagaaagacaagcatggttaatgtagaattatttacttttccattgaaactattttcctgcataaatgatcaaaatttattttataatcctttaaaatacttatctttcatattagtcattaatttaattacaatattaatttgaatttccaggataatttcccggagttggttgcatgcattatctttcataattttacatagttcttttgttatataatgaatttactttacatgctagtgtttcaagtattgtatgaggattttcacaatagtatcactgaatgatgtcaccagagctctgagaataatatttgtaagttaactgttttatggggacattgaaaatattgtatttttgtagggtctattaaaatgagtgtcacttattagaa

SEQ ID NO: 148177 - DNA, 2375 bp, Homo sapiens
  Payload ID: 9330
  Gene Symbol: LRRC7
  Gene Name: leucine rich repeat containing 7
  ENST ID: ENST00000370958
  CDS Start-End: 191-844
gtctaacgtggcaccttcctggattcccctctatctcctgttcttcctaccttctactccttccctcctcttctcctccgaagaccctggcgcccactccactgcggacccctgaacacttaaggaataacccttggcagctgcacgactacgctctccgaaacctcatgggcagtttctcccgccggcgatgatggagaacctaataaggggaaggaatcccccgcaataccagagaagtccttgtaaagaggttcgtgcagcacttcggaagaggcctgaagaggagttgcagtgcctggagatgaccaccaaacggaaaatcatcggccgtctggtgccatgccgatgtttccgaggtgaagaagaaatcatctcagttttagattactcccactgcagtcttcagcaggtgccaaaggaggtctttaacttcgaacgaacattagaggagctttatctagatgccaatcaaattgaagaactacccaagcaattgttcaactgtcaagctctacgaaaactaagtattcctgataacgacctttcaaatctgccaaccactattgctagtttagttaatcttaaagaactcgacatcagtaaaaatggtgtacaagaatttccagaaaacataaagtgctgtaagtgtttaacaattattgaagccagtgtcaatcccatttctaaactacctgatggcttcacacagctcctaaacctgacccagctctacctgaatgacgcctttcttgaatttcttccagccaattttggaagacttgtcaaattgcggatcttggagttaagagaaaatcacttgaaaactctaccaaacatctgaagatccagagtgtgccccttgcccaatcgcctgagactatacagtgacacctacaacagaggatgtggagggagcagcttttcgggcaccagaaatggcagcatcaggagcatcagcacgaatagactttgtagaggtagttctcccaaactatattatgaaaccaaacatttttggtgcgctacctgctgatgggggctgccttcttactgcctagtatctacaaaatgtttggtctttgttaaagtttaacgatgacatttctgactaatatagagagacctgatttttttccaaatgtgttcagttgccataactttcaatgaatatgaaattttatcagtctcagaaaaacattaatacccatatttttatctaattgatttcactatttgttatgttaaggtgcttttgtgtataatttttgtatatatttttaaatgggatcaaactaagccataatttaaaagtcatcctaatgcagtaaataagataatttctctagtttgttaaattcttcagagaccgaatataattgctcgtttttctgtcatactccctgatgatgttccattgtggacttattttgcaaagttcccagatggcacaagtcaaaatatgaaatgctgatgattgattgattttatgtatcctttcatcttatgtaatttaatgtggaacagttattttgtagctctaaaatacatttgttaattaaccatattggcttttcatgcagttcaatggcttatagcatttcaatttgcatagaaaatgaatctctgtaatgatacttttgctaaataaataacaatcgacataatgggttcatttgcttttaacattttatacatacaatttagaagtaggatatatttcatattgaaattttgaaaagcttgaaattcaacatacaaggtcaccatcttgctgatgcctaatgcagtacagcaaattcattcttcatcccatgttaactcctttttggaacaagtcaaaatacaaataatttacaatgattgtgttggagctattgcttgattaaatacaattcaaaggttctttttataaaacaggtgtgagcaggacacattgcacttacgggcttttcctatttttttggttctatttcattttactgcctaggaaagaaacatttttttgtaaaacctatgctatggaactgaaatgtactttattgaatatttctattctgttttatgaatatcaattatgtgaaatatataaatataaaattgccttagaatgcctaactctttgtataaaacagatatctgaaagtagatgttggttttttgttcaaattgtgtaaatgctgatttttccatgagtacttatgaagatctatatgtaaaaattttaagtctgcttactgtgtttgtaccaccttgttcttagctgtgtatactctatgctaattgacttctgtcattgtcacatatattgcatatgtctctcaaaaattaaaaggtatattgctattctaaaaataaaaaatgtaaattcctga

SEQ ID NO: 148178 - DNA, 3996 bp, Homo sapiens
  Payload ID: 9330
  Gene Symbol: LRRC7
  Gene Name: leucine rich repeat containing 7
  ENST ID: ENST00000415775
  CDS Start-End: 1424-3889
ctagtgcagtgcctggagatgaccaccaaacggaaaatcatcggccgtctggtgccatgccgatgtttccgaggtgaagaagaaatcatctcagttttagattactcccactgcagtcttcagcaggtgccaaaggaggtctttaacttcgaacgaacattagaggagctttatctagatgccaatcaaattgaagaactacccaagcaattgttcaactgtcaagctctacgaaaactaagtattcctgataacgacctttcaaatctgccaaccactattgctagtttagttaatcttaaagaactcgacatcagtaaaaatggtgtacaagaatttccagaaaacataaagtgctgtaagtgtttaacaattattgaagccagtgtcaatcccatttctaaactacctgatggcttcacacagctcctaaacctgacccagctctacctgaatgacgcctttcttgaatttcttccagccaattttggaagacttgtcaaattgcggatcttggagttaagagaaaatcacttgaaaactctaccaaagtcaatgcacaaactggcccagttggaaagacttgacctaggcaataatgaattcggtgagctgcctgaagttctggatcaaatacaaaatttgagggagttatggatggataataatgcattacaagtgttacctgggtctatagggaagttaaagatgttggtatacctggatatgtcaaaaaacagaatagaaacagttgacatggacatttctggatgtgaagcccttgaggacctcttattgtcatccaatatgttgcaacaattgcctgattctataggacttttgaaaaaactaacaactctaaaagtagatgacaatcaacttacaatgctacccaatacaattggaaatttatctttattagaagaatttgactgtagctgtaatgaactggagtcactaccttctactattggctaccttcatagtcttcggacattagcagttgatgagaatttccttccagaattacccagagaaattggaagttgtaagaatgtaacagtcatgtctctacgctccaacaaattagaatttcttcctgaagagattggacagatgcagaaactaagagtcctaaatttgagtgacaacagattgaagaatttaccattctcatttaccaaacttaaagagcttgcagctttgtggctttctgacaatcagtccaaagcccttatccctttacaaacagaagcccatccagaaacaaagcaaagagtattgactaactacatgtttccccagcagcctcgtggtgatgaagatttccagtcagacagtgacagctttaaccctacactgtgggaagagcagagacaacaacgcatgactgttgcctttgaatttgaagacaaaaaagaagatgacgaaaatgctgggaaagttaaggattgcaccatctttcccacagcctcttgattcaaagccattactcagccagcgggaggctgttcccccaggcaatataccacagcgtcctgaccggctgcccatgagtgatactttcactgacaactggactgatggctcgcattatgacaacacagggtttgttgctgaggaaaccacagccgagaatgccaacagtaatcctctcttaagttcgaaatctagaagcacatcttcgcatggacgcaggcctttgatcaggcaagacaggattgttggtgttcccctggaactcgagcagtctacacacagacacacaccagaaacagaagtgcctccttccaatccttggcagaattggaccagaacccctagtccgtttgaagacaggaccgcttttccttccaaattagagacaacccccactaccagcccattgcctgaaaggaaagaacatataaaggaatctactgaaatacctagtcctttttctccaggcgtaccatgggagtatcatgattccaatcccaacaggagtcttagtaatgtcttttctcaaatccactgccgcccggaatcttctaaaggtgttatttcaattagcaaaagcacagagaggctttcccccctaatgaaagatatcaagtctaataaattcaaaaagtcacagagtatcgatgagattgacattggtacatataaggtgtataacataccattagaaaactatgcttctgggagtgatcacttaggaagccacgaacgaccggataagatgctgggaccagagcatggtatgtccagtatgtctcgaagccagtcagtcccaatgctggatgatgagatgctcacctacggaagtagtaaggggccacaacaacaaaaagcttctatgacaaaaaaagtctatcagtttgaccaaagcttcaatcctcaaggatcagtggaagtgaaagccgaaaagaggataccacccccttttcaacacaatcccgagtacgtgcaacaggccagcaaaaacatcgccaaggatttgattagtcctagagcttacagaggatacccaccgatggagcaaatgttttcattttctcagccatctgtgaatgaggatgctgtggtgaatgcccagttcgcaagccaaggggccagggcgggcttcctgagaagggccgactccctggtgagcgccacagaaatggccatgtttagaagggtcaatgagcctcatgagctgcccccaactgataggtacggcagacccccatataggggagggctggatcgccaaagcagcgttacagtgactgagtcccagttcctgaaaaggaatggcaggtatgaagatgaacacccttcatatcaagaagtgaaagctcaggcgggaagttttccggttaaaaaccttacccaaaggaggccattgtctgcgagaagctacagtacagagagttacggtgcctcccaaaccaggccagtttcagctaggcctactatggcagctcttttggaaaaaataccatctgactataacttgggtaactatggtgacaagccatcagataacagtgatttaaagacgaggcctactcctgtgaagggagaggagagctgtggtaaaatgcctgcagactggagacaacagctgcttagacatatagaagctagacggttagacaggaatgctgcttacaaacacaatacagttaaccttggcatgctgccctatggaggtatttcagcaatgcatgcaggcagaagcatgactttaaacttgcagactaagtctaaatttgatcatcaagaactacctcttcagaaaaccccgtcccagcaaagcaacattttagacaatggacaagaagatgtatctcctagtggccaatggaatccttatccacttgggaggcgggatgtacctccggacaccattactaagaaggcaggcagccacatccagacgttgatggggtcccaaagccttcagcatcgcagccgggagcagcagccgtatgaaggaaatataaacaaagtgaccatccagcaatttcagtcaccattgcctattcagatcccctcttcacaggccacccggggacctcagcctggacggtgcttaattcaaactaaagggcaaaggagtatggatggatatccagagcagttttgtgtgagaatagaaaagaatcctggccttggatttagtatcagtggtggaattagtggacaaggaaatccattcaaaccttctgacaagggtatctttgttactagggttcagcctgatgggccagcatcaaacctactgcagcctggtgataagatccttcaggcaaatggacacagttttgtacatatggaacatgaaaaagctgtattactactgaagagtttccagaacacagtagacctagttattcaacgtgagcttactgtctaaatattttttataaatagtgaagatacgtctagccagacctaatgttcaaaaataaatttatacatagaaacaaattttgccaattgctggaccaatggcaaacatta

SEQ ID NO: 148179 - DNA, 775 bp, Homo sapiens
  Payload ID: 9330
  Gene Symbol: LRRC7
  Gene Name: leucine rich repeat containing 7
  ENST ID: ENST00000588515
  CDS Start-End: 1-185
agggtatctttgttactagggttcagcctgatgggccagcatcaaacctactgcagcctggtgataagatccttcaggcaaatggacacagttttgtacatatggaacatgaaaaagctgtattactactgaagagtttccagaacacagtagacctagttattcaacgaaaacatttactgtagctgaatctctgaggcctaaagtatattattcataaactgaaaacatttggagacatttcattgaagaatataacaaaaacattaaatattatgattataaatattaaaataaatatttgttgggcatcaactacatatcaggtactatgagggatgtaatgtggtcccctcagcacagaatctcacagtccagaggaaagatgagagaagttccacatcaaagacagtacaaggcaatgtgaaacttagtgtcattgcgcatcaacttagaaaatgtgaattgattaaaaatatgtgatggattgtgcagcatgcttacatttgaaaatggagattgtgcctttaaatacttaatcaaaggactcctgaccttcaagtaccagtttgggcatattactggagatccaggttgaaagtctttccactcagaggactcttatttggcttgaatgtggaaaaggcatctggttcaggcactgggacaactcttttccaaagaaagacccaaaaatcgtacaaataagtccaaatgaagcatgatgggaaatcagggactaattctgcttggaggacagggaaggctttcaaag

SEQ ID NO: 148180 - DNA, 786 bp, Homo sapiens
  Payload ID: 9330
  Gene Symbol: LRRC7
  Gene Name: leucine rich repeat containing 7
  ENST ID: ENST00000608815
  CDS Start-End: 1-98
acagttttgtacatatggaacatgaaaaagctgtattactactgaagagtttccagaacacagtagacctagttattcaacgaaaacatttactgtagctgaatctctgaggcctaaagtatattattcataaactgaaaacatttggagacatttcattgaagaatataacaaaaacattaaatattatgattataaatattaaaataaatatttgttgggcatcaactacatatcaggtactatgagggatgtaatgtggtcccctcagcacagaatctcacagtccagaggaaagatgagagaagttccacatcaaagacagtacaaggcaatgtgtatctttcccattctgcctgagatcatagctatttggtgtttgtttttcctatgaactttaagctttttgagagagaggatcagacaatacttaacaaaggacttctagacagaagagcctcaggagagaggagtaatcgttcagctcttcttggtttctgccttccctcctgctcttccagatgtcaaaagaagaatttacagtgaaaaataagaaacttagtgtcattgcgcatcaacttagaaaatgtgaattgattaaaaatatgtgatggattgtgcagcatgcttacatttgaaaatggagattgtgcctttaaatacttaatcaaaggactcctgaccttcaagtaccagtttgggcatattactggagatccaggttgaaagtctttccactcagaggactcttatttggcttgaatgtggaaaaggcatctggttcag

SEQ ID NO: 148181 - DNA, 712 bp, Homo sapiens
  Payload ID: 9330
  Gene Symbol: LRRC7
  Gene Name: leucine rich repeat containing 7
  ENST ID: ENST00000609498
  CDS Start-End: 1-110
aggcaaatggacacagttttgtacatatggaacatgaaaaagctgtattactactgaagagtttccagaacacagtagacctagttattcaacgaaaacatttactgtagctgaatctctgaggcctaaagtatattattcataaactgaaaacatttggagacatttcattgaagaatataacaaaaacattaaatattatgattataaatattaaaataaatatttgttgggcatcaactacatatcaggtactatgagggatgtaatgtggtcccctcagcacagaatctcacagtccagaggaaagatgagagaagttccacatcaaagacagtacaaggcaatgtgtatctttcccattctgcctgagatcatagctatttggtgtttgtttttcctatgaactttaagctttttgagagagaggatcagacaatacttaacaaaggacttctagacagaagagcctcaggagagaaacttagtgtcattgcgcatcaacttagaaaatgtgaattgattaaaaatatgtgatggattgtgcagcatgcttacatttgaaaatggagattgtgcctttaaatacttaatcaaaggactcctgaccttcaagtaccagtttgggcatattactggagatccaggttgaaagtctttccactcagaggactcttatttggcttgaatgtggaaaaggcatctggttcag

SEQ ID NO: 148182 - DNA, 792 bp, Homo sapiens
  Payload ID: 9330
  Gene Symbol: LRRC7
  Gene Name: leucine rich repeat containing 7
  ENST ID: ENST00000608744
  CDS Start-End: 1-77
atgaaaaagctgtattactactgaagagtttccagaacacagtagacctagttattcaacgaaaacatttactgtagctgaatctctgaggcctaaagtatattattcataaactgaaaacatttggagacatttcattgaagaatataacaaaaacattaaatattatgattataaatattaaaataaatatttgttgggcatcaactacatatcaggtactatgagggatgtaatgtggtcccctcagcacagaatctcacagtccagaggaaagatgagagaagttccacatcaaagacagtacaaggcaatgtgaaacttagtgtcattgcgcatcaacttagaaaatgtgaattgattaaaaatatgtgatggattgtgcagcatgcttacatttgaaaatggagattgtgcctttaaatacttaatcaaaggactcctgaccttcaagtaccagtttgggcatattactggagatccaggttgaaagtctgttggcagagaaagtatgactctgcttttagccttctgcacaagacaaaatccttctggtgatcctcagtctttccactcagaggactcttatttggcttgaatgtggaaaaggcatctggttcagaaaaaaagttgattacagttgatcctcattattcatgggtgctatatttgcaaacttgcctactcactaaagtttatacccccaaatcaatgtgtggcacttccgaggtcattcataaacaggcacagaggagcaaaaaattggagtcaccccacgggcatgttcccagg

SEQ ID NO: 148183 - DNA, 2249 bp, Homo sapiens
  Payload ID: 9331
  Gene Symbol: LRRC70
  Gene Name: leucine rich repeat containing 70
  Uniprot ID: Q7Z2Q7
  ENST ID: ENST00000334994
  CDS Start-End: 240-2108
acattgactgtaaaggaaccaatgtgaagagtggtgtttcctgagcaaacggtgacttaaaaaaaaaaaaaaaaaagtggtggggtggaggtcagcagtgccacagaacaaactggagttaagaaatgtcgttcttcagatttaaaaagaaaacctttactgaatcagctgagtgttaataatacgaatttccttttcttgccaattctgatctgaacagaaaatccaagaacagggatatgtgtggattacagttttctctgccttgcctacgactgtttctggttgttacctgttatcttttattattactccacaaagaaatacttggatgttcgtctgtttgtcagctctgcactgggagacaaattaactgccgtaacttaggcctttcgagtattcctaagaattttcctgaaagtacagtttttctgtatctgactgggaataatatatcttatataaatgaaagtgaattaacaggacttcattctcttgtagcattgtatttggataattctaacattctgtatgtatatccaaaagcctttgttcaattgaggcatctatattttctatttctaaataataatttcatcaaacgcttagatcctggaatatttaagggacttttaaatcttcgtaatttatatttacagtataatcaggtatcttttgttccgagaggagtatttaatgatctagtttcagttcagtacttaaatctacaaaggaatcgcctcactgtccttgggagtggtacctttgttggtatggttgctcttcggatacttgatttatcaaacaataacattttgaggatatcagaatcaggctttcaacatcttgaaaaccttgcttgtttgtatttaggaagtaataatttaacaaaagtaccatcaaatgcctttgaagtacttaaaagtcttagaagactttctttgtctcataatcctattgaagcaatacagccctttgcatttaaaggacttgccaatctggaatacctcctcctgaaaaattcaagaattaggaatgttactagggatgggtttagtggaattaataatcttaaacatttgatcttaagtcataatgatttagagaatttaaattctgacacattcagtttgttaaagaatttaatttaccttaagttagatagaaacagaataattagcattgataatgatacatttgaaaatatgggagcatctttgaagatccttaatctgtcatttaataatcttacagccttgcatccaagggtccttaagccgttgtcttcattgattcatcttcaggcaaattctaatccttgggaatgtaactgcaaacttttgggccttcgagactggctagcatcttcagccattactctaaacatctattgtcagaatcccccatccatgcgtggcagagcattacgttatattaacattacaaattgtgttacatcttcaataaatgtatccagagcttgggctgttgtaaaatctcctcatattcatcacaagactactgcgctaatgatggcctggcataaagtaaccacaaatggcagtcctctggaaaatactgagactgagaacattactttctgggaacgaattcctacttcacctgctggtagattttttcaagagaatgcctttggtaatccattagagactacagcagtgttacctgtgcaaatacaacttactacttctgttaccttgaacttggaaaaaaacagtgctctaccgaatgatgctgcttcaatgtcagggaaaacatctctaatttgtacacaagaagttgagaagttgaatgaggcttttgacattttgctagcttttttcatcttagcttgtgttttaatcatttttttgatctacaaagttgttcagtttaaacaaaaactaaaggcatcagaaaactcaagggaaaatagacttgaatactacagcttttatcagtcagcaaggtataatgtaactgcctcaatttgtaacacttccccaaattctctagaaagtcctggcttggagcagattcgacttcataaacaaattgttcctgaaaatgaggcacaggtcattctttttgaacattctgctttataactcaactaaatattgtctataagaaacttcagtgccatggacatgatttaaactgaaacctccttatataattatatactttagttggaaatataatgaattatatgaggttagcattattaaaatatgtttttaataatt

SEQ ID NO: 148184 - DNA, 703 bp, Homo sapiens
  Payload ID: 9331
  Gene Symbol: LRRC70
  Gene Name: leucine rich repeat containing 70
  ENST ID: ENST00000491184
  CDS Start-End: 100-315
tttaaaaagaaaacctttactgaatcagctgagtgttaataatacgaatttccttttcttgccaattctgatctgaacagaaaatccaagaacagggatatgtgtggattacagttttctctgccttgcctacgactgtttctggttgttacctgttatcttttattattactccacaaagaaatacttggatgttcgtctgtttgtcagctctgcactgggagacaaattaactgccgtaacttaggcctttcgagtattcctaagaattttcctgaaagtacagtttttctccttgcatccaagggtccttaagccgttgtcttcattgattcatcttcaggcaaattctaatccttgggaatgtaactgcaaacttttgggccttcgagactggctagcatcttcagccattactctaaacatctattgtcagaatcccccatccatgcgtggcagagcattacgttatattaacattacaaattgtgttacatcttcaataaatgtatccagagcttgggctgttgtaaaatctcctcatattcatcacaagactactgcgctaatgatggcctggcataaagtaaccacaaatggcagtcctctggaaaatactgagactgagaacattactttctgggaacgaattcctacttcacctgctggtagattttttcaagagaatgcctttggtaatcca

SEQ ID NO: 148185 - DNA, 1959 bp, Homo sapiens
  Payload ID: 9332
  Gene Symbol: LRRC71
  Gene Name: leucine rich repeat containing 71
  Uniprot ID: Q8N4P6
  ENST ID: ENST00000337428
  CDS Start-End: 155-1834
gcgtaggctacgccaccgcggacgggtcggatccggtccctggacgcggaacagagatcccctgattcagccacccccagactgagccccgtagagtgcgttcttaccttcctgccccgacgaaggtcccagagacgctgcggacaacaccagcatgtcgagcgagcagagcgcgccgggggcctcacccagggccccgcgtccggggacccagaagtcttctggcgcggtgaccaaaaagggagagcgcgcggccaaagagaagccagcgaccgttctgcctcccgtgggggaggaggagcccaaaagccctgaggagtaccagtgctccggggtcctcgagaccgacttcgccgagctctgcacgcggtggggctacacggacttccccaaagttgtcaaccggccccgcccccacccgcccttcgtcccctccgcctctttgtcggaaaaggccaccttagacgatccgcggctgtcggggtcctgcagcctcaatagcctggagagcaaatacgtgttcttccggcccaccatccaggtggagctggagcaggaggacagcaagtcagtgaaggaaatctacatccgcggttggaaggttgaggaacggattctgggtgtcttctctaaatgtctgcccccgcttacccagctacaggccatcaacttgtggaaggtggggctgaccgataagaccctgaccaccttcatcgagctcctgcctctctgttcatccacgctcaggaaggtgtctctggaggggaacccactgccggagcagtcctatcacaagctcatggccttggacagcacgattgcgcacttgtctctgcggaacaataacatcgacgaccgcggggcgcaactcctgggccaggcgctgtccacgctgcacagctgcaaccggaccctcgtctcgctcaacctgggtttcaaccacatcggtgacgagggcgcaggctacatcgcggacggcctccggctgaaccgttccctgctctggctgtccctggcccacaaccgcatccaggacaagggcgccctgaagctggctgaggtcctgcgcgccttcgagctgacacacaccgaagtggtggagcgccgacgcctcctgctggaaaaagggacacaggagcgctcgcgatcgccctcctcctctcgacacggggactccaaaacggaccgtgagaagagtcagatggtagggatcagcaatagtgcattggtggacaagacagacaagacgcagacaatgaaaacccctaagggcctgggcaagaaaaaggagaaatcatgggaattggccaagaaagaggagaagttggggtctgggcagtcacccacacaaggaacccctaagaaggaagatgccacaaaggcaggcaaggggaaggtaaccatccctgaacagaagccaagcagggcaaaagggatcaagatcgggagcagagagaagcgcagcatcctcctggagtccgagctggttgttgaggctactgaggtggtcaaccctctcctggagcctgtggagcaccgagatgggaaagttttcatgcctgggaacaaggtccttttgcacctcaacctcatccggaaccgcatcacagaggtggggctggagggcttcctcgccacggtgcagtatcagatgcagttctccaaggccaagagtgcatccaagggtccagtggggctgctgtggctgtccctggctaaaaattgcttcgccccacaatgtcctgcgtacgccataatccaggagctgatgttgccaagggatcccatcaaggccaaactcagggaggatgaggccatggcattcttcccctagccccctcccacctgcttgcctctaagactcggggctacagaagcacctcctgtccctgtgtggggtgacctccctgggggagatctcagaccaataacaaagtctgttgctatacttttccttga

SEQ ID NO: 148186 - DNA, 454 bp, Homo sapiens
  Payload ID: 9333
  Gene Symbol: LRRC72
  Gene Name: leucine rich repeat containing 72
  ENST ID: ENST00000382124
  CDS Start-End: 74-247
caagtctctcttcggtgccaccggcgggcgaggccggattaatcaccgctgcttcggccgcccatgtgtcctgatgtcctgggacccgaaccccgtgccccgtaccttgcgatgctggcgcctacggagggcatccgaaactgccctacagagcagtcgccgggcagttgaagatcagctaaagatatgtggccacaggagggatgctgatgtctttgagctgttcctttctaaaaagactgggtaggactccaattattttaccacttcctggaatccacagttttctattggagagacaagatactgaaattgattaaaaaaaaaaaaattatggagacaggctgtttgaatcccagctctgtctcttccagctgggtgatcttggggaactgacagaggtcattgatctttctaggtttaaaaaattaaaatacttatggcttcatcataa

SEQ ID NO: 148187 - DNA, 1000 bp, Homo sapiens
  Payload ID: 9333
  Gene Symbol: LRRC72
  Gene Name: leucine rich repeat containing 72
  Uniprot ID: A6NJI9
  ENST ID: ENST00000401542
  CDS Start-End: 58-921
gccaccggcgggcgaggccggattaatcaccgctgcttcggccgcccatgtgtcctgatgtcctgggacccgaaccccgtgccccgtaccttgcgatgctggcgcctacggagggcatccgaaactgccctacagagcagtcgccgggcagttgaagatcagctaaagatatgtggccacaggagggatgctgatgtctttgagctgttcctttctaaaaaggaactgacagaggtcattgatctttctaggtttaaaaaattaaaatacttatggcttcatcataacaagctccatggaataacatttctaactagaaactattgtctgacagaactatatctaaacaacaatgcaatatttgagatagaaggtctgcattatttgccttcattgcatatactcctgctacaccacaatgagctaaccaacattgatgcaacagtgaaggaattaaagggaatgctaaatctgaagatcctaagtctataccaaaatcctttgtgccaatataacctgtatcgtttatatatcatctaccaccttccaggagtggagctgcttgaccgaaatcaagttacagaaaaagaaagaagatcaatgattaccatttttaaccataaaaaggctcatatcgttcaatcaatagcattcggaggaaaagtggatgcttcatgggatcctaaatcaccatttaagcaaaaaccagcccagagagtaccttcagattttgcatttgcaaataatgtagacaaaactgtgcttgatgacccagaagatgctgtttttgtgaggtccatgaagagatcagtgatgactttgacctctatgaactgggacacagttccaacacgagaggaaaggtaccttgaagaggaaggcacagaaacagctcaaatgctcacagttacactgagataagccctggtatttctagatatcttagtggttttcagttgtatattaaacttccctgtgacttagcatattacatacttac

SEQ ID NO: 148188 - DNA, 2121 bp, Homo sapiens
  Payload ID: 9334
  Gene Symbol: LRRC73
  Gene Name: leucine rich repeat containing 73
  Uniprot ID: Q5JTD7
  ENST ID: ENST00000372441
  CDS Start-End: 902-1852
gagggaacagtgccctggattccggcgggggtatggaccttaggaacggggaaggatggaagaatgggcagaagcagcagtaaccgtgcccaacgccatctccacggggcgtgcctccattccgctccccgtcagccctacccactcagccctgccgcctgccgcctgccagttggctgaccccactcccaagggaagagcggcctatcgctcccagctccttgccccgaaccacccagtgtacgcgaacctcgcgggccggcgtggccttggccgggcagggggcggggcgagcgccggtgacgcggccgttgccatgggaactcgccgcccgctcgctctctggagctggagccggagctgccgccagccgcccgcctcaggctctctctgccagccgtgcggccaggcccgcggggtggtcggggggagccgggcggcagagaaggagggagcgggtacggcctcctagccgagaccggtaagccgaagcccttgagccgctcgctgccgctgccgccgccgccgccgcgaccgcgagggacaaggacaagcgccgagcagcgcctgcccaacccccggaacgcgcacccgccccaacgcccagacacggaccgtgcgggccgcccccgccccagcgccgccccacttcagcccggcccgcgccctggacgcctccgcacctctggccggctccggctcagtcccggtagctcttctccgcccccgccgcagcctccgccgcagccgcagcctccgccacagccgccgcctccacccccggccccactccgcccgcgacccctgccggggccccgaccccggccctatccccggccccgcccgcggccccaccaacctccgttccggccccgtacccggaggcccagccgtgggcacgatgctgcccagctccatccagatttcgggggagccgctgtccggcgccgaggtgcgggacatctgccgcggccttcgcgacaacgccgtgcgcctgctctcactgcgcggctgccgcctctgcgaccgcgactttggccgcatctgccgggccctggccggggccacgtccctggcgcagctcaaccttaacctgggcgtcgtgtccagccccagccgcatcaagcagctggctgaggctctgcggaccaaccgctccatccagtccctcttcctgcatgggagccccctgacagatgcggggctggccttgctgaacccagccctggccctccaccctgccctcgtggctctggacctgggggactgcatgctgggtgatgaagccatcaacctcatctgtggcctcctgcccccagatggggccaaatctggcttgaaggagctaacgctgagtgccaaccctggcatcacccctaagggctggagccgccttgccattgccgtggcccacagctcccaggtccgcgtcctcaatctggattacaaccccctgggtgaccatgtggcaggaatgctggctgtagctgtggcctctagtcgtaccctagaggtcctagacttggagggcacagggctcaccaaccagtcagctcagaccctgctggacatggtagaaaattaccccacagctttgcggagcctggtgttggctgagaacagcattagcccagagctgcagcaacagatctgtgacctcctctctgagggagaggaggaggaggaagtggcaggaggggctggcgacacccaggaatgggagagagggcgggagcctgctgcccaccagagaggcagcagctcctggatgtgccccagcgatcccagctctcagatggtgctaatgacgtcaggactaggggacagtctgttggctgagaccgagatgtgactctccactgggcctctgcacaccatttcacttatctatgtcccgagcaccttgccccagatatcagggtcaggccctgggacttgggagggaactggggtcaggggctgcatgggggctctggcagctcctggcagtgtggtgggaaggaagctctggaagctgtgactgagcaacagccttggggggcacttgaacccacggcaatgcctttgaacttggcagctctggctgcaacccgctggctcggaaaagattttatgaactcc

SEQ ID NO: 148189 - DNA, 1647 bp, Homo sapiens
  Payload ID: 9335
  Gene Symbol: LRRC74A
  Gene Name: leucine rich repeat containing 74A
  ENST ID: ENST00000216450
  CDS Start-End: 125-727
gagtcacaaagtcacaggcgggtggggatcctttcaacagggctcccagcaatagagcagtcccactctcccagatgagctggagaagtagctacctctcccagacagagttggggtcaaattcatgcacatccaattcccatcaaagcctactcttcccagggcttgctgggagggaaggataactgcaggctcccctgggatgcccccagatgagattgaaattgagccagtacgacagagcagcgataaaatgctctactgtgaggccgaatccccgccgactgttgaaaaagtgaaaccagcccgggagaattcggaaacagacctggagattgaagatgatgagaaatttttcaccactggacaaaaggagctgtacctggaggcctgcaagctgatgggtgtagtgcctgtctcctacttcattcggaacatggaggagtcctacgtgaacctcaaccaccacggcctgggccccaggggtaccaaggctattgctatagccctggtgtccaacatggctgttaccaaactggagctggaagacaattgcatcatggaggagggcgtcttgagcctggtggagatgctacaagagaactactacctccaggagatggaaatgacttcaaggaagactccgcagcactgctctgccaagccctgtcgaccaattaccaaattaaaaagctggatctcagtcacaaccaattctctgatgtaggaggggagcacctgggccagatgctggccatcaacgtggggctcacgtcactggatctgagctggaataacttccacacaaggggagctgtggccttgtgcaatggtctccggggtaatgtgaccctgacaaagctggatctctccatgaatggctttgggaatgaggtggctctggccctaggggaagtcctccgactcaaccgctgcctggtctacctggatatcggtggcaatgacatcggcaatgaaggggcctccaaaatcagcaaaggactggaatccaatgaaagcctcagagttctgaagcttttcctgaatcccataaatatggatggggctattttacttatcctggctatcaagaggaaccccaaatccaggatggaagagcttgatatttccaacgtgctggtgtccgagcagttcatgaaaacgttggacggagtgtatgccgttcacccgcagctggacgtggtattcaaggcagtacaaggcctctctcccaagaaaaccatcttcttgttgacaaaccccatgaaactgatccagagctatgcagaccaacacaaaatcacgatcgtggacttcttcaagagcttgaaccccactgggacaatgaagatgtctgtggatgagttccagaaagtgatgatagagcaaaacaaggtccccctgaaccagtaccaggtcagggaggtgataaagaagctcgatgagaagacaggcatggtgaacttcagtttcttgaacacgatgaagccatagcaacaagtctggtctagaaagaagtctcggcgagaggagtcctcgcaagtcggatggtggcagggaggagagcaagaggtggctgaaatctcgatggacagatgctgtggcaggggctgggcacaagcaaataaagtctggcttggttctggg

SEQ ID NO: 148190 - DNA, 1648 bp, Homo sapiens
  Payload ID: 9335
  Gene Symbol: LRRC74A
  Gene Name: leucine rich repeat containing 74A
  Uniprot ID: Q0VAA2
  ENST ID: ENST00000393774
  CDS Start-End: 125-1591
gagtcacaaagtcacaggcgggtggggatcctttcaacagggctcccagcaatagagcagtcccactctcccagatgagctggagaagtagctacctctcccagacagagttggggtcaaattcatgcacatccaattcccatcaaagcctactcttcccagggcttgctgggagggaaggataactgcaggctcccctgggatgcccccagatgagattgaaattgagccagtacgacagagcagcgataaaatgctctactgtgaggccgaatccccgccgactgttgaaaaagtgaaaccagcccgggagaattcggaaacagacctggagattgaagatgatgagaaatttttcaccactggacaaaaggagctgtacctggaggcctgcaagctgatgggtgtagtgcctgtctcctacttcattcggaacatggaggagtcctacgtgaacctcaaccaccacggcctgggccccaggggtaccaaggctattgctatagccctggtgtccaacatggctgttaccaaactggagctggaagacaattgcatcatggaggagggcgtcttgagcctggtggagatgctacaagagaactactacctccaggagatgaatatttccaacaatcaccttggtttggagggggccagaatcatctcagatttctttgagagaaacagttcttctatctggagccttgagctttcaggaaatgacttcaaggaagactccgcagcactgctctgccaagccctgtcgaccaattaccaaattaaaaagctggatctcagtcacaaccaattctctgatgtaggaggggagcacctgggccagatgctggccatcaacgtggggctcacgtcactggatctgagctggaataacttccacacaaggggagctgtggccttgtgcaatggtctccggggtaatgtgaccctgacaaagctggatctctccatgaatggctttgggaatgaggtggctctggccctaggggaagtcctccgactcaaccgctgcctggtctacctggatatcggtggcaatgacatcggcaatgaaggggcctccaaaatcagcaaaggactggaatccaatgaaagcctcagagttctgaagcttttcctgaatcccataaatatggatggggctattttacttatcctggctatcaagaggaaccccaaatccaggatggaagagcttgatatttccaacgtgctggtgtccgagcagttcatgaaaacgttggacggagtgtatgccgttcacccgcagctggacgtggtattcaaggcagtacaaggcctctctcccaagaaaaccatcttcttgttgacaaaccccatgaaactgatccagagctatgcagaccaacacaaaatcacgatcgtggacttcttcaagagcttgaaccccactgggacaatgaagatgtctgtggatgagttccagaaagtgatgatagagcaaaacaaggtccccctgaaccagtaccaggtcagggaggtgataaagaagctcgatgagaagacaggcatggtgaacttcagtttcttgaacacgatgaagccatagcaacaagtctggtctagaaagaagtctcggcgagaggagtcctcgcaagtcggatgg

SEQ ID NO: 148191 - DNA, 576 bp, Homo sapiens
  Payload ID: 9335
  Gene Symbol: LRRC74A
  Gene Name: leucine rich repeat containing 74A
  ENST ID: ENST00000555189
  CDS Start-End: 110-576
aggcgggtggggatcctttcaacagggctcccagcaatagagcagtcccactctcccagatgagctggagaagtagctacctctcccagacagagttggggtcaaattcatgcacatccaattcccatcaaagcctactcttcccagggcttgctgggagggaaggataactgcaggctcccctgggatgcccccagatgagattgaaattgagccagtacgacagagcagcgataaaatgctctactgtgaggccgaatccccgccgactgttgaaaaagtgaaaccagcccgggagaattcggaaacagacctggagattgaaggcgagcatgggcatttgggggcagtcagggcagcttctcctcagaaactggagaaatctggtttccaggagctgtcatctcactcctttccagagtctgccctgcggatggcctgtggaggaaatgtggcagaaaggcctgctcgattttgcctggagtcctcctccgggctggcaggggagagcagctgcagcttcccacgcttgtcacctgcctcaggagcagtgccctcacgtcgtcttgttaaaag

SEQ ID NO: 148192 - DNA, 1886 bp, Homo sapiens
  Payload ID: 9335
  Gene Symbol: LRRC74A
  Gene Name: leucine rich repeat containing 74A
  ENST ID: ENST00000484640
  CDS Start-End: 113-235
cacaggcgggtggggatcctttcaacagggctcccagcaatagagcagtcccactctcccagatgagctggagaagtagctacctctcccagacagagttggggtcaaattcatgcacatccaattcccatcaaagcctactcttcccagggcttgctgggagggaaggataactgcaggctcccctgggatgcccccaggtgagggaagttcacagagtttgagacagaggtgaatggacaggtgtgcttcttagggaagcagtcgagaggtggcaagaagttggcagctgccctcaagagggtcctggcaccatggacaatgacaagcctcttcagcctgagacagaagatgagattgaaattgagccagtacgacagagcagcgataaaatgctctactgtgaggccgaatccccgccgactgttgaaaaagtgaaaccagcccgggagaattcggaaacagacctggagattgaagtttccccaagaagggaagcaccgaaagagaacacttgtgaagcaagagaatgacgctggttccatctgacaggatgatgagaaatttttcaccactggacaaaaggagctgtacctggaggcctgcaagctgatgggtgtagtgcctgtctcctacttcattcggaacatggaggagtcctacgtgaacctcaaccaccacggcctgggccccaggggtaccaaggctattgctatagccctggtgtccaacatggctgttaccaaactggagctggaagacaattgcatcatggaggagggcgtcttgagcctggtggagatgctacaagagaactactacctccaggagatgaatatttccaacaatcaccttggtttggagggggccagaatcatctcagatttctttgagagaaacagttcttctatctggagccttgagctttcaggaaatgacttcaaggaagactccgcagcactgctctgccaagccctgtcgaccaattaccaaattaaaaagctggatctcagtcacaaccaattctctgatgtaggaggggagcacctgggccagatgctggccatcaacgtggggctcacgtcactggatctgagctggaataacttccacacaaggggagctgtggccttgtgcaatggtctccgggggaagtcctccgactcaaccgctgcctggtctacctggatatcggtggcaatgacatcggcaatgaaggggcctccaaaatcagcaaaggactggaatccaatgaaagcctcagagttctgaagcttttcctgaatcccataaatatggatggggctattttacttatcctggctatcaagaggaaccccaaatccaggatggaagagcttgatatttccaacgtgctggtgtccgagcagttcatgaaaacgttggacggagtgtatgccgttcacccgcagctggacgtggtattcaaggcagtacaaggcctctctcccaagaaaaccatcttcttgttgacaaaccccatgaaactgatccagagctatgcagaccaacacaaaatcacgatcgtggacttcttcaagagcttgaaccccactgggacaatgaagatgtctgtggatgagttccagaaagtgatgatagagcaaaacaaggtccccctgaaccagtaccaggtcagggaggtgataaagaagctcgatgagaagacaggcatggtgaacttcagtttcttgaacacgatgaagccatagcaacaagtctggtctagaaagaagtctcggcgagaggagtcctcgcaagtcggatggtggcagggaggagagcaagaggtggctgaaatctcgatggacagatgctgtggcaggggctgggcacaagcaaataaagtctggcttggttctggg

SEQ ID NO: 148193 - DNA, 573 bp, Homo sapiens
  Payload ID: 9335
  Gene Symbol: LRRC74A
  Gene Name: leucine rich repeat containing 74A
  ENST ID: ENST00000557453
  CDS Start-End: 115-237
gtcacaggcgggtggggatcctttcaacagggctcccagcaatagagcagtcccactctcccagatgagctggagaagtagctacctctcccagacagagttggggtcaaattcatgcacatccaattcccatcaaagcctactcttcccagggcttgctgggagggaaggataactgcaggctcccctgggatgcccccaggtgagggaagttcacagagtttgagacagaggtgaatggacaggtgtgcttcttagggaagcagtcgagaggtggcaagaagttggcagctgccctcaagagggtcctggcaccatggacaatgacaagcctcttcagcctgagacagaagatgagattgaaattgagccagtacgacagagcagcgataaaatgctctactgtgaggccgaatccccgccgactgttgaaaaagtgaaaccagcccgggagaattcggaaacagacctggagattgaagatgatgagaaatttttcaccactggacaaaaggagctgtacctggaggcctgcaagctgatgggtgtagtgcctgtctcctacttcattcg

SEQ ID NO: 148194 - DNA, 1179 bp, Homo sapiens
  Payload ID: 9336
  Gene Symbol: LRRC74B
  Gene Name: leucine rich repeat containing 74B
  Uniprot ID: Q6ZQY2
  ENST ID: ENST00000442047
  CDS Start-End: 1-1179
atgaggggttcctgtgagaggtctggggaggatgaagagcagaaagaagaggctatggtggcctgtgggcgtctttcaggggtccccgaggccgagcagggtcccgaggccaattgggactccgacctggagacggaaggcaccgatgggcttggagaactggtcagggacacactgtacctgaggtcttgccgggcccatagtgttgtgcccatctcctgctttctgcgccaagggagcgcccaagagctgaacctccggcaccgtggcctggggccccagggcgcccgggctctggcttcctcattgagctccaatccatatgtcaagcggctggaccttcgagacaatgggctctgtggggcaggtgcagaggccctggcaggtgccctgagcaaaagcagcagcatccatgatgtggacctgtcggagaaccagctgggagtggcaggagcccaggccctctgtgccgccctcacagtgaaccaggccatgcggaagatgcagctgtcagggaatggcctggaggagcaggcggcccagcaccttgccgaactcctgctggcccacacagacctgaagtccctggacctgagctacaaccagctgaatgaccaagcaggggagacacttggaccagccctggcagaaaacacaggactcaccgagcttaacgtgagctggaatcacctccggggcccaggagctgtggcatttgccaggggactggaggcaaacatcttccttaaagttctagacatctcatacaatggctttggggatcctggagcctctgcggtgggtgaggctctgaaggccaacaacgtgttggaggaactcaacatgagtaacaaccgcatctctgcgatgggagccctgagcctgggcctgggcctccgggtcaaccagacgctgaggattcttgtagtgtccaggaatcccatgcgaagtgaaggctgctttggtctcctcaagtctgtccaggacaatccagcctctgccctggaactgctggatttctcagatatccaggtgaacgcagagtttgatggccttgctagctcagtgaggggaattcttccagaactctgcataaagactggcgcttgcagagtggagtataaaaaggagttgctgccagtcttcagatcagccctgccagcgtctgtccctaagtga

SEQ ID NO: 148195 - DNA, 2656 bp, Homo sapiens
  Payload ID: 9337
  Gene Symbol: LRRC75A
  Gene Name: leucine rich repeat containing 75A
  Uniprot ID: Q8NAA5
  ENST ID: ENST00000409083
  CDS Start-End: 164-802
gccgacagccgcccgcccgcccgcccccgcgacgcccgcgcgcaacagttcccccaaagttgcagcccgggaggcgagcgcgcacgggcggccgaggggcgggcggttggcggggacgcggcctcgcggcccagagcggagagtcccggcgggcggcggcggcatgggcacccggcagaccaagggcagcctggcggagagagccagccccggcgccgcgccgggcccccgacgcgaacggccggacttctgggcgtcgctgctgctgcgcgccggggacaaggcggggcgcgcgggcgcggggatgcccccctaccaccggcgagtcggcatggtccaggagctgctgcggatggtgcgccagggccggcgggaggaggcggggacgctgctgcagcacctgcgccaggacctgggcatggagtcgacctcgctagacgacgttctgtatcgctacgccagcttccggaacctggtggaccccatcacacacgacctcatcatcagcctggcacgctacatccactgtcccaagccgcctcaaggctgtcctggccggaagccccccagacaacacagtggacctgtcgggaatcccactgacctcccgagacctggagcgggtgaccagctacctacagcgctgtggggagcaggtagacagcgtggagctgggcttcacaggcctcacggacgacatggtcctgcagctgctgccagcactcagcaccctgccccgcctcaccacactggcactcaatggcaaccggttgacccgggccgtgctgcgcgacctcactgacatccttaaggatcccagcaagttccccaatgtcacgtggattgacctgggcaacaacgtggacatcttctccttgccccagcccttcctgctcagcctgcgcaagcgctccccaaagcagggccacctacccaccatcctggagctgggtgagggcccaggcagtggggaggaggtccgggaagggacagtaggccaggaggaccctggagggggccctgtggcacctgccgaagaccaccatgagggcaaggagactgtagctgcagctcagacgtgacatggaagtgaagggcctcaccagggagtccttgttgggtagaatgggcaaggcaggcaggggagggcgcttctcctatcaggtgggttaaggatattgccaaaaattggcctgggccacccacctacagaaaggcaaaccatatcatctggggaaggggatttgtgttaaaacttcccgttggtcctctgcatctgccccctatcccattatctgccatttggttcttaagtcatcccaggccccagagaaccctctcagctcagctcatggccttccccaaagacttgtggaaatgggcacatggctggaggtactgtaagcctgagccattgtgaacaccaagagctttcccccagaaaaagaatacagtagggcccctacatgtactgcattacatttttcatttaggggaacaagctccaaccagaggaatgtgtccccactcaaggaaggtgggaatctttagcaaaattcctgtaactcctggttgcccgagaccccagttccatctatgctaggggtggactgaacgtggcctacctccttatggagacccagccctatttctgaggcccaccttgattctaggcatctgcccataggaccagctatcgctatatcctttgacagagcagcctacgatgccatgtggtagtgctcaggacagacatggtgcccatgcatacaggcataaagtcctgttcagaaatcccctatccaccttccctacccactgctggctgaaaaactaccagacttctatgtgggctctgatgtccttagcatgcagggtaagtgacaaacctggcttccttcttgtcacttgccagtatgacttcactgacctagacaggccgtaagaactctttccccataactcttaagtaatccaccaacacattccagaaaaccgactgcagaaggtgggctttaaaaccttaaaaacctaggacaatgaaggagtccaatcccttggcagatccaacaagatggctggggagagggagaaacaaactggaggctcccaaaggaacctaacttagcaaaggttctcatcttataccctccccttacccaaatactgtcctactgaaagggccctaccagttaagggatctcttctaaataacaggcaacccctagatccaagtagttcagtccaggaagactgggagccaatcactcttgaaccttgtgggcaaacagtatgggggaggaccctcttgacaggccttggtaggcaagattccaacacaggaagacagcaagatggggcctagagtatggggccctacatgctgttaaggttgtggttaggaatggtgcaatgctgcaggagctggaacaaagctacaccaaggaacagagcacagagcagcaggggccgaaattgaggaggccttaaatgctttgagcttttgccttcagtctaaagctgtagaatagggggttaagagcttaggctgaccacagggaagtttacaagctagagcgaatatctggactgctaatatctgacaacagtaggcgaaatttactttttcttcaaatacacattttcaagaattgac

SEQ ID NO: 148196 - DNA, 1390 bp, Homo sapiens
  Payload ID: 9337
  Gene Symbol: LRRC75A
  Gene Name: leucine rich repeat containing 75A
  Uniprot ID: Q8NAA5
  ENST ID: ENST00000470794
  CDS Start-End: 29-1063
gcggagagtcccggcgggcggcggcggcatgggcacccggcagaccaagggcagcctggcggagagagccagccccggcgccgcgccgggcccccgacgcgaacggccggacttctgggcgtcgctgctgctgcgcgccggggacaaggcggggcgcgcgggcgcggggatgcccccctaccaccggcgagtcggcatggtccaggagctgctgcggatggtgcgccagggccggcgggaggaggcggggacgctgctgcagcacctgcgccaggacctgggcatggagtcgacctcgctagacgacgttctgtatcgctacgccagcttccggaacctggtggaccccatcacacacgacctcatcatcagcctggcacgctacatccactgtcccaagccggaaggcgatgcactgggcgccatggagaagctgtgccggcagctgacataccacctcagcccccactcccagtggaggcggcaccgggggctggtgaaaaggaagccacaggcctgcctcaaggctgtcctggccggaagccccccagacaacacagtggacctgtcgggaatcccactgacctcccgagacctggagcgggtgaccagctacctacagcgctgtggggagcaggtagacagcgtggagctgggcttcacaggcctcacggacgacatggtcctgcagctgctgccagcactcagcaccctgccccgcctcaccacactggcactcaatggcaaccggttgacccgggccgtgctgcgcgacctcactgacatccttaaggatcccagcaagttccccaatgtcacgtggattgacctgggcaacaacgtggacatcttctccttgccccagcccttcctgctcagcctgcgcaagcgctccccaaagcagggccacctacccaccatcctggagctgggtgagggcccaggcagtggggaggaggtccgggaagggacagtaggccaggaggaccctggagggggccctgtggcacctgccgaagaccaccatgagggcaaggagactgtagctgcagctcagacgtgacatggaagtgaagggcctcaccagggagtccttgttgggtagaatgggcaaggcaggcaggggagggcgcttctcctatcaggtgggttaaggatattgccaaaaattggcctgggccacccacctacagaaaggcaaaccatatcatctggggaaggggatttgtgttaaaacttcccgttggtcctctgcatctgccccctatcccattatctgccatttggttcttaagtcatcccaggccccagagaaccctctcagctcagctcatggccttccccaaagacttgtggaaatgggcacatggctggaggtactgtaagcctg

SEQ ID NO: 148197 - DNA, 1238 bp, Homo sapiens
  Payload ID: 9338
  Gene Symbol: LRRC75B
  Gene Name: leucine rich repeat containing 75B
  Uniprot ID: Q2VPJ9
  ENST ID: ENST00000318753
  CDS Start-End: 25-972
ttcggcgaccatcgcgcggcggccatgggggcgcggctgggccggcgggccgggcccgaggctggctctgaggccggggcggcggccggctgcgggcccgcgccctacgagcgccgggtgcggtggctccgcgagatccagtccacgctccgcgagcggcggccggagcgcgcccggcagctgctgcgcctcctgcgccaggacctgggccttgagaggaccctccttcctgatatcctctacagagatgtggccttcctcaacccggtcgaccccatctcccatgacctgcttgtgaacctggcccgggacctgcagtgccccaagaaggactatgagctctggaagtcctcggacaagatctgccgacagctcatctaccacctcacccctcactcgaagcagcagcaagggtccagcctgcgccagaggaagacccagagctgcctcaagagcagcctccagaagactctgctggcaggggagactgtggacctctcaggcatcccgctgtcgacacaggacgtgcaacacatcacacgctacctgagcagccatggtgctgtgctggcggtgctggacctgagcttcacggggctgagtgatgagctgctgcacctcctgctgcccagcctgtgggcgctgccccgcctcacccagctcctgctcaacggcaaccgactgacgcgggccactgcccgcaagctcactgatgccatcaaggacaccaccaagttccctgctttggcttgggtggacctgggcaacaacgtggatgtggcttccctgccccagcccctgctggtcggcctgcgccggcggctgagccagcgcacctcactccccaccatctacgagggcctggaccttgagcctgagggcagtgcggccggggccaccacccctgcctccacctgggactccacagctgctgggctgggacccgagccccaggcctgctgtgccaggtgacccaccacccacctggctcattgctactgacttgtgatgctctcaagcacatgatagtgggcgatgaaggtcaaggaggactcacaggcccccagaaatccagtgtaaatgctcagcctgagattaaggggacagaagaatggactcataggtggccaggtggccagccctggctagaggctcagccttccctcagtgggaggggccccagcacccacagtgtggaccccgcaataaagagtgacacccgcctctgcttttctgca

SEQ ID NO: 148198 - DNA, 1417 bp, Homo sapiens
  Payload ID: 9338
  Gene Symbol: LRRC75B
  Gene Name: leucine rich repeat containing 75B
  ENST ID: ENST00000404045
  CDS Start-End: 26-250
gttcggcgaccatcgcgcggcggccatgggggcgcggctgggccggcgggccgggcccgaggctggctctgaggccggggcggcggccggctgcgggcccgcgccctacgagcgccgggtgcggtggctccgcgagatccagtccacgctccgcgagcggcggccggagcgcgcccggcagctgctgcgcctcctgcgccaggatccgggagacagtggaccctggagagaggacccagggctggtctagggatgcagcctcaccccaagacaccatggcagcccacagagagccatccatgcatcaccagttctccaacaggcggctcatgcccttagagtacacatccccagcatctgtgcatcacaacactcggtccggtggtggctctgctcctacacacaccaggacctgggccttgagaggaccctccttcctgatatcctctacagagatgtggccttcctcaacccggtcgaccccatctcccatgacctgcttgtgaacctggcccgggacctgcagtgccccaagaaggactatgagctctggaagtcctcggacaagatctgccgacagctcatctaccacctcacccctcactcgaagcagcagcaagggtccagcctgcgccagaggaagacccagagctgcctcaagagcagcctccagaagactctgctggcaggggagactgtggacctctcaggcatcccgctgtcgacacaggacgtgcaacacatcacacgctacctgagcagccatggtgctgtgctggcggtgctggacctgagcttcacggggctgagtgatgagctgctgcacctcctgctgcccagcctgtgggcgctgccccgcctcacccagctcctgctcaacggcaaccgactgacgcgggccactgcccgcaagctcactgatgccatcaaggacaccaccaagttccctgctttggcttgggtggacctgggcaacaacgtggatgtggcttccctgccccagcccctgctggtcggcctgcgccggcggctgagccagcgcacctcactccccaccatctacgagggcctggaccttgagcctgagggcagtgcggccggggccaccacccctgcctccacctgggactccacagctgctgggctgggacccgagccccaggcctgctgtgccaggtgacccaccacccacctggctcattgctactgacttgtgatgctctcaagcacatgatagtgggcgatgaaggtcaaggaggactcacaggcccccagaaatccagtgtaaatgctcagcctgagattaaggggacagaagaatggactcataggtggccaggtggccagccctggctagaggctcagccttccctcagtgggaggggccccagcacccacagtgtggaccccgcaataa

SEQ ID NO: 148199 - DNA, 1828 bp, Homo sapiens
  Payload ID: 9338
  Gene Symbol: LRRC75B
  Gene Name: leucine rich repeat containing 75B
  ENST ID: ENST00000446942
  CDS Start-End: 28-354
gggttcggcgaccatcgcgcggcggccatgggggcgcggctgggccggcgggccgggcccgaggctggctctgaggccggggcggcggccggctgcgggcccgcgccctacgagcgccgggtgcggtggctccgcgagatccagtccacgctccgcgagcggcggccggagcgcgcccggcagctgctgcgcctcctgcgccaggacctgggccttgagaggaccctccttcctgatatcctctacagagatgtggccttcctcaacccggtcgaccccatctcccatgacctgcttgtgaacctggcccgggacctgcagtgccccaagaagctgcccagaaccccatgctgacagcacctgcagatgtcctgccatgagcatcgacacagccccaggatgtgtggctgtgaccagccaccggacccagactcctagtcacagtgagtccccaaccaaaaccagggtatccgctctgggccctgccagctctgaatgcccaggtctctgcacagtcggcccctaggactctgcgcctagcccacggccatcacaggaacagccagggcttgcagctgctgtgtgtgctgcctgctcctggggctgctcacagagggactggataaaggatgcagtggagcatgctcagtgccagctttgtgggccgcgcacctcggattccaccctgagctgggcctctgccggagcccagttaggactgagagagagccaggtggtggtgctgtaaaacattacatcccccagccctgtcagcccagacccagaccccgcaggcgcagtctcgcttggagagtgagaggaagaagaacacgctgacctggcttgttcctactccctgggattggcgtcagtggagcacggctccctcgaggggcctggtctggcctcctccccctgtggactatgagctctggaagtcctcggacaagatctgccgacagctcatctaccacctcacccctcactcgaagcagcagcaagggtccagcctgcgccagaggaagacccagagctgcctcaagagcagcctccagaagactctgctggcaggggagactgtggacctctcaggcatcccgctgtcgacacaggacgtgcaacacatcacacgctacctgagcagccatggtgctgtgctggcggtgctggacctgagcttcacggggctgagtgatgagctgctgcacctcctgctgcccagcctgtgggcgctgccccgcctcacccagctcctgctcaacggcaaccgactgacgcgggccactgcccgcaagctcactgatgccatcaaggacaccaccaagttccctgctttggcttgggtggacctgggcaacaacgtggatgtggcttccctgccccagcccctgctggtcggcctgcgccggcggctgagccagcgcacctcactccccaccatctacgagggcctggaccttgagcctgagggcagtgcggccggggccaccacccctgcctccacctgggactccacagctgctgggctgggacccgagccccaggcctgctgtgccaggtgacccaccacccacctggctcattgctactgacttgtgatgctctcaagcacatgatagtgggcgatgaaggtcaaggaggactcacaggcccccagaaatccagtgtaaatgctcagcctgagattaaggggacagaagaatggactcataggtggccaggtggccagccctggctagaggctcagccttccctcagtgggaggggccccagcacccacagtgtggaccccgcaataaagagtgacacccgcctctgcttttctgca

SEQ ID NO: 148200 - DNA, 4619 bp, Homo sapiens
  Payload ID: 9339
  Gene Symbol: LRRC8A
  Gene Name: leucine rich repeat containing 8 family, member A
  Uniprot ID: Q8IWT6
  ENST ID: ENST00000259324
  CDS Start-End: 524-2956
gtgcttcagaaaccaggagtttccgcctcggctcccccatgtccccttgtcatcccctgggtccccccagatcctcacccctccacacacactctcccgttcctagaggttccacctctgggctctctccttgccatttctttttcaaagatttccttagctgtcttctcctgagttcctggtccccttctcttcccttgcacccctccttcctatcgttccgatgggggcagtgccctgacttgggggcaggatccccggctaggctcttggggcctttctgggatgggatatttgggaagaccggtccggaatctaagaacccagaccctgtcccagtcctgtgcattcaggtgggcccgagggcgaggcgagatccagtgaggtccaggcctggtgcagccctagggaggcagcgtccatggagcaaaaggaatgccaggatcctgcacaggcagacgcgggccagcctcagcaccgacagccgacgcgcagatagcagagccatccttggggttgaaccatgattccggtgacagagctccgctactttgcggacacgcagccagcataccggatcctgaagccgtggtgggatgtgttcacagactacatctctatcgtcatgctgatgattgccgtcttcggggggacgctgcaggtcacccaagacaagatgatctgcctgccttgtaagtgggtcaccaaggactcctgcaatgattcgttccggggctgggcagcccctggcccggagcccacctaccccaactccaccattctgccgacccctgacacgggccccacaggcatcaagtatgacctggaccggcaccagtacaactacgtggacgctgtgtgctatgagaaccgactgcactggtttgccaagtacttcccctacctggtgcttctgcacacgctcatcttcctggcctgcagcaacttctggttcaaattcccgcgcaccagctcgaagctggagcactttgtgtctatcctgctgaagtgcttcgactcgccctggaccacgagggccctgtcggagacagtggtggaggagagcgaccccaagccggccttcagcaagatgaatgggtccatggacaaaaagtcatcgaccgtcagtgaggacgtggaggccaccgtgcccatgctgcagcggaccaagtcacggatcgagcagggtatcgtggaccgctcagagacgggcgtgctggacaagaaggagggggagcaagccaaggcgctgtttgagaaggtgaagaagttccggacccatgtggaggagggggacattgtgtaccgcctctacatgcggcagaccatcatcaaggtgatcaagttcatcctcatcatctgctacaccgtctactacgtgcacaacatcaagttcgacgtggactgcaccgtggacattgagagcctgacgggctaccgcacctaccgctgtgcccaccccctggccacactcttcaagatcctggcgtccttctacatcagcctagtcatcttctacggcctcatctgcatgtatacactgtggtggatgctacggcgctccctcaagaagtactcgtttgagtcgatccgtgaggagagcagctacagcgacatccccgacgtcaagaacgacttcgccttcatgctgcacctcattgaccaatacgacccgctctactccaagcgcttcgccgtcttcctgtcggaggtgagtgagaacaagctgcggcagctgaacctcaacaacgagtggacgctggacaagctccggcagcggctcaccaagaacgcgcaggacaagctggagctgcacctgttcatgctcagtggcatccctgacactgtgtttgacctggtggagctggaggtcctcaagctggagctgatccccgacgtgaccatcccgcccagcattgcccagctcacgggcctcaaggagctgtggctctaccacacagcggccaagattgaagcgcccgcgctggccttcctgcgtgagaacctgcgggcgctgcacatcaagttcaccgacatcaaggagatcccgctgtggatctatagcctgaagacactggaggagctgcacctgacgggcaacctgagcgcggagaacaaccgctacatcgtcatcgacgggctgcgggagctcaaacgcctcaaggtgctgcggctcaagagcaacctaagcaagctgccacaggtggtcacagatgtgggcgtgcacctgcagaagctgtccatcaacaatgagggcaccaagctcatcgtcctcaacagcctcaagaagatggcgaacctgactgagctggagctgatccgctgtgacctggagcgcatcccccactccatcttcagcctccacaacctgcaggagattgacctcaaggacaacaacctcaagaccatcgaggagatcatcagcttccagcacctgcaccgcctcacctgccttaagctgtggtacaaccacatcgcctacatccccatccagatcggcaacctcaccaacctggagcgcctctacctgaaccgcaacaagatcgagaagatccccacccagctcttctactgccgcaagctgcgctacctggacctcagccacaacaacctgaccttcctccctgccgacatcggcctcctgcagaacctccagaacctagccatcacggccaaccggatcgagacgctccctccggagctcttccagtgccggaagctgcgggccctgcacctgggcaacaacgtgctgcagtcactgccctccagggtgggcgagctgaccaacctgacgcagatcgagctgcggggcaaccggctggagtgcctgcctgtggagctgggcgagtgcccactgctcaagcgcagcggcttggtggtggaggaggacctgttcaacacactgccacccgaggtgaaggagcggctgtggagggctgacaaggagcaggcctgagcgaggccggcccagcacagcaagcagcaggaccgctgcccagtcctcaggcccggaggggcaggcctagcttctcccagaactcccggacagccaggacagcctcgtggctgggcaggagcctggggccgcttgtgagtcaggccagagcgagaggacagtatctgtggggctggccccttttctccctctgagactcacgtcccccagggcaagtgcttgtggaggagagcaagtctcaagagcgcagtatttggataatcagggtctcctccctggaggccagctctgccccaggggctgagctgccaccagaggtcctgggaccctcactttagttcttggtatttatttttctccatctcccacctccttcatccagataacttatacattcccaagaaagttcagcccagatggaaggtgttcagggaaaggtgggctgccttttccccttgtccttatttagcgatgccgccgggcatttaacacccacctggacttcagcagagtggtccggggcgaaccagccatgggacggtcacccagcagtgccgggctgggctctgcggtgcggtccacgggagagcaggcctccagctggaaaggccaggcctggagcttgcctcttcagtatttgtggcagttttagttttttgtttttttttttttaatcaaaaaacaatttttttaaaaaaaaagctttgaaaatggatggtttgggtattaaaaagaaaaaaaaaacttaaaaaaaaaaagacactaacggccagtgagttggagtctcagggcagggtggcagtttcccttgagcaaagcagccagacgttgaactgtgtttcctttccctgggcgcagggtgcagggtgtcttccggatctggtgtgaccttggtccaggagttctatttgttcctggggagggaggtttttttgtttgttttttgggtttttttggtgtcttgttttctttctcctccatgtgtcttggcaggcactcatttctgtggctgtcggccagagggaatgttctggagctgccaaggagggaggagactcgggttggctaatccccggatgaacggtgctccattcgcacctcccctcctcgtgcctgccctgcctctccacgcacagtgttaaggagccaagaggagccacttcgcccagactttgtttccccaccgcctgcggcatgggtgtgtccagtgccaccgctggcctccgctgcttccatcagccctgtcaccacctggtccttcatgaagagcagacacttagaggctggtcgggaatggggaggtcgcccctgggagggcaggcgttggttccaagccggttcccgtccctggcgcctggagtgcacacagcccagtcggcacctggtggctggaagccaccctgctttagatcactcgggtccccaccttagaagggtccccgccttagatcaatcacgtggacactaaggcacgttttagagtctcttgtcttaatgattatgtccatccgtctgtccgtccatttgtgttttctgcgtcgtgtcattggatataatcctcagaaataatgcacactagcctctgacaaccatgaagcaaaaatccgttacatgtgggtctgaacttgtagactcggtcacagtatcaaataaaatctataac

SEQ ID NO: 148201 - DNA, 4161 bp, Homo sapiens
  Payload ID: 9339
  Gene Symbol: LRRC8A
  Gene Name: leucine rich repeat containing 8 family, member A
  Uniprot ID: Q8IWT6
  ENST ID: ENST00000372599
  CDS Start-End: 64-2496
cggagcggccggggcctggggctgcctgccgggcggccgggcgcggcgagcccaggttgaaccatgattccggtgacagagctccgctactttgcggacacgcagccagcataccggatcctgaagccgtggtgggatgtgttcacagactacatctctatcgtcatgctgatgattgccgtcttcggggggacgctgcaggtcacccaagacaagatgatctgcctgccttgtaagtgggtcaccaaggactcctgcaatgattcgttccggggctgggcagcccctggcccggagcccacctaccccaactccaccattctgccgacccctgacacgggccccacaggcatcaagtatgacctggaccggcaccagtacaactacgtggacgctgtgtgctatgagaaccgactgcactggtttgccaagtacttcccctacctggtgcttctgcacacgctcatcttcctggcctgcagcaacttctggttcaaattcccgcgcaccagctcgaagctggagcactttgtgtctatcctgctgaagtgcttcgactcgccctggaccacgagggccctgtcggagacagtggtggaggagagcgaccccaagccggccttcagcaagatgaatgggtccatggacaaaaagtcatcgaccgtcagtgaggacgtggaggccaccgtgcccatgctgcagcggaccaagtcacggatcgagcagggtatcgtggaccgctcagagacgggcgtgctggacaagaaggagggggagcaagccaaggcgctgtttgagaaggtgaagaagttccggacccatgtggaggagggggacattgtgtaccgcctctacatgcggcagaccatcatcaaggtgatcaagttcatcctcatcatctgctacaccgtctactacgtgcacaacatcaagttcgacgtggactgcaccgtggacattgagagcctgacgggctaccgcacctaccgctgtgcccaccccctggccacactcttcaagatcctggcgtccttctacatcagcctagtcatcttctacggcctcatctgcatgtatacactgtggtggatgctacggcgctccctcaagaagtactcgtttgagtcgatccgtgaggagagcagctacagcgacatccccgacgtcaagaacgacttcgccttcatgctgcacctcattgaccaatacgacccgctctactccaagcgcttcgccgtcttcctgtcggaggtgagtgagaacaagctgcggcagctgaacctcaacaacgagtggacgctggacaagctccggcagcggctcaccaagaacgcgcaggacaagctggagctgcacctgttcatgctcagtggcatccctgacactgtgtttgacctggtggagctggaggtcctcaagctggagctgatccccgacgtgaccatcccgcccagcattgcccagctcacgggcctcaaggagctgtggctctaccacacagcggccaagattgaagcgcccgcgctggccttcctgcgtgagaacctgcgggcgctgcacatcaagttcaccgacatcaaggagatcccgctgtggatctatagcctgaagacactggaggagctgcacctgacgggcaacctgagcgcggagaacaaccgctacatcgtcatcgacgggctgcgggagctcaaacgcctcaaggtgctgcggctcaagagcaacctaagcaagctgccacaggtggtcacagatgtgggcgtgcacctgcagaagctgtccatcaacaatgagggcaccaagctcatcgtcctcaacagcctcaagaagatggcgaacctgactgagctggagctgatccgctgtgacctggagcgcatcccccactccatcttcagcctccacaacctgcaggagattgacctcaaggacaacaacctcaagaccatcgaggagatcatcagcttccagcacctgcaccgcctcacctgccttaagctgtggtacaaccacatcgcctacatccccatccagatcggcaacctcaccaacctggagcgcctctacctgaaccgcaacaagatcgagaagatccccacccagctcttctactgccgcaagctgcgctacctggacctcagccacaacaacctgaccttcctccctgccgacatcggcctcctgcagaacctccagaacctagccatcacggccaaccggatcgagacgctccctccggagctcttccagtgccggaagctgcgggccctgcacctgggcaacaacgtgctgcagtcactgccctccagggtgggcgagctgaccaacctgacgcagatcgagctgcggggcaaccggctggagtgcctgcctgtggagctgggcgagtgcccactgctcaagcgcagcggcttggtggtggaggaggacctgttcaacacactgccacccgaggtgaaggagcggctgtggagggctgacaaggagcaggcctgagcgaggccggcccagcacagcaagcagcaggaccgctgcccagtcctcaggcccggaggggcaggcctagcttctcccagaactcccggacagccaggacagcctcgtggctgggcaggagcctggggccgcttgtgagtcaggccagagcgagaggacagtatctgtggggctggccccttttctccctctgagactcacgtcccccagggcaagtgcttgtggaggagagcaagtctcaagagcgcagtatttggataatcagggtctcctccctggaggccagctctgccccaggggctgagctgccaccagaggtcctgggaccctcactttagttcttggtatttatttttctccatctcccacctccttcatccagataacttatacattcccaagaaagttcagcccagatggaaggtgttcagggaaaggtgggctgccttttccccttgtccttatttagcgatgccgccgggcatttaacacccacctggacttcagcagagtggtccggggcgaaccagccatgggacggtcacccagcagtgccgggctgggctctgcggtgcggtccacgggagagcaggcctccagctggaaaggccaggcctggagcttgcctcttcagtatttgtggcagttttagttttttgtttttttttttttaatcaaaaaacaatttttttaaaaaaaaagctttgaaaatggatggtttgggtattaaaaagaaaaaaaaaacttaaaaaaaaaaagacactaacggccagtgagttggagtctcagggcagggtggcagtttcccttgagcaaagcagccagacgttgaactgtgtttcctttccctgggcgcagggtgcagggtgtcttccggatctggtgtgaccttggtccaggagttctatttgttcctggggagggaggtttttttgtttgttttttgggtttttttggtgtcttgttttctttctcctccatgtgtcttggcaggcactcatttctgtggctgtcggccagagggaatgttctggagctgccaaggagggaggagactcgggttggctaatccccggatgaacggtgctccattcgcacctcccctcctcgtgcctgccctgcctctccacgcacagtgttaaggagccaagaggagccacttcgcccagactttgtttccccaccgcctgcggcatgggtgtgtccagtgccaccgctggcctccgctgcttccatcagccctgtcaccacctggtccttcatgaagagcagacacttagaggctggtcgggaatggggaggtcgcccctgggagggcaggcgttggttccaagccggttcccgtccctggcgcctggagtgcacacagcccagtcggcacctggtggctggaagccaccctgctttagatcactcgggtccccaccttagaagggtccccgccttagatcaatcacgtggacactaaggcacgttttagagtctcttgtcttaatgattatgtccatccgtctgtccgtccatttgtgttttctgcgtcgtgtcattggatataatcctcagaaataatgcacactagcctctgacaaccatgaagcaaaaatccgttacatgtgggtctgaacttgtagactcggtcacagtatcaaataaaatctataacag

SEQ ID NO: 148202 - DNA, 4355 bp, Homo sapiens
  Payload ID: 9339
  Gene Symbol: LRRC8A
  Gene Name: leucine rich repeat containing 8 family, member A
  Uniprot ID: Q8IWT6
  ENST ID: ENST00000372600
  CDS Start-End: 255-2687
acttccggggcggaggaggctgagtggtgcagtgagggacaaacaaaaggaggcgccggagcagcgctgcggccggcggcgggacggagcggccggggcctggggctgcctgccgggcggccgggcgcggcgagcccagggaggcagcgtccatggagcaaaaggaatgccaggatcctgcacaggcagacgcgggccagcctcagcaccgacagccgacgcgcagatagcagagccatccttggggttgaaccatgattccggtgacagagctccgctactttgcggacacgcagccagcataccggatcctgaagccgtggtgggatgtgttcacagactacatctctatcgtcatgctgatgattgccgtcttcggggggacgctgcaggtcacccaagacaagatgatctgcctgccttgtaagtgggtcaccaaggactcctgcaatgattcgttccggggctgggcagcccctggcccggagcccacctaccccaactccaccattctgccgacccctgacacgggccccacaggcatcaagtatgacctggaccggcaccagtacaactacgtggacgctgtgtgctatgagaaccgactgcactggtttgccaagtacttcccctacctggtgcttctgcacacgctcatcttcctggcctgcagcaacttctggttcaaattcccgcgcaccagctcgaagctggagcactttgtgtctatcctgctgaagtgcttcgactcgccctggaccacgagggccctgtcggagacagtggtggaggagagcgaccccaagccggccttcagcaagatgaatgggtccatggacaaaaagtcatcgaccgtcagtgaggacgtggaggccaccgtgcccatgctgcagcggaccaagtcacggatcgagcagggtatcgtggaccgctcagagacgggcgtgctggacaagaaggagggggagcaagccaaggcgctgtttgagaaggtgaagaagttccggacccatgtggaggagggggacattgtgtaccgcctctacatgcggcagaccatcatcaaggtgatcaagttcatcctcatcatctgctacaccgtctactacgtgcacaacatcaagttcgacgtggactgcaccgtggacattgagagcctgacgggctaccgcacctaccgctgtgcccaccccctggccacactcttcaagatcctggcgtccttctacatcagcctagtcatcttctacggcctcatctgcatgtatacactgtggtggatgctacggcgctccctcaagaagtactcgtttgagtcgatccgtgaggagagcagctacagcgacatccccgacgtcaagaacgacttcgccttcatgctgcacctcattgaccaatacgacccgctctactccaagcgcttcgccgtcttcctgtcggaggtgagtgagaacaagctgcggcagctgaacctcaacaacgagtggacgctggacaagctccggcagcggctcaccaagaacgcgcaggacaagctggagctgcacctgttcatgctcagtggcatccctgacactgtgtttgacctggtggagctggaggtcctcaagctggagctgatccccgacgtgaccatcccgcccagcattgcccagctcacgggcctcaaggagctgtggctctaccacacagcggccaagattgaagcgcccgcgctggccttcctgcgtgagaacctgcgggcgctgcacatcaagttcaccgacatcaaggagatcccgctgtggatctatagcctgaagacactggaggagctgcacctgacgggcaacctgagcgcggagaacaaccgctacatcgtcatcgacgggctgcgggagctcaaacgcctcaaggtgctgcggctcaagagcaacctaagcaagctgccacaggtggtcacagatgtgggcgtgcacctgcagaagctgtccatcaacaatgagggcaccaagctcatcgtcctcaacagcctcaagaagatggcgaacctgactgagctggagctgatccgctgtgacctggagcgcatcccccactccatcttcagcctccacaacctgcaggagattgacctcaaggacaacaacctcaagaccatcgaggagatcatcagcttccagcacctgcaccgcctcacctgccttaagctgtggtacaaccacatcgcctacatccccatccagatcggcaacctcaccaacctggagcgcctctacctgaaccgcaacaagatcgagaagatccccacccagctcttctactgccgcaagctgcgctacctggacctcagccacaacaacctgaccttcctccctgccgacatcggcctcctgcagaacctccagaacctagccatcacggccaaccggatcgagacgctccctccggagctcttccagtgccggaagctgcgggccctgcacctgggcaacaacgtgctgcagtcactgccctccagggtgggcgagctgaccaacctgacgcagatcgagctgcggggcaaccggctggagtgcctgcctgtggagctgggcgagtgcccactgctcaagcgcagcggcttggtggtggaggaggacctgttcaacacactgccacccgaggtgaaggagcggctgtggagggctgacaaggagcaggcctgagcgaggccggcccagcacagcaagcagcaggaccgctgcccagtcctcaggcccggaggggcaggcctagcttctcccagaactcccggacagccaggacagcctcgtggctgggcaggagcctggggccgcttgtgagtcaggccagagcgagaggacagtatctgtggggctggccccttttctccctctgagactcacgtcccccagggcaagtgcttgtggaggagagcaagtctcaagagcgcagtatttggataatcagggtctcctccctggaggccagctctgccccaggggctgagctgccaccagaggtcctgggaccctcactttagttcttggtatttatttttctccatctcccacctccttcatccagataacttatacattcccaagaaagttcagcccagatggaaggtgttcagggaaaggtgggctgccttttccccttgtccttatttagcgatgccgccgggcatttaacacccacctggacttcagcagagtggtccggggcgaaccagccatgggacggtcacccagcagtgccgggctgggctctgcggtgcggtccacgggagagcaggcctccagctggaaaggccaggcctggagcttgcctcttcagtatttgtggcagttttagttttttgtttttttttttttaatcaaaaaacaatttttttaaaaaaaaagctttgaaaatggatggtttgggtattaaaaagaaaaaaaaaacttaaaaaaaaaaagacactaacggccagtgagttggagtctcagggcagggtggcagtttcccttgagcaaagcagccagacgttgaactgtgtttcctttccctgggcgcagggtgcagggtgtcttccggatctggtgtgaccttggtccaggagttctatttgttcctggggagggaggtttttttgtttgttttttgggtttttttggtgtcttgttttctttctcctccatgtgtcttggcaggcactcatttctgtggctgtcggccagagggaatgttctggagctgccaaggagggaggagactcgggttggctaatccccggatgaacggtgctccattcgcacctcccctcctcgtgcctgccctgcctctccacgcacagtgttaaggagccaagaggagccacttcgcccagactttgtttccccaccgcctgcggcatgggtgtgtccagtgccaccgctggcctccgctgcttccatcagccctgtcaccacctggtccttcatgaagagcagacacttagaggctggtcgggaatggggaggtcgcccctgggagggcaggcgttggttccaagccggttcccgtccctggcgcctggagtgcacacagcccagtcggcacctggtggctggaagccaccctgctttagatcactcgggtccccaccttagaagggtccccgccttagatcaatcacgtggacactaaggcacgttttagagtctcttgtcttaatgattatgtccatccgtctgtccgtccatttgtgttttctgcgtcgtgtcattggatataatcctcagaaataatgcacactagcctctgacaaccatgaagcaaaaatccgttacatgtgggtctgaacttgtagactcggtcacagtatcaaataaaatctataacagaaa

SEQ ID NO: 148203 - DNA, 7593 bp, Homo sapiens
  Payload ID: 9340
  Gene Symbol: LRRC8B
  Gene Name: leucine rich repeat containing 8 family, member B
  Uniprot ID: Q6P9F7
  ENST ID: ENST00000330947
  CDS Start-End: 361-2772
gctgagcccgcagcctccggcagccgggaaagtgcgggcgcggggccgcagcctgcccgcccggagcggcccaggagcacgccgcggggagcgcgggcgtccggggctggagtcgcgcaggtaatagttaacctcttctgtgagaagtcagaaggtgatctctttaatgctttctttttaagaatttttcaaattgagactaattgcagaggttccagttgaccagcattcataggaatgaagacaaacacagagatggtgtgtctaagaaacttcaaaaggtgtagacctcctgactgaagcatattggatttatttaatttttttcactgtatttctgtcctcctacaagggaaagtcatgattacactaactgagctaaaatgcttagcagatgcccagtcatcttatcacatcttaaaaccatggtgggacgtcttctggtattacatcacactgatcatgctgctggtggccgtgctggccggagctctccagctgacgcagagcagggttctgtgctgtcttccatgcaaagtggaatttgacaatcactgtgccgtgccttgggacatcctgaaagccagcatgaacacatcctctaatcctgggacaccgcttccgctccccctccgaattcagaatgacctccaccgacagcagtactcctatattgatgccgtctgttacgagaaacagctccattggtttgcaaagtttttcccctatctggtgctcttgcacacgctcatctttgcagcctgcagcaacttttggcttcactaccccagtaccagttccaggctcgagcattttgtggccatccttcacaagtgcttcgattctccatggaccacccgcgccctttcagaaacagtggctgagcagtcagtgaggcctctgaaactctccaagtccaagattttgctttcgtcctcagggtgttcagctgacatagattccggcaaacagtcattgccctacccacagccaggtttggagtcagctggcatagaaagcccaacttccagtgtcctggacaagaaggagggtgaacaggccaaagccatctttgaaaaagtgaaaagattccgcatgcatgtggagcagaaggacatcatttatagagtatatctgaaacagataatagtcaaagtcattttgtttgtgctcatcataacttatgttccatattttttaacccacatcactcttgaaatcgactgttcagttgatgtgcaggcttttacaggatataagcgctaccagtgtgtctattccttggcagaaatctttaaggtcctggcttcattttatgtcattttggttatactttatggtctgacctcttcctacagcctgtggtggatgctgaggagttccctgaagcaatattcctttgaggcgttaagagaaaaaagcaactacagtgacatccctgatgtcaagaatgactttgccttcatccttcatctggctgatcagtatgatcctctttattccaaacgcttctccatattcctatcagaggtcagtgagaacaaactgaaacagatcaacctcaataatgaatggacagttgagaaactgaaaagtaagcttgtgaaaaatgcccaggacaagatagaactgcatctttttatgctcaacggtcttccagacaatgtctttgagttaactgaaatggaagtgctaagcctggagcttatcccagaggtgaagctgccctctgcagtctcacagctggtcaacctcaaggagcttcgtgtgtaccattcatctctggtcgtagaccatcctgcactggcctttctagaggagaatttaaaaatcctccgcctgaaatttactgaaatgggaaaaatcccacgctgggtatttcacctcaagaatctcaaggaactttatctttcgggctgtgttctccctgaacagttgagtactatgcagttggagggctttcaggacttaaaaaatctaaggaccctgtacttgaagagcagcctctcccggatcccacaagttgttacagacctcctgccttcattgcagaaactgtcccttgataatgagggaagcaaactggttgtgttgaacaacttgaaaaagatggtcaatctgaaaagcctagaactgatcagctgtgacctggaacgcatcccacattccattttcagcctgaataatttgcatgagttagacctaagggaaaataaccttaaaactgtggaagagatcattagctttcagcatcttcagaatctttcctgcttaaagttgtggcacaataacattgcttatattcctgcacagattggggcattatctaacctagagcagctctctttggaccataataatattgagaatctgcccttgcagcttttcctatgcactaaactacattatttggatctaagctataaccacttgaccttcattccagaagaaatccagtatctgagtaatttgcagtactttgctgtgaccaacaacaatattgagatgctaccagatgggctgtttcagtgcaaaaagctgcagtgtttacttttggggaaaaatagcttgatgaatttgtcccctcatgtgggtgagctgtcaaaccttactcatctggagctcattggtaattacctggaaacacttcctcctgaactagaaggatgtcagtccctaaaacggaactgtctgattgttgaggagaacttgctcaatactcttcctctccctgtaacagaacgtttacagacgtgcttagacaaatgttgacttaaagaaaagagacccgtgtttcaaaatcatttttaaaagtatgctcggccgggcgtggtggctcatgcctataatcccagcactttgggaggccaagatgggcggattgcttgaggtcaggagttcgagaccagtctggccaacctggtgaaaccccatctctgctaaaactacaaaaaaattagccaggcgtggtggcgtgcgcctgtaatcccagctacttgggaggctgacgcaggggaattgcttgaaccagggaggtggaggttgcagtgagccgagattgtgccactgtacaccagcctgggtgacagagcaagactcttatctcaaaaaaaaaaaaaaaatgctccagggctttaaatgagaagtaaaattttctaagttaataaagatgaagaatgggtgactattatgatgaaccataactaaatgtcttattaaagcaactgagtgtctagccctaaattaaccaggtaaaaactgttaacactaacctgaagttttgtgaataactgttctttaacttattgagatgttgcaagaaatgcacatccagggtggactgggagctatgaaatgactaaattcctccttgcagtgtttaccttcaagattgtataggtattctctcctcttcttcccccagtccccattacttatttgcacacttgttttaactgacttcctgttttgatatttatcaccaagaccataaactcatcaatatgaattttcttgatgtatactcacgactgtctttgatttatgttcctaaatttttttagatagggtatgttgtgcttggcagaattcttttttggcttaatttttacttcctttcccagcttgcttgagtcttccttaacctggttttctcttaacaccaatgatgaaccctgagaaaatgcctgcatttggcctttgcctagaacaggagctgagtatttaagatgtattatcctcggggcatcctgaaaattaatgtattccctaaaatttcttcttgtctatcatcaaggcctttttttatttgttaagaatttttatattaaatgtaaaacatataaatattttctattgtataatcttggattcaacatctgtgaggatcatttttgtaagatacatagaatttgtgcatttctttatgaacttactgttagtgttcttggtttcggctgtttatgactcatgtttatgtacattctgctccaaaatgtttttgtactctgcaactaattacttttggataacaaaagccttgtgtttaatgccctaaagtatttgggggtttccttgtgagagggtggccgaatcatctacctctctcttccatagttgctgtgcaatcgtacgggtaaaattcttaattacttacaaaaactgtgatagaggggagaggtacagatttggtttttaaattgattttaaaatactttatagaaatttagtaagagttaaagcaaaagactttttttccctccatctatgtaatctctagctatgattataatgtaaaacagcctctattcagtgtctaaaatgagttctcaaaacccacaaagaaatagatccatttaactgaaattcatctcatgcctttatctaactcttctggaaaatacattttgctcctttttataaagagctttgtgcttggccttttattatgcatatttttaatgaataaaatcaactgactcatttttgggaaatgtacatctttaatatgtttttccctaagggtctaggcattatgatgccacctcttcattttggatataactatgaagaaatctattaactgcacctacacaaaactggaaaacactataggtaaacagtactgtgtatatggaattgtggtgcgtggtatgtgttttctcttgctttgttccagaaagatgaaagtgagtctttaaagcatagcaaatagagcttcccctcacctgccacacactcctgcactaaagttcaaagaaaagaattattcaaatcaaatgaaatttgaataatattagctatcaggaatataggacaccaaacacactgcctcacacattattgtttattctgaacggaaaggaacagtgtaaaaataaactacttaccaaaacttgcctttagtcagaacattcagctctcagggaagcaggtataactgatgaaacttctaggacttcagaaaacagattctaattatatccatgtttttcgttgttattttcattttttaaagtgtgagttgatgtttattttagtgtttcacaatagaattatcatgtatactgattccagtgtggcatgtgattaagttttggacatgaatatgccaaaagtgcttaaatgtttttggccacataactagctagaatttcaaaacaaaattcagatttgctaccattcacctgacgaacttctccatggctcgtcactggtttggttcaactgcagaagtcattggctaaattttccttatcacctacgtaaatttctagaagaatttactagcaggattaataatgaatattataaactgctttccacacactagggtataattattggtgcaatctatgttgttcttgatgccatggttttacatcttttaatttaaaccttatacaccagtgtttaggtcgcttttgagacaaggtagccctgatgcaaggaaaaatgaggctactacttcacataaaaaatagggtgttaataccacctttactgtactgttggagcagatctttattttacaagtgttcatattcacataagagaattttaaatgaagaaaattaagtttgttaaattataattatgagactttcgttggcatttgatttcaagaatacatatgcattttccaaaaaataaatgtggaggttattcagaacaaaattcatagcttacggtagtaatggcatggattaattttatttgcatgcacacacagacacacatacttcatatatgcaaattatagcattagtttttgatatatctagtggtttttttttcaaaattgcaggaggttgtagattaaattaagtatgatagcacgttttttaattcattaatcatgaagtgctctgttccctaagttatgacatttagaagaaatcacatgctcaaccttaatctgagaacctaagtgtttttgagcattccagtaaaggagtagtgttcttttcctaacttacatcagggtacatctgtgtggcacacagatactatcttttcattcttcactcccagtcttaatttctttcccctgtatgtcactgtattttatgtcacttcacattgtgttaaacagggtaaatagagatcctcagtatctcagtgctgtggcatagctccaataggtgtgctgtggtgcactgcagtgatgtatttgcataacattgtttgatagtgaaaaattttttttcggttcaagtgttttgtgattaaaattttatgtttaattaaaatattgcataatattgatgggttcaaaaaccattaaaataatcaaacaattattctgtgcccttaacattattttcttgtgttttcaataaaattttcttttcatctttccatcttcacattctcttagcatcatcctatgcacataaggtatgttgttttccttctccactcacctaccgcactaaatttgatcagcaattgtacagtaacagaatatatttgtgccagaagatttgcaatgatatttgagcatgtatttatttaggaggaagccagtgcctgtaattatgtctcattgagtagttttactttgcccatcctgcagtatttagagctgatctgtacccaaagcaggacaatgtaactgtagatctgctttgttttcagtaactgtacattgcatcagaatctgtttatttctatctggaaacagacagaatggtgggggagggaaggagttattttgcatcctagtttgtattatgaagtcatcatatatatatttgaaatagtataagctaattactgttgcagaatgccctcgatataattatttcttttcagctggatgtgaaaagctgaagcagtgaaaacctgcagtcttatttcactggtttccttctgtttcttgtccatcacttctgtatccacagggagctatctactacatacctttggtaacaggctacattctcttcagattttttatatgaataatttcatcagcactaaagcattaacatagaataatgagccaaagtactgagtcgagatggctttcagttgagtttaatttcatatttaacttttgcatttaacttgtataatacactactgctgagaaaaacaattatgaatgccttctgcatgttgtacattatctctaacagagatggtgcaattttaagaatacaaaggggtatagagttagaatggatgtgttcgtgcatatatatgttgtatttaaatattaatgtttacaagaagattttttttaaattcttcaaatacttcacttagtgaaataatgggccaatctggaatagagacattttatttggttagtgcaagagtgaaagctagcatttgttaaccttcacatatttatctgtgtacaattgtttttgcttctggtaatgaattattagaaaatggaagattttgttcaatgtttttggccctcaggtttactgtgtaaatctgcatttttggtggtaaatccctttgccacagattcagtagcttttggtaaacttcactgtttttaaagtaccttttgtgtaaaataaagatccaatttttataacaaatggcaaataaaaacagtaaatgctggaagaa

SEQ ID NO: 148204 - DNA, 1957 bp, Homo sapiens
  Payload ID: 9340
  Gene Symbol: LRRC8B
  Gene Name: leucine rich repeat containing 8 family, member B
  ENST ID: ENST00000358200
  CDS Start-End: 148-840
tccagttgaccagcattcataggaatgaagacaaacacagagatggtgtgtctaagaaacttcaaaaggtgtagacctcctgactgaagcatattggatttatttaatttttttcactgtatttctgtcctcctacaagggaaagtcatgattacactaactgagctaaaatgcttagcagatgcccagtcatcttatcacatcttaaaaccatggtgggacgtcttctggtattacatcacactgatcatgctgctggtggccgtgctggccggagctctccagctgacgcagagcagggttctgtgctgtcttccatgcaaagtggaatttgacaatcactgtgccgtgccttgggacatcctgaaagccagcatgaacacatcctctaatcctgggacaccgcttccgctccccctccgaattcagaatgacctccaccgacagcagtactcctatattgatgccgtctgttacgagaaacagctccattggtttgcaaagtttttcccctatctggtgctcttgcacacgctcatctttgcagcctgcagcaacttttggcttcactaccccagtaccagttccaggctcgagcattttgtggccatccttcacaagtgcttcgattctccatggaccacccgcgccctttcagaaacagtggctgagcagtcagtgaggcctctgaaactctccaagtccaagattttgctttcgtcctcagggtgttcagctgacatagattccggcaaacagtcattgccctacccacagccaggtttggagtcagctggcatagaaagcccaacttccagtgtcctgacagaaggagggtgaacaggccaaagccatctttgaaaaagtgaaaagattccgcatgcatgtggagcagaaggacatcatttatagagtatatctgaaacagataatagtcaaagtcattttgtttgtgctcatcataacttatgttccatattttttaacccacatcactcttgaaatcgactgttcagttgatgtgcaggcttttacaggatataagcgctaccagtgtgtctattccttggcagaaatctttaaggtcctggcttcattttatgtcattttggttatactttatggtctgacctcttcctacagcctgtggtggatgctgaggagttccctgaagcaatattcctttgaggcgttaagagaaaaaagcaactacagtgacatccctgatgtcaagaatgactttgccttcatccttcatctggctgatcagtatgatcctctttattccaaacgcttctccatattcctatcagaggtcagtgagaacaaactgaaacagatcaacctcaataatgaatggacagttgagaaactgaaaagtaagcttgtgaaaaatgcccaggacaagatagaactgcatctttttatgctcaacggtcttccagacaatgtctttgagttaactgaaatggaagtgctaagcctggagcttatcccagaggtgaagctgccctctgcagtctcacagctggtcaacctcaaggagcttcgtgtgtaccattcatctctggtcgtagaccatcctgcactggcctttctagaggagaatttaaaaatcctccgcctgaaatttactgaaatgggaaaaatcccacgctgggtatttcacctcaagaatctcaaggaactttatctttcgggctgtgttctccctgaacagttgagtactatgcagttggagggctttcaggacttaaaaaatctaaggaccctgtacttgaagagcagcctctcccggatcccacaagttgttacagacctcctgccttcattgcagaaactgtcccttgataatgagggaagcaaactggttgtgttgaacaacttgaaaaagatggtcaatctgaaaagcctagaactgatcagctgtgacctggaacgcatcccacattccatt

SEQ ID NO: 148205 - DNA, 763 bp, Homo sapiens
  Payload ID: 9340
  Gene Symbol: LRRC8B
  Gene Name: leucine rich repeat containing 8 family, member B
  ENST ID: ENST00000449440
  CDS Start-End: 453-763
agcggaacgcgtcgcgtcacaatggagccggtcggaggcggcgagccggacagcgccggggcttcccgctgagcccgcagcctccggcagccgggaaagtgcgggcgcggggccgcagcctgcccgcccggagcggcccaggagcacgccgcggggagcgcgggcgtccggggctggagtcgcgcagaatcctcagagtgaaaacaccaacagtaatagttaacctcttctgtgagaagtcagaaggtgatctctttaatgctttctttttaagaatttttcaaattgagactaattgcagaggttccagttgaccagcattcataggaatgaagacaaacacagagatggtgtgtctaagaaacttcaaaaggtgtagacctcctgactgaagcatattggatttatttaatttttttcactgtatttctgtcctcctacaagggaaagtcatgattacactaactgagctaaaatgcttagcagatgcccagtcatcttatcacatcttaaaaccatggtgggacgtcttctggtattacatcacactgatcatgctgctggtggccgtgctggccggagctctccagctgacgcagagcagggttctgtgctgtcttccatgcaaagtggaatttgacaatcactgtgccgtgccttgggacatcctgaaagccagcatgaacacatcctctaatcctgggacaccgcttccgctccccctccgaattcagaatgacctccaccgacagcagtactccta

SEQ ID NO: 148206 - DNA, 7474 bp, Homo sapiens
  Payload ID: 9340
  Gene Symbol: LRRC8B
  Gene Name: leucine rich repeat containing 8 family, member B
  Uniprot ID: Q6P9F7
  ENST ID: ENST00000439853
  CDS Start-End: 247-2658
ccctaggtaatagttaacctcttctgtgagaagtcagaaggtgatctctttaatgctttctttttaagaatttttcaaattgagactaattgcagaggttccagttgaccagcattcataggaatgaagacaaacacagagatggtgtgtctaagaaacttcaaaaggtgtagacctcctgactgaagcatattggatttatttaatttttttcactgtatttctgtcctcctacaagggaaagtcatgattacactaactgagctaaaatgcttagcagatgcccagtcatcttatcacatcttaaaaccatggtgggacgtcttctggtattacatcacactgatcatgctgctggtggccgtgctggccggagctctccagctgacgcagagcagggttctgtgctgtcttccatgcaaagtggaatttgacaatcactgtgccgtgccttgggacatcctgaaagccagcatgaacacatcctctaatcctgggacaccgcttccgctccccctccgaattcagaatgacctccaccgacagcagtactcctatattgatgccgtctgttacgagaaacagctccattggtttgcaaagtttttcccctatctggtgctcttgcacacgctcatctttgcagcctgcagcaacttttggcttcactaccccagtaccagttccaggctcgagcattttgtggccatccttcacaagtgcttcgattctccatggaccacccgcgccctttcagaaacagtggctgagcagtcagtgaggcctctgaaactctccaagtccaagattttgctttcgtcctcagggtgttcagctgacatagattccggcaaacagtcattgccctacccacagccaggtttggagtcagctggcatagaaagcccaacttccagtgtcctggacaagaaggagggtgaacaggccaaagccatctttgaaaaagtgaaaagattccgcatgcatgtggagcagaaggacatcatttatagagtatatctgaaacagataatagtcaaagtcattttgtttgtgctcatcataacttatgttccatattttttaacccacatcactcttgaaatcgactgttcagttgatgtgcaggcttttacaggatataagcgctaccagtgtgtctattccttggcagaaatctttaaggtcctggcttcattttatgtcattttggttatactttatggtctgacctcttcctacagcctgtggtggatgctgaggagttccctgaagcaatattcctttgaggcgttaagagaaaaaagcaactacagtgacatccctgatgtcaagaatgactttgccttcatccttcatctggctgatcagtatgatcctctttattccaaacgcttctccatattcctatcagaggtcagtgagaacaaactgaaacagatcaacctcaataatgaatggacagttgagaaactgaaaagtaagcttgtgaaaaatgcccaggacaagatagaactgcatctttttatgctcaacggtcttccagacaatgtctttgagttaactgaaatggaagtgctaagcctggagcttatcccagaggtgaagctgccctctgcagtctcacagctggtcaacctcaaggagcttcgtgtgtaccattcatctctggtcgtagaccatcctgcactggcctttctagaggagaatttaaaaatcctccgcctgaaatttactgaaatgggaaaaatcccacgctgggtatttcacctcaagaatctcaaggaactttatctttcgggctgtgttctccctgaacagttgagtactatgcagttggagggctttcaggacttaaaaaatctaaggaccctgtacttgaagagcagcctctcccggatcccacaagttgttacagacctcctgccttcattgcagaaactgtcccttgataatgagggaagcaaactggttgtgttgaacaacttgaaaaagatggtcaatctgaaaagcctagaactgatcagctgtgacctggaacgcatcccacattccattttcagcctgaataatttgcatgagttagacctaagggaaaataaccttaaaactgtggaagagatcattagctttcagcatcttcagaatctttcctgcttaaagttgtggcacaataacattgcttatattcctgcacagattggggcattatctaacctagagcagctctctttggaccataataatattgagaatctgcccttgcagcttttcctatgcactaaactacattatttggatctaagctataaccacttgaccttcattccagaagaaatccagtatctgagtaatttgcagtactttgctgtgaccaacaacaatattgagatgctaccagatgggctgtttcagtgcaaaaagctgcagtgtttacttttggggaaaaatagcttgatgaatttgtcccctcatgtgggtgagctgtcaaaccttactcatctggagctcattggtaattacctggaaacacttcctcctgaactagaaggatgtcagtccctaaaacggaactgtctgattgttgaggagaacttgctcaatactcttcctctccctgtaacagaacgtttacagacgtgcttagacaaatgttgacttaaagaaaagagacccgtgtttcaaaatcatttttaaaagtatgctcggccgggcgtggtggctcatgcctataatcccagcactttgggaggccaagatgggcggattgcttgaggtcaggagttcgagaccagtctggccaacctggtgaaaccccatctctgctaaaactacaaaaaaattagccaggcgtggtggcgtgcgcctgtaatcccagctacttgggaggctgacgcaggggaattgcttgaaccagggaggtggaggttgcagtgagccgagattgtgccactgtacaccagcctgggtgacagagcaagactcttatctcaaaaaaaaaaaaaaaatgctccagggctttaaatgagaagtaaaattttctaagttaataaagatgaagaatgggtgactattatgatgaaccataactaaatgtcttattaaagcaactgagtgtctagccctaaattaaccaggtaaaaactgttaacactaacctgaagttttgtgaataactgttctttaacttattgagatgttgcaagaaatgcacatccagggtggactgggagctatgaaatgactaaattcctccttgcagtgtttaccttcaagattgtataggtattctctcctcttcttcccccagtccccattacttatttgcacacttgttttaactgacttcctgttttgatatttatcaccaagaccataaactcatcaatatgaattttcttgatgtatactcacgactgtctttgatttatgttcctaaatttttttagatagggtatgttgtgcttggcagaattcttttttggcttaatttttacttcctttcccagcttgcttgagtcttccttaacctggttttctcttaacaccaatgatgaaccctgagaaaatgcctgcatttggcctttgcctagaacaggagctgagtatttaagatgtattatcctcggggcatcctgaaaattaatgtattccctaaaatttcttcttgtctatcatcaaggcctttttttatttgttaagaatttttatattaaatgtaaaacatataaatattttctattgtataatcttggattcaacatctgtgaggatcatttttgtaagatacatagaatttgtgcatttctttatgaacttactgttagtgttcttggtttcggctgtttatgactcatgtttatgtacattctgctccaaaatgtttttgtactctgcaactaattacttttggataacaaaagccttgtgtttaatgccctaaagtatttgggggtttccttgtgagagggtggccgaatcatctacctctctcttccatagttgctgtgcaatcgtacgggtaaaattcttaattacttacaaaaactgtgatagaggggagaggtacagatttggtttttaaattgattttaaaatactttatagaaatttagtaagagttaaagcaaaagactttttttccctccatctatgtaatctctagctatgattataatgtaaaacagcctctattcagtgtctaaaatgagttctcaaaacccacaaagaaatagatccatttaactgaaattcatctcatgcctttatctaactcttctggaaaatacattttgctcctttttataaagagctttgtgcttggccttttattatgcatatttttaatgaataaaatcaactgactcatttttgggaaatgtacatctttaatatgtttttccctaagggtctaggcattatgatgccacctcttcattttggatataactatgaagaaatctattaactgcacctacacaaaactggaaaacactataggtaaacagtactgtgtatatggaattgtggtgcgtggtatgtgttttctcttgctttgttccagaaagatgaaagtgagtctttaaagcatagcaaatagagcttcccctcacctgccacacactcctgcactaaagttcaaagaaaagaattattcaaatcaaatgaaatttgaataatattagctatcaggaatataggacaccaaacacactgcctcacacattattgtttattctgaacggaaaggaacagtgtaaaaataaactacttaccaaaacttgcctttagtcagaacattcagctctcagggaagcaggtataactgatgaaacttctaggacttcagaaaacagattctaattatatccatgtttttcgttgttattttcattttttaaagtgtgagttgatgtttattttagtgtttcacaatagaattatcatgtatactgattccagtgtggcatgtgattaagttttggacatgaatatgccaaaagtgcttaaatgtttttggccacataactagctagaatttcaaaacaaaattcagatttgctaccattcacctgacgaacttctccatggctcgtcactggtttggttcaactgcagaagtcattggctaaattttccttatcacctacgtaaatttctagaagaatttactagcaggattaataatgaatattataaactgctttccacacactagggtataattattggtgcaatctatgttgttcttgatgccatggttttacatcttttaatttaaaccttatacaccagtgtttaggtcgcttttgagacaaggtagccctgatgcaaggaaaaatgaggctactacttcacataaaaaatagggtgttaataccacctttactgtactgttggagcagatctttattttacaagtgttcatattcacataagagaattttaaatgaagaaaattaagtttgttaaattataattatgagactttcgttggcatttgatttcaagaatacatatgcattttccaaaaaataaatgtggaggttattcagaacaaaattcatagcttacggtagtaatggcatggattaattttatttgcatgcacacacagacacacatacttcatatatgcaaattatagcattagtttttgatatatctagtggtttttttttcaaaattgcaggaggttgtagattaaattaagtatgatagcacgttttttaattcattaatcatgaagtgctctgttccctaagttatgacatttagaagaaatcacatgctcaaccttaatctgagaacctaagtgtttttgagcattccagtaaaggagtagtgttcttttcctaacttacatcagggtacatctgtgtggcacacagatactatcttttcattcttcactcccagtcttaatttctttcccctgtatgtcactgtattttatgtcacttcacattgtgttaaacagggtaaatagagatcctcagtatctcagtgctgtggcatagctccaataggtgtgctgtggtgcactgcagtgatgtatttgcataacattgtttgatagtgaaaaattttttttcggttcaagtgttttgtgattaaaattttatgtttaattaaaatattgcataatattgatgggttcaaaaaccattaaaataatcaaacaattattctgtgcccttaacattattttcttgtgttttcaataaaattttcttttcatctttccatcttcacattctcttagcatcatcctatgcacataaggtatgttgttttccttctccactcacctaccgcactaaatttgatcagcaattgtacagtaacagaatatatttgtgccagaagatttgcaatgatatttgagcatgtatttatttaggaggaagccagtgcctgtaattatgtctcattgagtagttttactttgcccatcctgcagtatttagagctgatctgtacccaaagcaggacaatgtaactgtagatctgctttgttttcagtaactgtacattgcatcagaatctgtttatttctatctggaaacagacagaatggtgggggagggaaggagttattttgcatcctagtttgtattatgaagtcatcatatatatatttgaaatagtataagctaattactgttgcagaatgccctcgatataattatttcttttcagctggatgtgaaaagctgaagcagtgaaaacctgcagtcttatttcactggtttccttctgtttcttgtccatcacttctgtatccacagggagctatctactacatacctttggtaacaggctacattctcttcagattttttatatgaataatttcatcagcactaaagcattaacatagaataatgagccaaagtactgagtcgagatggctttcagttgagtttaatttcatatttaacttttgcatttaacttgtataatacactactgctgagaaaaacaattatgaatgccttctgcatgttgtacattatctctaacagagatggtgcaattttaagaatacaaaggggtatagagttagaatggatgtgttcgtgcatatatatgttgtatttaaatattaatgtttacaagaagattttttttaaattcttcaaatacttcacttagtgaaataatgggccaatctggaatagagacattttatttggttagtgcaagagtgaaagctagcatttgttaaccttcacatatttatctgtgtacaattgtttttgcttctggtaatgaattattagaaaatggaagattttgttcaatgtttttggccctcaggtttactgtgtaaatctgcatttttggtggtaaatccctttgccacagattcagtagcttttggtaaacttcactgtttttaaagtaccttttgtgtaaaataaagatccaatttttataacaaatggcaaataaaaacagtaaatgctgg

SEQ ID NO: 148207 - DNA, 7218 bp, Homo sapiens
  Payload ID: 9341
  Gene Symbol: LRRC8C
  Gene Name: leucine rich repeat containing 8 family, member C
  Uniprot ID: Q8TDW0
  ENST ID: ENST00000370454
  CDS Start-End: 256-2667
gtccgcggccggggaggcggaggggaggagggcttgcggggctggggcgttagctgcgtcccggctggaagcccgcgaagagaagtaggaggaaggcgccgccgtggccgcggccgcagtgctcgggcgcgacaagccatgagcagcgaccccgcgggcgacgccgccgtccctggcagccgctgagcccgacccccaggcagctcgccgctccctagcaccttctccagtcgacactctcgcgcccggagaaacatgattcccgtgacagaattccggcagttctctgagcagcagcctgccttccgagtgctgaagccatggtgggatgtgtttaccgattacctctcagtagccatgctcatgatcggcgtgtttggatgtactttacaggtcatgcaagacaagataatctgccttccgaaaagagtgcagcctgctcagaaccactcttccctttcgaatgtctctcaagcagttgccagtaccactccactgcctccacctaaaccatctcctgctaaccccatcactgtggaaatgaaaggcctgaagacagatttggaccttcagcagtacagctttataaatcagatgtgttatgagcgagccctccactggtatgccaagtatttcccttaccttgtcctcatccataccctggtctttatgctctgcagtaacttttggttcaaattccctggttccagctccaaaatagaacatttcatctccattctggggaagtgttttgactctccttggaccacacgggctttatctgaagtgtctggggaggactcagaagaaaaggacaacaggaagaacaacatgaacaggtccaacaccatccaatctggtccagaagacagcctggtcaactctcagtctttaaagtccattcctgagaagtttgtagttgataaatccactgcaggggctctggataaaaaggaaggtgagcaggctaaggccttatttgagaaggtgaagaagttcaggctgcatgtggaagaaggtgatattctatatgccatgtatgttcgccagactgtacttaaagttatcaaattcctaatcatcattgcatataatagtgctctggtttccaaggtccagtttacagtggactgtaatgtggacattcaggacatgactggatataaaaacttttcttgcaatcataccatggcacacttgttctcaaaactgtccttttgctatctgtgctttgttagtatctatggattgacgtgcctttataccttatactggctgttctaccgttctctacgggaatattcctttgagtatgtccgtcaggagactggaattgatgatattccagatgtgaaaaatgactttgcttttatgcttcatatgatagatcagtatgaccctctctattccaagagatttgcagtgttcctgtctgaagtcagtgaaaacaaattaaagcagctgaacttaaataacgaatggactcctgataaactgaggcagaagctacagacaaatgcccataatcgactggaattgcctcttatcatgctctctggccttccagacactgtttttgaaatcacagagttgcaatctctaaaacttgaaatcattaagaacgtaatgataccagccaccattgcacagctagacaatcttcaagagctctctctgcaccagtgttctgtcaaaatccacagtgcggcgctctctttcctgaaggaaaacctcaaggtcttgagcgtcaagtttgatgacatgagggaactccccccctggatgtatgggctccgaaatctggaagagctgtacctagttggctctctaagtcatgatatttccagaaatgtcacccttgagtctctgcgggatctcaaaagccttaaaattctctctatcaaaagcaacgtttccaaaatccctcaggcagtggttgatgtttccagccatctccagaagatgtgcatacataatgatggcaccaagctggtgatgctcaacaacttaaagaagatgaccaatctgacagagctggagctggtccactgtgacctggagcgtattcctcatgctgtgttcagcctactcagcctccaggaattggacctgaaggaaaacaatctgaaatctatagaagaaatcgttagctttcagcacttaagaaagttgacagtgctaaaactgtggcataacagcatcacctacatcccagagcatataaagaaactcaccagcctggaacgcctgtcctttagtcacaataaaatagaggtgctgccttcccacctcttcctatgcaacaagatccgatacttggacttatcgtacaatgacattcgatttatcccccctgaaattggagttctacaaagtttacagtatttttccatcacatgtaacaaagtggaaagccttccagatgaactctacttctgcaagaaacttaaaactctgaagattggaaaaaacagcctatctgtactttcaccgaaaattggaaatttgctatttctttcctacttagatgtaaaaggtaatcactttgaaatcctccctcctgaactgggtgactgtcgggctctgaagcgagctggtttagttgtagaagatgctctgtttgaaactctgccttctgacgtccgggagcaaatgaaaacagaataacttatttttcgttaaagtttgactgaaacacgcttctaccaaatacagtataaataattaggtagtcttaatgcctttcctatttttttttccttttcacacaaaatgtacacaaagatcgcgtaaggagtatgtatttttaataaaaatttaattgtattttttcaatattaatattttgaagttttatttgtcttgaaacacaatgtatctattatctactgacagaaagagatagttccatttggttttttgtttttgttttttagttcattcttgtggaaaggagggaattataagttgcatgctttttggcattttttaaatagaggaagatattttgccaaggccatttttaacttgtttacacctgtacagggttcttatttttgttttcattgtgtgtgtatcaaggaatctgtgctagttattttaataccagctgtcttctccattggccaagaccttcattcagtggaacttcacataagtgcattgtcatagagtattttaaatgttcccctgcctccaacaaaaccctaaactgtgttatttcatatacctgacagttattgttatccttaggcaaggtttttgtgagtgaagaaaataatctttagtggctggtatgtttgaattaggcctttatcatttaacttatttgcattttaccaacattttaaaaatatttaaaacctaaatacagaggctcctcccaccttaatctcaatactgctatgtagtactggtgaacaactttggagaacctagatttattttaatattctaatagataattaaattttaaaatgatagaagcctggtttttgagtaatttaatcatctttcatatcttgatatgcagctgcatcagatggaaaaaaatttactaaagcaccctgttaaagagctggtgtgctccagtgaggccctctccttttctcagcacagtgtggcagtggtaatctattcaaattttgcctgttacacaaaataatccacttatatatacagtcagccttccgtacttgtgggttctgcatctgtggattccaccaactgtagatggaaaatactcaaaaagaaagttgtgtctgtactgaatatgtacagactttttccttgtcattattccctaaacaatacagcgtaacaactatttaaataggatttacattgttttaggtattataaattacctagagatgatttaaagtatatgggaggatgtgcataggttatatgcaatttctgcaccattttatgtcaaggattttgaacatcctcagattttggtgttcgagggcatcctggaatcaattccccatgataccgagggatgactggatattaatcgatttccctcaagcctgcccttgctgtgaactagtgctacaagcacgggaaatccatctgctctctggcttaaaatatgtatctcatctaaaattgttcgttaaagtgtgaataaattgctaagtggttgttgcttagcaataatttttgcctgaccatcagcagagcttttatttacctttgtaattaaaatccaacatagcatgggctcttgggcaaaatatttcactgactattaagcatgtagaacaggaaaatgaaatacactatttgtgcccttgacctagaaccagaaccactaattatgagaactttgttttatgtaccaaattcacattgaccattttctgagctctagactgatcgtagtaagttttgtgacttaacaatgaaagaaagtagaaagatgctttgggttttcaaaatgttgttttttaaaattgttctttgggtgaatttactcagtgctgctttgagttgtatacagaaacaaatgttgggaattgctcctcagaaatgtgttcctaagttgtgttttcaactttacatcatgaggtgaagcattagggaaagagattctttcgatttgtttaataatctaattatacagaccaaagtgctttacgtttctgctctatgttaatgttttagaatggtgattttgctgattaatttagacctggaattgaaataatgtgctcagaataataacatggttatagttcttgtatgataaagtattcaatttcagaatagtgttggaatcctgagtttgaataatgtgttgtatttagaaacatagccctatctgttttaaacaaataatttgttggccgattgtccatggttgagcatgacaaaaatacctcgtcgaaaggcaagcttaggtaactgctggcaaaacactgggtgcactatttttctggataaaatttatagttattttctatattacccttcaaaagggatctcttcaggttaaaaatcacgcttatgctgaagtctttatctggtgttaactaaaaatctcatatgggttcataaccgaggtcactaataattcatttttatcacttgtaaaaatttgctcaaaattccaaaaaaatattgatttgttttttagtgattttgcaggctgacccccaacctaagttttgataacatctggtaagtcagtatagttctgtgacttcatgttttaactaagaaggaaaattcatagatattcctattagattttataaaccttcaaaagtctgaaacttaattttgagtctaaattttctgacactggccccttttaatattgtaagtttttgttcactttcttaagtaaaaaaaacatttaattactagttagcccttaactgggaaactcaggtaatgaactgctgacttttctaaagttctttaactgatcaattctgtatagagggatatttatctaaccactttccgtattttacaagtgctctttctaaaaaggaataactattatagctctatttccccaatctctataggactcatgagagattgcttgtgtaaatataaaagcaccatatgtgttcttaactcctatggctgcttgaagctcatgatgaaaaagtctttttgtcagttttaattgttaagtacagaacaaacaattgtttggtgatggcctggttgaaagagagcatataaatatatcccagtggaactcaccaaagaagaccacacctcagaaattattgcattttctcattatgtgttgggtttgatttgcttttgtttttaatgcagctcttttaatataaagattcttgatacagtgaaatctcttatttcaagtgtaagttattcttcacccaccccttcccctgccattgtatttcccatctgtttcaaggagtttcaacaatttacattgcatcgtatgcagtaggtactgctttttcagaaagacctggaaaacatacctgctatgaatattttgttcagatgtagccatttacctggctctcaagttgtctttgtggagagggtcttagacaaaaatcttccttgtatttacttgggttaagtgaagtccaaattcttacagtatgctatttcaggatttctgatattaaaaaagaaaaaacaaaatctttatatctcttattaacacttcccccaagaagggttgtgctgttatttattttctattataagaaaagttcattctttaagtagtttcttttacctctaatctaatttcataccaaatacctgatcaatagaaatgatatatttaagcagcaaagattcctaatccatcattatgaaaagtgtcagcatacttagtagtgaacagataaagtcaatttgaatataattccactttgtttttagagactaaattaagattcaattaacattatcctatgaattctgaatgtgataatgtgattcaaacagtcaaattttattaagctcttagtaactcaggatagcattccatactaacctcaagttagcaaaacaaattagttaaacagcttggttcttagcagactgcttaaaagatcaagaaaattttctcatcttttctttctacttagaaacattgcaagaaaccttggacagtcttcaccagacctgccatgattttataagatttaggcctcagtgacatgctcctgaaagtttcctgccagccatccaaactaagcatccactcattccatcttcccaaagtcactcaccgataaaggtagcatccttaagttcatttttgaaaggtggaggaggatctccccctgcccaaaggaatttttttatcagaataccttgaaaggggggtatataaatttggaaaacttaatttcttggctgtgtttgataacagttcctatgcatggtttttaatgtgaggtaaatttgtttctttcttcagaatacctctctccaccccccaccttattcttcctctttaatgaatatttttattggagctcaaactccatgacttacgtgctcactaagttttcttttttccccttgtttactctgtctgtatgtatgtcaaaagctggcaaaacctctaaaactgtcaagaaaatgcttgaaagttgatttgtcatagtgcaaattcatgataaaatgtcttaatgttatttggatatgtagtacatagaaacagaaaaataaagtcatttttataacttaaaa

SEQ ID NO: 148208 - DNA, 504 bp, Homo sapiens
  Payload ID: 9341
  Gene Symbol: LRRC8C
  Gene Name: leucine rich repeat containing 8 family, member C
  ENST ID: ENST00000482063
  CDS Start-End: 147-323
gcggccgcagtgctcgggcgcgacaagccatgagcagcgaccccgcgggcgacgccgccgtccctggcagccgctgagcccgacccccaggcagctcgccgctccctagcaccttctccagtcgacactctcgcgcccggagaaacatgattcccgtgacagaattccggcagttctctgagcagcagcctgccttccgagtgctgaagccatggtgggatgtgtttaccgattacctctcagtagccatgctcatgatcggcgtgtttggatgtactttacaggcagtttctctgaagctaagtggttttattttgttttaacctcagccctttggtgtctcattcatgcaaatgtggtaccttttcaactagttatcacaggctgctgttacaaagatatggcaaaaacactgtttaaccttttgaagaagaagaagaagatgacgaagaagaagacaaagaagaagaagctgcctgccttattttttttcttatttttctc

SEQ ID NO: 148209 - DNA, 3950 bp, Homo sapiens
  Payload ID: 9342
  Gene Symbol: LRRC8D
  Gene Name: leucine rich repeat containing 8 family, member D
  Uniprot ID: Q7L1W4
  ENST ID: ENST00000337338
  CDS Start-End: 408-2984
aattcccctcgttacagagtcatgtgctgctgctcccgtcgccgctgctgccgctgccgctgccgccgcccgtggtgccccggctcctccgccgcgcttcgaggtggcagccgcgggcggggccgcgggagcagggtccagggtgcagcgcgccttcgccgccccggcgcgtcccggtgcagccgccgcccgccgcgggtgatgccgccacctccggcctcagcataagccgtggcttggcggccgagctgcaccccaaggaagtgcacggctgtctataacgtgctgccgggtctcaggatggaggagtgaagtctcctgtcgccgtggttccagcctccggagctcgcccaagccgcgtccccagagagcgccctgagagaacagggtggccgcttggtccaggaatgtttacccttgcggaagttgcatcacttaatgacattcagccaacttaccgaatcctgaaaccatggtgggatgtgtttatggattacctagctgttgttatgttaatggtagccatctttgcaggaaccatgcaacttaccaaagatcaggtggtctgtttgccagtattgccatctcctgtaaattcaaaggcacatacaccaccaggaaatgccgaggtcaccaccaacatcccaaagatggaagcagccaccaaccaagaccaagatgggcggacaacaaacgacatttcctttgggacatctgctgtgacacctgacatacctctcagagccacatatcctcgcacagatttcgcacttccaaatcaggaggcaaagaaagagaagaaagatccaacaggtcgaaaaacaaacttggattttcagcaatatgtatttattaatcaaatgtgttaccatctggcccttccgtggtattctaagtactttccatacctagctcttatacatactattattctcatggtcagtagcaacttttggttcaaatatcccaaaacatgctcaaaagtagaacattttgtttcaatattaggaaagtgctttgaatccccttggacgacaaaagcgttgtctgagacagcatgcgaagactcagaggaaaacaagcagagaataacaggtgcccagactctaccaaagcatgtttctaccagcagtgatgaagggagccccagtgccagtacaccaatgatcaataaaactggctttaaattttcagctgagaagcctgtgattgaagttcccagcatgacaatcctggataaaaaggatggagagcaggccaaagccctgtttgagaaagtgaggaagttccgtgcccatgtggaagatagtgacttgatctataaactctatgtggtccaaacagttatcaaaacagccaagttcatttttattctctgctatacagcgaactttgtcaacgcaatcagctttgaacacgtctgcaagcccaaagttgagcatctgattggttatgaggtatttgagtgcacccacaatatggcttacatgttgaaaaagcttctcatcagttacatatccattatttgtgtttatggctttatctgcctctacactctcttctggttattcaggatacctttgaaggaatattctttcgaaaaagtcagagaagagagcagttttagtgacattccagatgtcaaaaacgattttgcgttccttcttcacatggtagaccagtatgaccagctatattccaagcgttttggtgtgttcttgtcagaagttagtgaaaataaacttagggaaattagtttgaaccatgagtggacatttgaaaaactcaggcagcacatttcacgcaacgcccaggacaagcaggagttgcatctgttcatgctgtcgggggtgcccgatgctgtctttgacctcacagacctggatgtgctaaagcttgaactaattccagaagctaaaattcctgctaagatttctcaaatgactaacctccaagagctccacctctgccactgccctgcaaaagttgaacagactgcttttagctttcttcgcgatcacttgagatgccttcacgtgaagttcactgatgtggctgaaattcctgcctgggtgtatttgctcaaaaaccttcgagagttgtacttaataggcaatttgaactctgaaaacaataagatgataggacttgaatctctccgagagttgcggcaccttaagattctccacgtgaagagcaatttgaccaaagttccctccaacattacagatgtggctccacatcttacaaagttagtcattcataatgacggcactaaactcttggtactgaacagccttaagaaaatgatgaatgtcgctgagctggaactccagaactgtgagctagagagaatcccacatgctattttcagcctctctaatttacaggaactggatttaaagtccaataacattcgcacaattgaggaaatcatcagtttccagcatttaaaacgactgacttgtttaaaattatggcataacaaaattgttactattcctccctctattacccatgtcaaaaacttggagtcactttatttctctaacaacaagctcgaatccttaccagtggcagtatttagtttacagaaactcagatgcttagatgtgagctacaacaacatttcaatgattccaatagaaataggattgcttcagaacctgcagcatttgcatatcactgggaacaaagtggacattctgccaaaacaattgtttaaatgcataaagttgaggactttgaatctgggacagaactgcatcacctcactcccagagaaagttggtcagctctcccagctcactcagctggagctgaaggggaactgcttggaccgcctgccagcccagctgggccagtgtcggatgctcaagaaaagcgggcttgttgtggaagatcacctttttgataccctgccactcgaagtcaaagaggcattgaatcaagacataaatattccctttgcaaatgggatttaaactaagataatatatgcacagtgatgtgcaggaacaacttcctagattgcaagtgctcacgtacaagttattacaagataatgcattttaggagtagatacatcttttaaaataaaacagagaggatgcatagaaggctgatagaagacataactgaatgttcaatgtttgtagggttttaagtcattcatttccaaatcatttttttttttcttttggggaaagggaaggaaaaattataatcactaatcttggttctttttaaattgtttgtaacttggatgctgccgctactgaatgtttacaaattgcttgcctgctaaagtaaatgattaaattgacattttcttactatatcaccttttttgaggggtcttaatttactttgcttaattggtgcaatattgctttaactccgttcactaaagacaaacacatcaagtccaaacttgtaaatttagatttgctgaaatactgatttatttcctgttttaatttaaagtgcctcaagtaagcacctctcacaacagttgactggtactgctgctcctgagcacctcgtgtcatagattttatactcttacagacttggaatgcagtagaggtatgtggatttttaggggttttgtttttttaagaataagtaacaagaaataacacatttcttaataatagcttttttgacatagtttggagttctgattatatggtacatttttctaccagtaatatagggttgccaataaatagaaaatgttttctaaaaataaattttattacaacaaaataaaaattttaatgacttattaacacaacctccagtatcaccaccatttggaagataacacagaatcacaagtatcatttaatttcttgcccttttcagtgttgttctggtgttggtgggaaaataataggaaatgtagttcattgggtagggaaactcttacctttccctatcttaat

SEQ ID NO: 148210 - DNA, 3345 bp, Homo sapiens
  Payload ID: 9342
  Gene Symbol: LRRC8D
  Gene Name: leucine rich repeat containing 8 family, member D
  Uniprot ID: Q7L1W4
  ENST ID: ENST00000394593
  CDS Start-End: 413-2989
ataatccgcttctagcttgtttggaggcgtgggctcttgggagcgggacttctgctcaaatcctgtccaggggcttgaaaaggaggagaattgggggtggttgccgggaggaccagcacctccagttactggagggttgataggggccttctcctttccgtcaccctttactagggggtatcccttgcagataaatgagattttttgatttcttaaaaagccagctgcagtgaagaagaactgctgcaggtcgaggggaagagaggaagtgcacggctgtctataacgtgctgccgggtctcaggatggaggagtgaagtctcctgtcgccgtggttccagcctccggagctcgcccaagccgcgtccccagagagcgccctgagagaacagggtggccgcttggtccaggaatgtttacccttgcggaagttgcatcacttaatgacattcagccaacttaccgaatcctgaaaccatggtgggatgtgtttatggattacctagctgttgttatgttaatggtagccatctttgcaggaaccatgcaacttaccaaagatcaggtggtctgtttgccagtattgccatctcctgtaaattcaaaggcacatacaccaccaggaaatgccgaggtcaccaccaacatcccaaagatggaagcagccaccaaccaagaccaagatgggcggacaacaaacgacatttcctttgggacatctgctgtgacacctgacatacctctcagagccacatatcctcgcacagatttcgcacttccaaatcaggaggcaaagaaagagaagaaagatccaacaggtcgaaaaacaaacttggattttcagcaatatgtatttattaatcaaatgtgttaccatctggcccttccgtggtattctaagtactttccatacctagctcttatacatactattattctcatggtcagtagcaacttttggttcaaatatcccaaaacatgctcaaaagtagaacattttgtttcaatattaggaaagtgctttgaatccccttggacgacaaaagcgttgtctgagacagcatgcgaagactcagaggaaaacaagcagagaataacaggtgcccagactctaccaaagcatgtttctaccagcagtgatgaagggagccccagtgccagtacaccaatgatcaataaaactggctttaaattttcagctgagaagcctgtgattgaagttcccagcatgacaatcctggataaaaaggatggagagcaggccaaagccctgtttgagaaagtgaggaagttccgtgcccatgtggaagatagtgacttgatctataaactctatgtggtccaaacagttatcaaaacagccaagttcatttttattctctgctatacagcgaactttgtcaacgcaatcagctttgaacacgtctgcaagcccaaagttgagcatctgattggttatgaggtatttgagtgcacccacaatatggcttacatgttgaaaaagcttctcatcagttacatatccattatttgtgtttatggctttatctgcctctacactctcttctggttattcaggatacctttgaaggaatattctttcgaaaaagtcagagaagagagcagttttagtgacattccagatgtcaaaaacgattttgcgttccttcttcacatggtagaccagtatgaccagctatattccaagcgttttggtgtgttcttgtcagaagttagtgaaaataaacttagggaaattagtttgaaccatgagtggacatttgaaaaactcaggcagcacatttcacgcaacgcccaggacaagcaggagttgcatctgttcatgctgtcgggggtgcccgatgctgtctttgacctcacagacctggatgtgctaaagcttgaactaattccagaagctaaaattcctgctaagatttctcaaatgactaacctccaagagctccacctctgccactgccctgcaaaagttgaacagactgcttttagctttcttcgcgatcacttgagatgccttcacgtgaagttcactgatgtggctgaaattcctgcctgggtgtatttgctcaaaaaccttcgagagttgtacttaataggcaatttgaactctgaaaacaataagatgataggacttgaatctctccgagagttgcggcaccttaagattctccacgtgaagagcaatttgaccaaagttccctccaacattacagatgtggctccacatcttacaaagttagtcattcataatgacggcactaaactcttggtactgaacagccttaagaaaatgatgaatgtcgctgagctggaactccagaactgtgagctagagagaatcccacatgctattttcagcctctctaatttacaggaactggatttaaagtccaataacattcgcacaattgaggaaatcatcagtttccagcatttaaaacgactgacttgtttaaaattatggcataacaaaattgttactattcctccctctattacccatgtcaaaaacttggagtcactttatttctctaacaacaagctcgaatccttaccagtggcagtatttagtttacagaaactcagatgcttagatgtgagctacaacaacatttcaatgattccaatagaaataggattgcttcagaacctgcagcatttgcatatcactgggaacaaagtggacattctgccaaaacaattgtttaaatgcataaagttgaggactttgaatctgggacagaactgcatcacctcactcccagagaaagttggtcagctctcccagctcactcagctggagctgaaggggaactgcttggaccgcctgccagcccagctgggccagtgtcggatgctcaagaaaagcgggcttgttgtggaagatcacctttttgataccctgccactcgaagtcaaagaggcattgaatcaagacataaatattccctttgcaaatgggatttaaactaagataatatatgcacagtgatgtgcaggaacaacttcctagattgcaagtgctcacgtacaagttattacaagataatgcattttaggagtagatacatcttttaaaataaaacagagaggatgcatagaaggctgatagaagacataactgaatgttcaatgtttgtagggttttaagtcattcatttccaaatcatttttttttttcttttggggaaagggaaggaaaaattataatcactaatcttggttctttttaaattgtttgtaacttggatgctgccgctactgaatgtttacaaattgcttgcctgctaaagtaaatgattaaattgacattttcttactata

SEQ ID NO: 148211 - DNA, 905 bp, Homo sapiens
  Payload ID: 9342
  Gene Symbol: LRRC8D
  Gene Name: leucine rich repeat containing 8 family, member D
  ENST ID: ENST00000441269
  CDS Start-End: 82-905
aaaagaaagctggattgccttaccaaatctccaggtttttcgttatacctcttcactcaggctctgcccagaactcaaggaatgtttacccttgcggaagttgcatcacttaatgacattcagccaacttaccgaatcctgaaaccatggtgggatgtgtttatggattacctagctgttgttatgttaatggtagccatctttgcaggaaccatgcaacttaccaaagatcaggtggtctgtttgccagtattgccatctcctgtaaattcaaaggcacatacaccaccaggaaatgccgaggtcaccaccaacatcccaaagatggaagcagccaccaaccaagaccaagatgggcggacaacaaacgacatttcctttgggacatctgctgtgacacctgacatacctctcagagccacatatcctcgcacagatttcgcacttccaaatcaggaggcaaagaaagagaagaaagatccaacaggtcgaaaaacaaacttggattttcagcaatatgtatttattaatcaaatgtgttaccatctggcccttccgtggtattctaagtactttccatacctagctcttatacatactattattctcatggtcagtagcaacttttggttcaaatatcccaaaacatgctcaaaagtagaacattttgtttcaatattaggaaagtgctttgaatccccttggacgacaaaagcgttgtctgagacagcatgcgaagactcagaggaaaacaagcagagaataacaggtgcccagactctaccaaagcatgtttctaccagcagtgatgaagggagccccagtgccagtacaccaatgatcaataaaactggctttaaattttcagctgagaagcctgtgattgaagttcccagcatgacaat

SEQ ID NO: 148212 - DNA, 666 bp, Homo sapiens
  Payload ID: 9342
  Gene Symbol: LRRC8D
  Gene Name: leucine rich repeat containing 8 family, member D
  ENST ID: ENST00000414841
  CDS Start-End: 317-666
tcttttgagccagcgaggcacaagacaagtaatttcccatcttgaatctctcacagctgctgagctgtagtggatatactgggatgtggctatgaactttaaaaatttgcataaatccagcccctactcccctgcaaaggctcagtcttgtctttacaccttccccgaggaagtgcacggctgtctataacgtgctgccgggtctcaggatggaggagtgaagtctcctgtcgccgtggttccagcctccggagctcgcccaagccgcgtccccagagagcgccctgagagaacagggtggccgcttggtccaggaatgtttacccttgcggaagttgcatcacttaatgacattcagccaacttaccgaatcctgaaaccatggtgggatgtgtttatggattacctagctgttgttatgttaatggtagccatctttgcaggaaccatgcaacttaccaaagatcaggtggtctgtttgccagtattgccatctcctgtaaattcaaaggcacatacaccaccaggaaatgccgaggtcaccaccaacatcccaaagatggaagcagccaccaaccaagaccaagatgggcggacaacaaacgacatttcctttgggacatctgctgtgacacctgacatacctctcagagccacatatcctcg

SEQ ID NO: 148213 - DNA, 922 bp, Homo sapiens
  Payload ID: 9342
  Gene Symbol: LRRC8D
  Gene Name: leucine rich repeat containing 8 family, member D
  ENST ID: ENST00000527156
  CDS Start-End: 363-922
agggggggcccgggccgaggccgcgccacctcggcaccacgcgggcagccggtgcggcggggtcgccacggccaggggagcgctgggtgcccaccatggcagttatgcaagcggtgaccccctggtcttgcctccccgccgccctgcactccttcctccccgctgccgacacttggatctctctagctctttctctcccctgtgttttcaaacaggaagtgcacggctgtctataacgtgctgccgggtctcaggatggaggagtgaagtctcctgtcgccgtggttccagcctccggagctcgcccaagccgcgtccccagagagcgccctgagagaacagggtggccgcttggtccaggaatgtttacccttgcggaagttgcatcacttaatgacattcagccaacttaccgaatcctgaaaccatggtgggatgtgtttatggattacctagctgttgttatgttaatggtagccatctttgcaggaaccatgcaacttaccaaagatcaggtggtctgtttgccagtattgccatctcctgtaaattcaaaggcacatacaccaccaggaaatgccgaggtcaccaccaacatcccaaagatggaagcagccaccaaccaagaccaagatgggcggacaacaaacgacatttcctttgggacatctgctgtgacacctgacatacctctcagagccacatatcctcgcacagatttcgcacttccaaatcaggaggcaaagaaagagaagaaagatccaacaggtcgaaaaacaaacttggattttcagcaatatgtatttattaatcaaatgtgttaccatctggcccttccgtggtattctaagtactttccatacctagctcttatacatactattattctcatggtcagtagcaacttttggttcaaatatcc

SEQ ID NO: 148214 - DNA, 597 bp, Homo sapiens
  Payload ID: 9342
  Gene Symbol: LRRC8D
  Gene Name: leucine rich repeat containing 8 family, member D
  ENST ID: ENST00000532201
  CDS Start-End: 233-597
acaatagccatgtgtgtcaggcagtgagctgaccagcaagtcctttgtgagtcttggaatgcattttccatgggtgggtggtgaggaagtgcacggctgtctataacgtgctgccgggtctcaggatggaggagtgaagtctcctgtcgccgtggttccagcctccggagctcgcccaagccgcgtccccagagagcgccctgagagaacagggtggccgcttggtccaggaatgtttacccttgcggaagttgcatcacttaatgacattcagccaacttaccgaatcctgaaaccatggtgggatgtgtttatggattacctagctgttgttatgttaatggtagccatctttgcaggaaccatgcaacttaccaaagatcaggtggtctgtttgccagtattgccatctcctgtaaattcaaaggcacatacaccaccaggaaatgccgaggtcaccaccaacatcccaaagatggaagcagccaccaaccaagaccaagatgggcggacaacaaacgacatttcctttgggacatctgctgtgacacctgacatacctctcagagccacatatcctcgcacagatttcgcact

SEQ ID NO: 148215 - DNA, 588 bp, Homo sapiens
  Payload ID: 9342
  Gene Symbol: LRRC8D
  Gene Name: leucine rich repeat containing 8 family, member D
  ENST ID: ENST00000525774
  CDS Start-End: 497-588
ccatgttacgctttgtctaattcccctcgttacagagtcatgtgctgctgctcccgtcgccgctgctgccgctgccgctgccgccgcccgtggtgccccggctcctccgccgcgcttcgaggtggcagccgcgggcggggccgcgggagcagggtccagggtgcagcgcgccttcgccgccccggcgcgtcccggtgcagccgccgcccgccgcgggtgatgccgccacctccggcctcagcataagccgtggcttggcggccgagctgcaccccaaggaagtgcacggctgtctataacgtgctgccgggtctcaggatggaggagtgaagtctcctgtcgccgtggttccagcctccggagctcgcccaagccgcgtccccagagagcgccctgagagaacagggtggccgcttggtccaggagtccccgggccccaggctgcagactggtacctgtcgagagctgttaggaactgggcttcacggcagtaggaatgtttacccttgcggaagttgcatcacttaatgacattcagccaacttaccgaatcctgaaaccatggtgggatgtgtttatggattacct

SEQ ID NO: 148216 - DNA, 3595 bp, Homo sapiens
  Payload ID: 9343
  Gene Symbol: LRRC8E
  Gene Name: leucine rich repeat containing 8 family, member E
  Uniprot ID: Q6NSJ5
  ENST ID: ENST00000306708
  CDS Start-End: 102-2492
gactcaccctcgcggcccgcccgggaactctgcgggagtcgcggcagctccgctcccagagacccaggagttgggcccagcgtccctcccggaacggcagcatgatcccagtggccgagttcaagcagttcacggaacagcagcctgcgttcaaggtgctcaaaccctggtgggacgtgctggccgagtacctcaccgtggccatgctcatgattggggtctttggctgcaccctccaggtgacacaggacaagatcatctgtctacccaatcatgagctccaggagaacttatcagaggccccgtgccagcaattgctgcctcgggggatccctgagcagattggggccctgcaggaggttaaaggccttaagaacaatttggacctgcagcaatacagctttattaaccagctgtgttatgagacggccctgcactggtatgccaagtacttcccttacctcgtggtcattcacacactcatcttcatggtctgcaccagtttctggttcaagttccctggcaccagctccaagattgaacacttcatctccatcctgggcaagtgtttcgactctccatggaccaccagggccctatccgaggtctccggggagaaccagaagggcccagcagccaccgaacgggctgcggccaccatagtggccatggcagggaccgggccggggaaggcaggggagggtgagaaggagaaagtgctggcggaaccggagaaggtggtgaccgagcctccagttgtcaccctgttggacaagaaggagggtgagcaagccaaagccctgtttgagaaggtgaagaagttccgcatgcacgtggaagagggcgacatcctgtacaccatgtacatccgacagacggtgctgaaagtgtgtaagttcctggccatcctggtctacaacctggtctatgtggagaagatcagtttcctggtggcctgtagggtggagacgtcagaggtcacgggctacgccagcttctgctgcaaccacaccaaggcccacctcttctccaagctggccttctgttacatctcctttgtgtgcatctacggacttacctgcatctacacgctctactggctcttccaccggcccctcaaggagtactccttccgttccgtgcgggaggagactggcatgggggacattcctgacgtcaagaatgacttcgccttcatgctgcacctcatcgatcagtacgactccctctactccaagcgcttcgccgtcttcctgtccgaggtcagcgaaagccgtctaaagcagctcaatctcaaccacgagtggacgcccgagaagcttcgacagaagctgcagcgcaatgccgcgggccggctggagctggccctctgcatgctgccgggtctgcccgacaccgtctttgagctcagtgaggtggagtcactcaggctggaggccatctgcgatatcaccttccccccggggctgtcacagctggtgcacttgcaggagctcagcttgctccactcgcccgccaggctacccttctccttgcaggtcttcctgcgggaccacctgaaggtgatgcgcgtcaaatgcgaggagctccgcgaggtgccgctttgggtgtttgggctgcggggcttggaggagctgcacctggaggggcttttcccccaggagctagctcgggcagccaccctggagagcctccgggagctgaagcagctcaaggtgttgtccctccggagcaacgccgggaaggtgccagccagtgtgaccgacgttgctggccacctgcagaggctcagcctgcacaacgatggggcccgtctggttgccctgaacagcctcaagaagctggcggcattgcgggagctggagctggtggcctgcgggctggagcgcatcccccatgcagtgttcagcctgggtgcgctgcaggaacttgacctcaaggacaaccacctgcgctccatcgaggaaatcctcagcttccagcactgccggaagctggtcacgctcaggctgtggcacaaccagatcgcctacgtccctgagcacgtgcggaagctcaggagcctggagcagctctacctcagctacaacaagctggagaccctgccctcccagctcggcctgtgctcaggcctccgtctgctggatgtgtcccacaatgggctacactccctgccacccgaggtgggcctcctgcagaacctacagcacctggccctctcctacaatgccctggaggccctgcccgaagagctcttcttctgccgcaagctgcggacgttgcttctgggcgacaaccagctgagccagctctcgccccacgtgggtgccctcagagccctcagccgcctggagctcaaaggcaaccgcttagaggcgctgccagaagaacttggcaactgtggggggctcaagaaggcggggctcctggtggaagacacgctttaccagggtctgccggcagaagtgcgggacaagatggaggaggaatgaagctggggtggggccgttttaggtagagccttaaaaatgcttctgccctggaatctcaaccattgtcttccaagataggaagccaagtgggtccaggccaggagatggggggggcgggggcagctgtgtcatctttctggggcccaggaggatctgggctggtttgtctggggagacagacaggatgttgtggagctggggtggaacctggtatggagggattaactcagtcatggcattctccgaccaaaaccacacctgtgtctctggcaggctggctggccttgctcccatccctagaactgctgcctctccctggatattccagctcaattagtgccacatatgggggaaacgacacatcccagtgggatttccaacactccccctccccatgcaacaaagcaacttacttctggagttctctcccaaggagaggacacagacacagttgtttgctgtgttatatgttagctccgaacaatggttctcatttggctaagcatcaaaatcacctagggagtcggtgcaaaacaaaatatcccagtcccctcccctgaaacactgactcaggaggtttggttgggggccaggagtctgttcctaaatattccaggtagttctggtgcaggtaagtggccctgagacagtatgttgggaaatgctgacgtaaaggtatcagggccgggcgctgtggctcatgactataatcccagctgtttgagaggccaatgcaggaggatggttgagctcaggagttcgagatcagcctgggtaacatagcgagaccccacctctgccaaaaaaaaaaaaaatagggtatccaaatatctagattctgatcccttttgaggtcctagaccctttgagaaactgatgaagccaggcacctccttcctcaggaaaatgctggtgtacaaatacacacaaagctcttcaggcagctgatagatttcccccagagagctattcaaggacttcctaaggtgggtggactgcagggttaggacacctgctatagaggtgacatttttccaaggacaagcagggactttggtcttgactgttctctgggtgcttaataaataatactaattatgcaa

SEQ ID NO: 148217 - DNA, 760 bp, Homo sapiens
  Payload ID: 9343
  Gene Symbol: LRRC8E
  Gene Name: leucine rich repeat containing 8 family, member E
  ENST ID: ENST00000598224
  CDS Start-End: 199-760
gctccgctcccagagacccaggagttgggcccagcgtccctcccggaacgaagagacggggtttcaccatgctggccaggctggtttcgaactcctgaccttgtgatccgcctgccttggcctcccaaagtgctgggattacagacgtgagccactgcgcctggcccaacctatgacattttacacttgcatggcagcatgatcccagtggccgagttcaagcagttcacggaacagcagcctgcgttcaaggtgctcaaaccctggtgggacgtgctggccgagtacctcaccgtggccatgctcatgattggggtctttggctgcaccctccaggtgacacaggacaagatcatctgtctacccaatcatgagctccaggagaacttatcagaggccccgtgccagcaattgctgcctcgggggatccctgagcagattggggccctgcaggaggttaaaggccttaagaacaatttggacctgcagcaatacagctttattaaccagctgtgttatgagacggccctgcactggtatgccaagtacttcccttacctcgtggtcattcacacactcatcttcatggtctgcaccagtttctggttcaagttccctggcaccagctccaagattgaacacttcatctccatcctgggcaagtgtttcgactctccatggaccaccagggccctatccgaggtctccggggagaaccagaagggcccagcagccaccgaacgggctgcggccaccatag

SEQ ID NO: 148218 - DNA, 881 bp, Homo sapiens
  Payload ID: 9343
  Gene Symbol: LRRC8E
  Gene Name: leucine rich repeat containing 8 family, member E
  ENST ID: ENST00000599367
  CDS Start-End: 471-881
gagccttggaacgctttcaggcctggtggcggtgggagccggggctggcccagacgctgagtgtctgcagtcagggagcatcgaggcagatgttttcaggccttggtgtcaggggtgggagagggatgcctcgttttggggagggggccacccgaggaggctggagggcggcggccctgtggactatccctcatgtgctcttcgaggtcagacaagtcagatcaggtgcaggggtgcccagaggggaacagtggccgcttggttctgggcaggtggtgacgtctgcatggagggtgactaaggccaggctaagagggaagtgggggcacacactttggtggtttggacaagtttgggcagggagggtcacaggcctgcctgtgtccggctcctcggaggaccccctgcagagcctcccatcctgagggtctctctctacaccccccgtctcgtcccgtcccacaggcagcatgatcccagtggccgagttcaagcagttcacggaacagcagcctgcgttcaaggtgctcaaaccctggtgggacgtgctggccgagtacctcaccgtggccatgctcatgattggggtctttggctgcaccctccaggtgacacaggacaagatcatctgtctacccaatcatgagctccaggagaacttatcagaggccccgtgccagcaattgctgcctcgggggatccctgagcagattggggccctgcaggaggttaaaggccttaagaacaatttggacctgcagcaatacagctttattaaccagctgtgttatgagacggccctgcactggtatgccaagtacttcccttacctcgtggtcattcacacactcatcttcatggtctgcaccagtttctggttc

SEQ ID NO: 148219 - DNA, 555 bp, Homo sapiens
  Payload ID: 9343
  Gene Symbol: LRRC8E
  Gene Name: leucine rich repeat containing 8 family, member E
  ENST ID: ENST00000593511
  CDS Start-End: 270-555
agattgcagtggcacgatctcagctcaccacaacctccgcttcccgggttcaagcgattctcctgcctagctgggactacaggttcatgccaccatgcccggctaatttttgtatttttagaagagacggggtttcaccatgctggccaggctggtttcgaactcctgaccttgtgatccgcctgccttggcctcccaaagtgctgggattacagacgtgagccactgcgcctggcccaacctatgacattttacacttgcatggcagcatgatcccagtggccgagttcaagcagttcacggaacagcagcctgcgttcaaggtgctcaaaccctggtgggacgtgctggccgagtacctcaccgtggccatgctcatgattggggtctttggctgcaccctccaggtgacacaggacaagatcatctgtctacccaatcatgagctccaggagaacttatcagaggccccgtgccagcaattgctgcctcgggggatccctgagcagattggggccctgcaggaggttaaaggccttaagaacaatttggacc

SEQ ID NO: 148220 - DNA, 531 bp, Homo sapiens
  Payload ID: 9343
  Gene Symbol: LRRC8E
  Gene Name: leucine rich repeat containing 8 family, member E
  ENST ID: ENST00000600345
  CDS Start-End: 311-531
gagtcgcggcagctccgctcccagagacccaggagttgggcccagcgtccctcccggaacggtgacacaggacaagatcatctgtctacccaatcatgagctccaggagaacttatcagaggccccgtgccagcaattgctgcctcgggggatccctgagcagattggggccctgcaggaggttaaaggccttaagaacaatttggacctgcagcaatacagctttattaaccagctgtgttatgagacggccctgcactggtatgccaagtacttcccttacctcgtggtcattcacacactcatcttcatggtctgcaccagtttctggttcaagttccctggcaccagctccaagattgaacacttcatctccatcctgggcaagtgtttcgactctccatggaccaccagggccctatccgaggtctccggggagaaccagaagggcccagcagccaccgaacgggctgcggccaccatagtggccatggcagggaccgggccggggaaggcaggggagggtgagaa

SEQ ID NO: 148221 - DNA, 3743 bp, Homo sapiens
  Payload ID: 9343
  Gene Symbol: LRRC8E
  Gene Name: leucine rich repeat containing 8 family, member E
  Uniprot ID: Q6NSJ5
  ENST ID: ENST00000618098
  CDS Start-End: 245-2635
gactcaccctcgcggcccgcccgggaactctgcgggagtcgcggcagctccgctcccagagacccaggagttgggcccagcgtccctcccggaacgaagagacggggtttcaccatgctggccaggctggtttcgaactcctgaccttgtgatccgcctgccttggcctcccaaagtgctgggattacagacgtgagccactgcgcctggcccaacctatgacattttacacttgcatggcagcatgatcccagtggccgagttcaagcagttcacggaacagcagcctgcgttcaaggtgctcaaaccctggtgggacgtgctggccgagtacctcaccgtggccatgctcatgattggggtctttggctgcaccctccaggtgacacaggacaagatcatctgtctacccaatcatgagctccaggagaacttatcagaggccccgtgccagcaattgctgcctcgggggatccctgagcagattggggccctgcaggaggttaaaggccttaagaacaatttggacctgcagcaatacagctttattaaccagctgtgttatgagacggccctgcactggtatgccaagtacttcccttacctcgtggtcattcacacactcatcttcatggtctgcaccagtttctggttcaagttccctggcaccagctccaagattgaacacttcatctccatcctgggcaagtgtttcgactctccatggaccaccagggccctatccgaggtctccggggagaaccagaagggcccagcagccaccgaacgggctgcggccaccatagtggccatggcagggaccgggccggggaaggcaggggagggtgagaaggagaaagtgctggcggaaccggagaaggtggtgaccgagcctccagttgtcaccctgttggacaagaaggagggtgagcaagccaaagccctgtttgagaaggtgaagaagttccgcatgcacgtggaagagggcgacatcctgtacaccatgtacatccgacagacggtgctgaaagtgtgtaagttcctggccatcctggtctacaacctggtctatgtggagaagatcagtttcctggtggcctgtagggtggagacgtcagaggtcacgggctacgccagcttctgctgcaaccacaccaaggcccacctcttctccaagctggccttctgttacatctcctttgtgtgcatctacggacttacctgcatctacacgctctactggctcttccaccggcccctcaaggagtactccttccgttccgtgcgggaggagactggcatgggggacattcctgacgtcaagaatgacttcgccttcatgctgcacctcatcgatcagtacgactccctctactccaagcgcttcgccgtcttcctgtccgaggtcagcgaaagccgtctaaagcagctcaatctcaaccacgagtggacgcccgagaagcttcgacagaagctgcagcgcaatgccgcgggccggctggagctggccctctgcatgctgccgggtctgcccgacaccgtctttgagctcagtgaggtggagtcactcaggctggaggccatctgcgatatcaccttccccccggggctgtcacagctggtgcacttgcaggagctcagcttgctccactcgcccgccaggctacccttctccttgcaggtcttcctgcgggaccacctgaaggtgatgcgcgtcaaatgcgaggagctccgcgaggtgccgctttgggtgtttgggctgcggggcttggaggagctgcacctggaggggcttttcccccaggagctagctcgggcagccaccctggagagcctccgggagctgaagcagctcaaggtgttgtccctccggagcaacgccgggaaggtgccagccagtgtgaccgacgttgctggccacctgcagaggctcagcctgcacaacgatggggcccgtctggttgccctgaacagcctcaagaagctggcggcattgcgggagctggagctggtggcctgcgggctggagcgcatcccccatgcagtgttcagcctgggtgcgctgcaggaacttgacctcaaggacaaccacctgcgctccatcgaggaaatcctcagcttccagcactgccggaagctggtcacgctcaggctgtggcacaaccagatcgcctacgtccctgagcacgtgcggaagctcaggagcctggagcagctctacctcagctacaacaagctggagaccctgccctcccagctcggcctgtgctcaggcctccgtctgctggatgtgtcccacaatgggctacactccctgccacccgaggtgggcctcctgcagaacctacagcacctggccctctcctacaatgccctggaggccctgcccgaagagctcttcttctgccgcaagctgcggacgttgcttctgggcgacaaccagctgagccagctctcgccccacgtgggtgccctcagagccctcagccgcctggagctcaaaggcaaccgcttagaggcgctgccagaagaacttggcaactgtggggggctcaagaaggcggggctcctggtggaagacacgctttaccagggtctgccggcagaagtgcgggacaagatggaggaggaatgaagctggggtggggccgttttaggtagagccttaaaaatgcttctgccctggaatctcaaccattgtcttccaagataggaagccaagtgggtccaggccaggagatggggggggcgggggcagctgtgtcatctttctggggcccaggaggatctgggctggtttgtctggggagacagacaggatgttgtggagctggggtggaacctggtatggagggattaactcagtcatggcattctccgaccaaaaccacacctgtgtctctggcaggctggctggccttgctcccatccctagaactgctgcctctccctggatattccagctcaattagtgccacatatgggggaaacgacacatcccagtgggatttccaacactccccctccccatgcaacaaagcaacttacttctggagttctctcccaaggagaggacacagacacagttgtttgctgtgttatatgttagctccgaacaatggttctcatttggctaagcatcaaaatcacctagggagtcggtgcaaaacaaaatatcccagtcccctcccctgaaacactgactcaggaggtttggttgggggccaggagtctgttcctaaatattccaggtagttctggtgcaggtaagtggccctgagacagtatgttgggaaatgctgacgtaaaggtatcagggccgggcgctgtggctcatgactataatcccagctgtttgagaggccaatgcaggaggatggttgagctcaggagttcgagatcagcctgggtaacatagcgagaccccacctctgccaaaaaaaaaaaaaatagggtatccaaatatctagattctgatcccttttgaggtcctagaccctttgagaaactgatgaagccaggcacctccttcctcaggaaaatgctggtgtacaaatacacacaaagctcttcaggcagctgatagatttcccccagagagctattcaaggacttcctaaggtgggtggactgcagggttaggacacctgctatagaggtgacatttttccaaggacaagcagggactttggtcttgactgttctctgggtgcttaataaataatactaattatgcaagttct

SEQ ID NO: 148222 - DNA, 4717 bp, Homo sapiens
  Payload ID: 9344
  Gene Symbol: LRRC9
  Gene Name: leucine rich repeat containing 9
  Uniprot ID: Q6ZRR7
  ENST ID: ENST00000445360
  CDS Start-End: 205-4566
atcacagggccatgccctcggggctcaaggccagagaggctccgcgcttccaggacccgagagctaaagataatgaatgggagagagcgagactggaggaggtaacgaataagtccccaccaccttgcccataacgcgttgctttcagtcacgttccgcgaactggcgaagttataatattatgatcactgtttttaatggaagatgattgaaagtgaaaacctaaaccaagaagaaataattaaagaactgtgtttgtgcaatggcttatcttatgagatggttggacaagaaggatcagatacatcaaagttggagatgtttttcttagggtatcctcgtatagttggattatcattatttcctaatttaacgagtcttaccattgttgctcaagatataaaagaaatttcagggttagagccttgtttacaacttaaagaactttggattgctgagtgctgcatagagaaaattgaaggtcttcaagaatgtagaaatttggaaaaactatatttatattttaataaaatttccaaaatagaaaatttagagaaattaatcaaattgaaggttctttggctgaaccacaatacaattaaaaatattgagggtttgcaaactttgaagaatttaaaagatctcaaccttgctggaaatctaataaatagcattggtcgatgtcttgactccaatgaacaactggaaagattaaacctttctggtaaccaaatatgttctttcaaggaactcacgaacttaaccaggctgccttgcttaaaggatttatgtctgaatgaccctcaatatacaaccaatccagtttgtcttctgtgtaattattccacacatgtattatatcatttgccttgccttcaaagatttgacacattggatgtgtcagcaaagcaaatcaaggaactggcagataccacagcaatgaaaaaaataatgtattataatatgcgtataaaaactcttcagaggcatcttaaagaagaccttgaaaaactgaatgatcaaaaatgcaaattacaaaagttgccagaagaacgagtaaaattattcagctttgtgaagaaaactttggaacgagaactggctgaactcaagggctcgggcaaagggcacagtgatggatccaataacagtaaagtaactgatcctgaaacactgaagagttgtgaaactgtcactgaagaaccaagtcttcaacagaagatattggccaaactaaatgccttgaatgaaagggtaacattctggaacaaaaaactagatgaaattgaagcaatttatcatattgaagtaaaacaaaagaagaaaagtcatggcttattgatcccacttttgttaattgagttagagactgtgggaaatttccattttgaagaaggcactcgatctgatgactggtttaatttctgctatgaattaattctgtcacgtttttgtgcctgggacttcagaacatacggtattacaggagtaaaagtaaaacgcatcattaaagttaacaaccgtattctgagactaaaattcgaagagaaatttcaaaagtttttggagaatgaagatatgcatgattcagagagctaccgaaggatgctggaatgccttttttatgtttttgatcctgaagtttcagtgaagaaaaagcatcttctacaaatacttgaaaaaggattcaaagacagtgaaacaagcaagctgcctctcaaaaaagaagccatcattgtttctaacagtctaagtataagtgagtgtcccagaattgaatttttacagcaaaagcacaaagatgagaagaaaatctctcttaagcatgagctcttcagacatggcatcctcctcattacaaaagttttccttggccagagtgttcaggcccatgaaaaagaatccatcagtcaatccaactatccaatggttaattcagtgttcattcctcggaaatatttactaaattctgtcatgggacaaagaaactgtgattgcagtgttcggcagtgcaagtggtttgtctttgatcatgaccttgttttgccggaatatgttgttgaatttgagtatattacaatggtcaaggcaccctctttattttctgtattcaacaatgttattctagaagaaagcaaaaaaaacccagaagtatcagtattttccaaggatttgaaatttgatgatgaagttataaaaatggagcccagaatcaaggcccgaccaaaactgattagtttggatgataaaacaatactttcccttgcaaagactagcgtttacagtcatattgtgagtctgaatctacatggaaacagcttgagtaaattgagagatctctccaagttaacaggacttcgaaaactaaacattagctttaatgaatttacctgtttagatgatgtataccacttgtataaccttgaatatttggatgcaagccataaccatgtgataacccttgagggatttagaggtctgatgaaactgaagcacttagacttgagctggaatcaactgaaaaaatctggcaatgaaataaatatgttatgcaaacacaccacaagccttctcactcttgatattcaacataatccatggcaaaagccagccacattgaggctgagtgttattggcagattaaagactcttacccatttaaatggagtcttcatttctgaagaagaagcaacagcagctatgaaatttattgcaggaacaaggattactcagttatctctcttacggcattctagtactaaagaggagagaccacggatacttagtatatggccttctgccaaaattctgacgcaggtttcaaagttaggacctcatttacatctgagtggaaactgctacttgaagataactgccttaaatttagatggacaacatctttttgaaatcacaaatttagaaaaattggaaaatttgaaatgggcatcattcagcaataataatctcactaaaatggagggtctggaatcctgtattaacttggaagagctcacattagatggaaactgcatctcaaagatagaaggtatttccaagatgactaaattaactcgcctcagcataaataataatcttctcactggttgggaagagcatacctttgataacatgcttcatcttcactcgctttctcttgagaacaacagaatcacttcattgagtggtttacaaaaatcttttactcttgttgagttatacataagcaataactatattgctgtcaatcaggagatgcacaatttaaagggtttatgcaacttggtcattctagacatgtgtgggaacatcattatatggaatcaagaaaactaccggttgtttgtaatatttcatcttccagaactgaaagctttggatgggataccaattgaaccatcagagactgacagtgcaaaagatttgtttggtggtagacttacttctgacatgattgcagaacgacaaggacattccaacttcaaacaaatgcaagaactaaattggacttcatcatctattagaacagtggatttgattccagtcgaccaatttagaaatgtgtgtaatgtgaatctacagaacaatcatcttacctcattcagtggattaatctatctacctaatgtgaaggtcttatgccttaactataatcatattgaatcaatcatgcccagactaaagcctcagactcacttaaccagtagacaactactgtaccagaaagtgccttcaagtggctatggacagcaaggaatttcaaaaacaaacagagatataatgagcagtgaaaatttgcctccaataatgcacagtttagaagttcttcatttgggctacaatggaatttgtaatttgatccagctacaacttaacagactaagaaatttaaaattcctctttctacagggtaatgaaatcagccaagttgaagggcttgacaacttagtagtccttcaagaattggtagtggaccataaccgcatccgatcatttaatgacagtgcttttgccaaaccaagttctttattggcacttcacttggaggaaaacagactacgagaactgggcaaattacaatctttggtaaaactagagaaactcttcctaggatataataaaatccaggatatcacagaactggaaaaacttgacgttatctctactctcagggagcttacagtgtatggcaatccaatttgtagaaaaatgctacatcgccacatgcttatatttcgactgcctaacttacagatgttagatggaagtcctgtgaattcagatgatagggcaaaagctgaatttcacctcgctgaactacaagcaaagaaaaactcgcttattcctgttacccactctcctatggatggcagatcatttggccaagtgaaaactcctcccatagagataacaaatgtacttctgcctagtggattcagccattacttgggatctgacgtcactttaactcctgaagttgaagaatttttgggagcaactttccaagatcaaatcgaatgtaactgcctaaagagaaatgagcatacaccaagaaactcacctgtttagtagttgtacaaaaactagcggacagtggtcagttaaaaaaaaaaaaaaaagataatcatgttacttaagttactgaagcacttcagttccatatgaagataatctattacccttcatgaacttgatttaatatcacctctcttaaactttc

SEQ ID NO: 148223 - DNA, 4915 bp, Homo sapiens
  Payload ID: 9344
  Gene Symbol: LRRC9
  Gene Name: leucine rich repeat containing 9
  Uniprot ID: Q6ZRR7
  ENST ID: ENST00000254271
  CDS Start-End: 205-3540
atcacagggccatgccctcggggctcaaggccagagaggctccgcgcttccaggacccgagagctaaagataatgaatgggagagagcgagactggaggaggtaacgaataagtccccaccaccttgcccataacgcgttgctttcagtcacgttccgcgaactggcgaagttataatattatgatcactgtttttaatggaagatgattgaaagtgaaaacctaaaccaagaagaaataattaaagaactgtgtttgtgcaatggcttatcttatgagatggttggacaagaaggatcagatacatcaaagttggagatgtttttcttagggtatcctcgtatagttggattatcattatttcctaatttaacgagtcttaccattgttgctcaagatataaaagaaatttcagggttagagccttgtttacaacttaaagaactttggattgctgagtgctgcatagagaaaattgaaggtcttcaagaatgtagaaatttggaaaaactatatttatattttaataaaatttccaaaatagaaaatttagagaaattaatcaaattgaaggttctttggctgaaccacaatacaattaaaaatattgagggtttgcaaactttgaagaatttaaaagatctcaaccttgctggaaatctaataaatagcattggtcgatgtcttgactccaatgaacaactggaaagattaaacctttctggtaaccaaatatgttctttcaaggaactcacgaacttaaccaggctgccttgcttaaaggatttatgtctgaatgaccctcaatatacaaccaatccagtttgtcttctgtgtaattattccacacatgtattatatcatttgccttgccttcaaagatttgacacattggatgtgtcagcaaagcaaatcaaggaactggcagataccacagcaatgaaaaaaataatgtattataatatgcgtataaaaactcttcagaggcatcttaaagaagaccttgaaaaactgaatgatcaaaaatgcaaattacaaaagttgccagaagaacgagtaaaattattcagctttgtgaagaaaactttggaacgagaactggctgaactcaagggctcgggcaaagggcacagtgatggatccaataacagtaaagtaactgatcctgaaacactgaagagttgtgaaactgtcactgaagaaccaagtcttcaacagaagatattggccaaactaaatgccttgaatgaaagggtaacattctggaacaaaaaactagatgaaattgaagcaatttatcatattgaagtaaaacaaaagaagaaaagtcatggcttattgatcccacttttgttaattgagttagagactgtgggaaatttccattttgaagaaggcactcgatctgatgactggtttaatttctgctatgaattaattctgtcacgtttttgtgcctgggacttcagaacatacggtattacaggagtaaaagtaaaacgcatcattaaagttaacaaccgtattctgagactaaaattcgaagagaaatttcaaaagtttttggagaatgaagatatgcatgattcagagagctaccgaaggatgctggaatgccttttttatgtttttgatcctgaagtttcagtgaagaaaaagcatcttctacaaatacttgaaaaaggattcaaagacagtgaaacaagcaagctgcctctcaaaaaagaagccatcattgtttctaacagtctaagtataagtgagtgtcccagaattgaatttttacagcaaaagcacaaagatgagaagaaaatctctcttaagcatgagctcttcagacatggcatcctcctcattacaaaagttttccttggccagagtgttcaggcccatgaaaaagaatccatcagtcaatccaactatccaatggttaattcagtgttcattcctcggaaatatttactaaattctgtcatgggacaaagaaactgtgattgcagtgttcggcagtgcaagtggtttgtctttgatcatgaccttgttttgccggaatatgttgttgaatttgagtatattacaatggtcaaggcaccctctttattttctgtattcaacaatgttattctagaagaaagcaaaaaaaacccagaagtatcagtattttccaaggatttgaaatttgatgatgaagttataaaaatggagcccagaatcaaggcccgaccaaaactgattagtttggatgataaaacaatactttcccttgcaaagactagcgtttacagtcatattgtgagtctgaatctacatggaaacagcttgagtaaattgagagatctctccaagttaacaggacttcgaaaactaaacattagctttaatgaatttacctgtttagatgatgtataccacttgtataaccttgaatatttggatgcaagccataaccatgtgataacccttgagggatttagaggtctgatgaaactgaagcacttagacttgagctggaatcaactgaaaaaatctggcaatgaaataaatatgttatgcaaacacaccacaagccttctcactcttgatattcaacataatccatggcaaaagccagccacattgaggctgagtgttattggcagattaaagactcttacccatttaaatggagtcttcatttctgaagaagaagcaacagcagctatgaaatttattgcaggaacaaggattactcagttatctctcttacggcattctagtactaaagaggagagaccacggatacttagtatatggccttctgccaaaattctgacgcaggtttcaaagttaggacctcatttacatctgagtggaaactgctacttgaagataactgccttaaatttagatggacaacatctttttgaaatcacaaatttagaaaaattggaaaatttgaaatgggcatcattcagcaataataatctcactaaaatggagggtctggaatcctgtattaacttggaagagctcacattagatggaaactgcatctcaaagatagaaggtatttccaagatgactaaattaactcgcctcagcataaataataatcttctcactggttgggaagagcatacctttgataacatgcttcatcttcactcgctttctcttgagaacaacagaatcacttcattgagtggtttacaaaaatcttttactcttgttgagttatacataagcaataactatattgctgtcaatcaggagatgcacaatttaaagggtttatgcaacttggtcattctagacatgtgtgggaacatcattatatggaatcaagaaaactaccggttgtttgtaatatttcatcttccagaactgaaagctttggatgggataccaattgaaccatcagagactgacagtgcaaaagatttgtttggtggtagacttacttctgacatgattgcagaacgacaaggacattccaacttcaaacaaatgcaagaactaaattggacttcatcatctattagctgtatttactttgtctaaattcagaacagtggatttgattccagtcgaccaatttagaaatgtgtgtaatgtgaatctacagaacaatcatcttacctcattcagtggattaatctatctacctaatgtgaaggtcttatgccttaactataatcatattgaatcaatcatgcccagactaaagcctcagactcacttaaccagtagacaactactgtaccagaaagtgccttcaagtggctatggacagcaaggaatttcaaaaacaaacagagatataatgagcagtgaaaatttgcctccaataatgcacagtttagaagttcttcatttgggctacaatggaatttgtaatttgatccagctacaacttaacagactaagaaatttaaaattcctctttctacagggtaatgaaatcagccaagttgaagggcttgacaacttagtagtccttcaagaattggtagtggaccataaccgcatccgatcatttaatgacagtgcttttgccaaaccaagttctttattggcacttcacttggaggaaaacagactacgagaactgggcaaattacaatctttggtaaaactagagaaactcttcctaggatataataaaatccaggatatcacagaactggaaaaacttgacgttatctctactctcagggagcttacagtgtatggcaatccagtgaatttgtagaaaaatgctacatcgccacatgcttatatttcgactgcctaacttacagatgttagatggaagtcctgtgaattcagatgatagggcaaaagctgaatttcacctcgctgaactacaagcaaagaaaaactcgcttattcctgttacccactctcctatggatggcagatcatttggccaagtgaaaactcctcccatagagataacaaatgtacttctgcctagtggattcagccattacttgggatctgacgtcactttaactcctgaagttgaagacaaaaaaaacaagaatgctgggattctgacaaataatcctcggagcatccatgcagaaatagcttttcggcaactcagagggataagtatctctccatctcttttatcacatcagaatattgcatctcctactgcacaaatataccagagcaaccaagataagagaagaatttttgggagcaactttccaagatcaaatcgaatgtaactgcctaaagagaaatgagcatacaccaagaaactcacctgtttagtagttgtacaaaaactagcggacagtggtcagttaaaaaaaaaaaaaaaagataatcatgttacttaagttactgaagcacttcagttccatatgaagataatctattacccttcatgaacttgatttaatatcacctctcttaaactttc

SEQ ID NO: 148224 - DNA, 799 bp, Homo sapiens
  Payload ID: 9344
  Gene Symbol: LRRC9
  Gene Name: leucine rich repeat containing 9
  ENST ID: ENST00000568404
  CDS Start-End: 1-337
tttggtaaaactagagaaactcttcctaggatataataaaatccaggatatcacagaactggaaaaacttgacgttatctctactctcagggagcttacagtgtatggcaatccaatttgtagaaaaatgctacatcgccacatgcttatatttcgactgcctaacttacagatgttagatggaagtcctgtgaattcagatgatagggcaaaagctgaatttcacctcgctgaactacaagcaaagaaaaactcgagaagtaacattattagaatgctgtggtttgagaaaaaaagaggctggagggagaagggaaaccagctcagaggcttttagaataatccaagagagatgttatgaagacctggaccacggtagagaatataaatgaatctttgatcttattcctgttacccactctcctatggatggcagatcatttggccaagtgaaaactcctcccatagagataacaaatgtacttctgcctagtggattcagccattacttgggatctgacgtcactttaactcctgaagttgaagacaaaaaaaacaagaatgctgggattctgacaaataatcctcggagcatccatgcagaaatagcttttcggcaactcagagggataagtatctctccatctcttttatcacatcagaatattgcatctcctactgcacaaatataccagagcaaccaagataagagaagaatttttgggagcaactttccaagatcaaatcgaatgtaactgcctaaagagaaatgagcatacaccaagaaactcacctgttt

SEQ ID NO: 148225 - DNA, 500 bp, Homo sapiens
  Payload ID: 9344
  Gene Symbol: LRRC9
  Gene Name: leucine rich repeat containing 9
  ENST ID: ENST00000570145
  CDS Start-End: 159-500
gtacacaccaggcctggggcgggagagggtttcctaccttctgctgcaagacagggattgggaaatcggagtggactcggacttgaatcggattgccccggaatccaccctctctctgtgataagttataatattatgatcactgtttttaatggaagatgattgaaagtgaaaacctaaaccaagaagaaataattaaagaactgtgtttgtgcaatggcttatcttatgagatggttggacaagaaggatcagatacatcaaagttggagatgtttttcttagggtatcctcgtatagttggattatcattatttcctaatttaacgagtcttaccattgttgctcaagatataaaagaaatttcagggttagagccttgtttacaacttaaagaactttggattgctgagtgctgcatagagaaaattgaaggtcttcaagaatgtagaaatttggaaaaactatatttatattttaataaaatttccaaaatagaa

SEQ ID NO: 148226 - DNA, 3823 bp, Homo sapiens
  Payload ID: 9345
  Gene Symbol: LRRN1
  Gene Name: leucine rich repeat neuronal 1
  Uniprot ID: Q6UXK5
  ENST ID: ENST00000319331
  CDS Start-End: 762-2912
aaagcggggcgcaccgcgggcgccggcaacgagccggtgaacgaggcgaggcccgtgcgcccgcggctgcaagcgcccgcctggcggggagaggggccgacggcgtcagcccgggcggcggcatccctaggcgcctggggcgccttcctccggacctggccgctcgctgccccgccctctgcaccccacttctccgaccctccttcccagtcctgcctccccctgccctggcctctgagagccgactgagcccagccccgtgcagcagcggttgcctgtgtcgccgcctagtctccggtcttggtgctctcccgggggtgccccaaggagccagtgcgcgctgcgggctgggaaggaggcgccgctcagctagtcctcctcctcctcctcgtctttctcctcctcctgctgctgctgccgccgccgccgccgtgggtgccgggtccgcgcgcaccccaacacccccaccagctgggcctcggggcacatctccagacttcaatttggctgaaataattcatgccacggacctgtgcacatgcctggaattgagagacacagttaaaagactccaagttgctttctgccttttgaaaactcctgaaaaccatccctttggactctggaattctacacagctcaaccaagactttgcttgaatgtttacattttctgctcgctgtcctacatatcacaatatagtgttcacgttttgttaaaactttggggtgtcaggagttgagcttgctcagcaagccagcatggctaggatgagctttgttatagcagcttgccaattggtgctgggcctactaatgacttcattaaccgagtcttccatacagaatagtgagtgtccacaactttgcgtatgtgaaattcgtccctggtttaccccacagtcaacttacagagaagccaccactgttgattgcaatgacctccgcttaacaaggattcccagtaacctctctagtgacacacaagtgcttctcttacagagcaataacatcgcaaagactgtggatgagctgcagcagcttttcaacttgactgaactagatttctcccaaaacaactttactaacattaaggaggtcgggctggcaaacctaacccagctcacaacgctgcatttggaggaaaatcagattaccgagatgactgattactgtctacaagacctcagcaaccttcaagaactctacatcaaccacaaccaaattagcactatttctgctcatgcttttgcaggcttaaaaaatctattaaggctccacctgaactccaacaaattgaaagttattgatagtcgctggtttgattctacacccaacctggaaattctcatgatcggagaaaaccctgtgattggaattctggatatgaacttcaaacccctcgcaaatttgagaagcttagttttggcaggaatgtatctcactgatattcctggaaatgctttggtgggtctggatagccttgagagcctgtctttttatgataacaaactggttaaagtccctcaacttgccctgcaaaaagttccaaatttgaaattcttagacctcaacaaaaaccccattcacaaaatccaagaaggggacttcaaaaatatgcttcggttaaaagaactgggaatcaacaatatgggcgagctcgtttctgtcgaccgctatgccctggataacttgcctgaactcacaaagctggaagccaccaataaccctaaactctcttacatccaccgcttggctttccgaagtgtccctgctctggaaagcttgatgctgaacaacaatgccttgaatgccatttaccaaaagacagtcgaatccctccccaatctgcgtgagatcagtatccatagcaatcccctcaggtgtgactgtgtgatccactggattaactccaacaaaaccaacatccgcttcatggagcccctgtccatgttctgtgccatgccgcccgaatataaagggcaccaggtgaaggaagttttaatccaggattcgagtgaacagtgcctcccaatgatatctcacgacagcttcccaaatcgtttaaacgtggatatcggcacgacggttttcctagactgtcgagccatggctgagccagaacctgaaatttactgggtcactcccattggaaataagataactgtggaaaccctttcagataaatacaagctaagtagcgaaggtaccttggaaatatctaacatacaaattgaagactcaggaagatacacatgtgttgcccagaatgtccaaggggcagacactcgggtggcaacaattaaggttaatgggacccttctggatggtacccaggtgctaaaaatatacgtcaagcagacagaatcccattccatcttagtgtcctggaaagttaattccaatgtcatgacgtcaaacttaaaatggtcgtctgccaccatgaagattgataaccctcacataacatatactgccagggtcccagtcgatgtccatgaatacaacctaacgcatctgcagccttccacagattatgaagtgtgtctcacagtgtccaatattcatcagcagactcaaaagtcatgcgtaaatgtcacaaccaaaaatgccgccttcgcagtggacatctctgatcaagaaaccagtacagcccttgctgcagtaatggggtctatgtttgccgtcattagccttgcgtccattgctgtgtactttgccaaaagatttaagagaaaaaactaccaccactcattaaaaaagtatatgcaaaaaacctcttcaatcccactaaatgagctgtacccaccactcattaacctctgggaaggtgacagcgagaaagacaaagatggttctgcagacaccaagccaacccaggtcgacacatccagaagctattacatgtggtaactcagaggatattttgcttctggtagtaaggagcacaaagacgtttttgctttattctgcaaaagtgaacaagttgaagacttttgtatttttgactttgctagtttgtggcagagtggagaggacgggtggatatttcaaatttttttagtatagcgtatcgcaagggtttgacacggctgccagcgactctaggcttccagtctgtgtttggtttttattcttatcattattatgattgttattatattattattttattttagttgttgtgctaaactcaataatgctgttctaactacagtgctcaataaaatgattaatgacaggatggggttcccctgtgcttttaccagtagcatgaccccttctgaagccatccgtagaaagtactttgtcctccaaaaagctaacatacggttttgaagcagcattgaaacttttgtagcaatctggtctatagacttttaactcaagaagctaaggctagacttgttaccttcgttgaatgatgttagttgactgtactgtaatgttgtatcaactgaattgaatgtttgcctttaaacaatgaattttctttttctttccttttttttttttttgttgtaatagttaaagaggcttagaacaagctaacaggcaatagaaatatgtatatcagattttttaatgtaacaaactacatgttaattgttatcttattctttttatctttagtagacacttttaaaagaaaagacaagtttgttgtgtttaactcaccaacacgtggtgtataatgaagacagaactataataaattagttttgttctgattttttagaacacttgcaataatgtatcatttatagttcttgctagttgcagtggtaatatttttcacatccataaaaacaactaccaaaata

SEQ ID NO: 148227 - DNA, 5036 bp, Homo sapiens
  Payload ID: 9346
  Gene Symbol: LRRN2
  Gene Name: leucine rich repeat neuronal 2
  Uniprot ID: O75325
  ENST ID: ENST00000367175
  CDS Start-End: 2214-4355
gaacaggcacagggcctgcagctgcagcattcagtgcatcccagaccctccagaggcccagggcagggtcagatcagacagacctggcagcacagatgtgaagtgtaaacggcacacagccccctggacttgggttgattcttgtatcttgctgctcaccagctatgtgacttgagccaagttctttaacctcttcaggacctcagtctcttaatctgcaaactggaggtattagtgcttatctcatgtacctgttatgagagtcatatgaaaaaagacattcagagtcttcaaagagtcctgagcaatggtaggtgctcagtaagtgtttgtgcatttccttgacacttgtagctaaaaacttacctggaatcagacttccactcaggagtcagaccaggctcaagaaggcaacacagtctggcccctttttgtttccatctttggttctaggccaaggctggacttgcctcatggccctggcatctgagagagaaactggataggttcctcatgctcaggatggaggaaacagcagtggcttgcattgttgattgcaggggtgatgtctaatctcctgaagaaaggaactctggagtcacagagattgattcatacaatcaacacacactgggcacccatcccgtactacaggcacaagaggcaagacaggtctctagttagagacgttttcccacggtgtggtcagaactgtgacagtaggaagcatgagtactgcaagagcataaagccagccccttagtcagccaggtggggaggttttggagaagacttctgcaggtggtgactgaacttaaagttgagcgttgaagaacaagtaggagttgtctggaagacaatgaggaggagacatcagaaggggtggcatgtcacggtaacctcaacccaaaaggtttgtgtgcagcgggtaagtggggtggtgacaagagaagccaggtgaaggggccgggccaggtcacagaaggtcttacctgcacagctgaggagctcagacccaggcttcttaactccactgcctcctcctgggcaacactgccaggctgttgggaaaggagaaacactcctgcctccagggtggggaagttggcaaacaccaaagcaatatccccacccagaagatcctgggcagcagaacaccccagcctgcctggatgtgtcaggtctgctgcctttcacctctagggtcctggggagcccatcccagattttagaagctgtacttatttccaccaaccctcacccacctcccacctacactgccagaggaacttctggaaacttatcattttatcttccatttacccagtgagccaaggaggctgggaggaaagaggtaagaaaggttagagaacctacctcacatctctctgggctcagaaggactctgaagataacaataatttcagcccatccactctccttccctcccaaacacacatgtgcatgtacacacacacatacacacacatacaccttcctctccttcactgaagactcacagtcactcactctgtgagcaggtcatagaaaaggacactaaagccttaaggacaggcctggccattacctctgcagctcctttggcttgttgagtcaaaaaacatgggaggggccaggcacggtgactcacacctgtaatcccagcattttgggagaccgaggtgagcagatcacttgaggtcaggagttcgagaccagcctggccaacatggagaaacccccatctctactaaaaatacaaaaattagccaggagtggtggcaggtgcctgtaatcccagctactcaggtggctgagccaggagaatcgcttgaatccaggaggcggaggatgcagtcagctgagtgcaccgctgcactccagcctgggtgacagaatgagactctgtctcaaacaaacaaacacgggaggaggggtagatactgcttctctgcaacctccttaactctgcatcctcttcttccagggctgcccctgatggggcctggcaatgactgagcaggcccagccccagaggacaaggaagagaaggcatattgaggagggcaagaagtgacgcccggtgtagaatgactgccctgggagggtggttccttgggccctggcagggttgctgacccttaccctgcaaaacacaaagagcaggactccagactcttcttgtgaatggtcccctgccctgcagctccaccatgaggcttctcgtggccccactcttgctagcttgggtggctggtgccactgccgctgtgcccgtggtaccctggcatgttccctgcccccctcagtgtgcctgccagatccggccctggtatacgccccgctcgtcctaccgcgaggctaccactgtggactgcaatgacctattcctgacggcagtccccccggcactccccgcaggcacacagaccctgctcctgcagagcaacagcattgtccgtgtggaccagagtgagctgggctacctggccaatctcacagagctggacctgtcccagaacagcttttcggatgcccgagactgtgatttccatgccctgccccagctgctgagcctgcacctagaggagaaccagctgacccggctggaggaccacagctttgcagggctggccagcctacaggaactctatctcaaccacaaccagctctaccgcatcgcccccagggccttttctggcctcagcaacttgctgcggctgcacctcaactccaacctcctgagggccattgacagccgctggtttgaaatgctgcccaacttggagatactcatgattggcggcaacaaggtagatgccatcctggacatgaacttccggcccctggccaacctgcgtagcctggtgctagcaggcatgaacctgcgggagatctccgactatgccctggaggggctgcaaagcctggagagcctctccttctatgacaaccagctggcccgggtgcccaggcgggcactggaacaggtgcccgggctcaagttcctagacctcaacaagaacccgctccagcgggtagggccgggggactttgccaacatgctgcaccttaaggagctgggactgaacaacatggaggagctggtctccatcgacaagtttgccctggtgaacctccccgagctgaccaagctggacatcaccaataacccacggctgtccttcatccacccccgcgccttccaccacctgccccagatggagaccctcatgctcaacaacaacgctctcagtgccttgcaccagcagacggtggagtccctgcccaacctgcaggaggtaggtctccacggcaaccccatccgctgtgactgtgtcatccgctgggccaatgccacgggcacccgtgtccgcttcatcgagccgcaatccaccctgtgtgcggagcctccggacctccagcgcctcccggtccgtgaggtgcccttccgggagatgacggaccactgtttgcccctcatctccccacgaagcttccccccaagcctccaggtagccagtggagagagcatggtgctgcattgccgggcactggccgaacccgaacccgagatctactgggtcactccagctgggcttcgactgacacctgcccatgcaggcaggaggtaccgggtgtaccccgaggggaccctggagctgcggagggtgacagcagaagaggcagggctatacacctgtgtggcccagaacctggtgggggctgacactaagacggttagtgtggttgtgggccgtgctctcctccagccaggcagggacgaaggacaggggctggagctccgggtgcaggagacccacccctatcacatcctgctatcttgggtcaccccacccaacacagtgtccaccaacctcacctggtccagtgcctcctccctccggggccagggggccacagctctggcccgcctgcctcggggaacccacagctacaacattacccgcctccttcaggccacggagtactgggcctgcctgcaagtggcctttgctgatgcccacacccagttggcttgtgtatgggccaggaccaaagaggccacttcttgccacagagccttaggggaccgtcctgggctcattgccatcctggctctcgctgtccttctcctggcagctgggctagcggcccaccttggcacaggccaacccaggaagggtgtgggtgggaggcggcctctccctccagcctgggctttctggggctggagtgccccttctgtccgggttgtgtctgctcccctcgtcctgccctggaatccagggaggaagctgcccagatcctcagaaggggagacactgttgccaccattgtctcaaaattcttgaagctcagcctgttctcagcagtagagaaatcactaggactactttttaccaaaagagaagcagtctgggccagatgccctgccaggaaagggacatggacccacgtgcttgaggcctggcagctgggccaagacagatggggctttgtggccctgggggtgcttctgcagcctcgaaaaagttgcccttacctcctagggtcacctctgctgccattctgaggaacatctccaaggaacaggagggactttggctagagcctcctgcctccccatcttctctctgcccagaggctcctgggcctggcttggctgtcccctacctgtgtccccgggctgcaccccttcctcttctctttctctgtacagtctcagttgcttgctcttgtgcctcctgggcaagggctgaaggaggccactccatctcacctcggggggctgccctcaatgtgggagtgaccccagccagatctgaaggacatttgggagagggatgcccaggaacgcctcatctcagcagcctgggctcggcattccgaagctgactttctataggcaattttgtacctttgtggagaaatgtgtcacctcccccaacccgattcactcttttctcctgttttgtaaaaaataaaaataaataataacaataatacgggggaaaggaacgaaaggaaaataa

SEQ ID NO: 148228 - DNA, 3211 bp, Homo sapiens
  Payload ID: 9346
  Gene Symbol: LRRN2
  Gene Name: leucine rich repeat neuronal 2
  Uniprot ID: O75325
  ENST ID: ENST00000367176
  CDS Start-End: 389-2530
cagcagacggcagacggtgcccggcgcccacgggaagctgaagatacagcggtaaacaaacctccatgtctcaagctgaccacacttgtatctggacttgccagctgattagctctgttcccaccaggctcgttcaaagacccacagcttgagggggcagagggctgcccctgatggggcctggcaatgactgagcaggcccagccccagaggacaaggaagagaaggcatattgaggagggcaagaagtgacgcccggtgtagaatgactgccctgggagggtggttccttgggccctggcagggttgctgacccttaccctgcaaaacacaaagagcaggactccagactcttcttgtgaatggtcccctgccctgcagctccaccatgaggcttctcgtggccccactcttgctagcttgggtggctggtgccactgccgctgtgcccgtggtaccctggcatgttccctgcccccctcagtgtgcctgccagatccggccctggtatacgccccgctcgtcctaccgcgaggctaccactgtggactgcaatgacctattcctgacggcagtccccccggcactccccgcaggcacacagaccctgctcctgcagagcaacagcattgtccgtgtggaccagagtgagctgggctacctggccaatctcacagagctggacctgtcccagaacagcttttcggatgcccgagactgtgatttccatgccctgccccagctgctgagcctgcacctagaggagaaccagctgacccggctggaggaccacagctttgcagggctggccagcctacaggaactctatctcaaccacaaccagctctaccgcatcgcccccagggccttttctggcctcagcaacttgctgcggctgcacctcaactccaacctcctgagggccattgacagccgctggtttgaaatgctgcccaacttggagatactcatgattggcggcaacaaggtagatgccatcctggacatgaacttccggcccctggccaacctgcgtagcctggtgctagcaggcatgaacctgcgggagatctccgactatgccctggaggggctgcaaagcctggagagcctctccttctatgacaaccagctggcccgggtgcccaggcgggcactggaacaggtgcccgggctcaagttcctagacctcaacaagaacccgctccagcgggtagggccgggggactttgccaacatgctgcaccttaaggagctgggactgaacaacatggaggagctggtctccatcgacaagtttgccctggtgaacctccccgagctgaccaagctggacatcaccaataacccacggctgtccttcatccacccccgcgccttccaccacctgccccagatggagaccctcatgctcaacaacaacgctctcagtgccttgcaccagcagacggtggagtccctgcccaacctgcaggaggtaggtctccacggcaaccccatccgctgtgactgtgtcatccgctgggccaatgccacgggcacccgtgtccgcttcatcgagccgcaatccaccctgtgtgcggagcctccggacctccagcgcctcccggtccgtgaggtgcccttccgggagatgacggaccactgtttgcccctcatctccccacgaagcttccccccaagcctccaggtagccagtggagagagcatggtgctgcattgccgggcactggccgaacccgaacccgagatctactgggtcactccagctgggcttcgactgacacctgcccatgcaggcaggaggtaccgggtgtaccccgaggggaccctggagctgcggagggtgacagcagaagaggcagggctatacacctgtgtggcccagaacctggtgggggctgacactaagacggttagtgtggttgtgggccgtgctctcctccagccaggcagggacgaaggacaggggctggagctccgggtgcaggagacccacccctatcacatcctgctatcttgggtcaccccacccaacacagtgtccaccaacctcacctggtccagtgcctcctccctccggggccagggggccacagctctggcccgcctgcctcggggaacccacagctacaacattacccgcctccttcaggccacggagtactgggcctgcctgcaagtggcctttgctgatgcccacacccagttggcttgtgtatgggccaggaccaaagaggccacttcttgccacagagccttaggggaccgtcctgggctcattgccatcctggctctcgctgtccttctcctggcagctgggctagcggcccaccttggcacaggccaacccaggaagggtgtgggtgggaggcggcctctccctccagcctgggctttctggggctggagtgccccttctgtccgggttgtgtctgctcccctcgtcctgccctggaatccagggaggaagctgcccagatcctcagaaggggagacactgttgccaccattgtctcaaaattcttgaagctcagcctgttctcagcagtagagaaatcactaggactactttttaccaaaagagaagcagtctgggccagatgccctgccaggaaagggacatggacccacgtgcttgaggcctggcagctgggccaagacagatggggctttgtggccctgggggtgcttctgcagcctcgaaaaagttgcccttacctcctagggtcacctctgctgccattctgaggaacatctccaaggaacaggagggactttggctagagcctcctgcctccccatcttctctctgcccagaggctcctgggcctggcttggctgtcccctacctgtgtccccgggctgcaccccttcctcttctctttctctgtacagtctcagttgcttgctcttgtgcctcctgggcaagggctgaaggaggccactccatctcacctcggggggctgccctcaatgtgggagtgaccccagccagatctgaaggacatttgggagagggatgcccaggaacgcctcatctcagcagcctgggctcggcattccgaagctgactttctataggcaattttgtacctttgtggagaaatgtgtcacctcccccaacccgattcactcttttctcctgttttgtaaaaaataaaaataaataataacaataatacgggggaaaggaacgaaaggaaaataa

SEQ ID NO: 148229 - DNA, 3463 bp, Homo sapiens
  Payload ID: 9346
  Gene Symbol: LRRN2
  Gene Name: leucine rich repeat neuronal 2
  Uniprot ID: O75325
  ENST ID: ENST00000367177
  CDS Start-End: 641-2782
gggagagcggcggagaagcgagtgaggagggcgagcgcgaagccgggaagaggggcgcgcgtggagggggtgccgggcgccgcgagggcctgctccgggcacctgcgaacgcgcggcgctctcaaggagcgcctggctctcgcccgccagcctccggccgcgacgcgcccagggcgcggagagggggtggggacggattgggattctgccatcgccctcaccggctgggccctggagccgctcccaggataactccacgttggggagggcgcccgccgagcctccccggcctgtgcagacggcgcgcgcggcgggagggcgcggaccagcgtccccagcccggccccgggcggaaggcgagcggagcgcggccgcgcgggcagcagacggcagacggtgcccggcgcccacgggggctgcccctgatggggcctggcaatgactgagcaggcccagccccagaggacaaggaagagaaggcatattgaggagggcaagaagtgacgcccggtgtagaatgactgccctgggagggtggttccttgggccctggcagggttgctgacccttaccctgcaaaacacaaagagcaggactccagactcttcttgtgaatggtcccctgccctgcagctccaccatgaggcttctcgtggccccactcttgctagcttgggtggctggtgccactgccgctgtgcccgtggtaccctggcatgttccctgcccccctcagtgtgcctgccagatccggccctggtatacgccccgctcgtcctaccgcgaggctaccactgtggactgcaatgacctattcctgacggcagtccccccggcactccccgcaggcacacagaccctgctcctgcagagcaacagcattgtccgtgtggaccagagtgagctgggctacctggccaatctcacagagctggacctgtcccagaacagcttttcggatgcccgagactgtgatttccatgccctgccccagctgctgagcctgcacctagaggagaaccagctgacccggctggaggaccacagctttgcagggctggccagcctacaggaactctatctcaaccacaaccagctctaccgcatcgcccccagggccttttctggcctcagcaacttgctgcggctgcacctcaactccaacctcctgagggccattgacagccgctggtttgaaatgctgcccaacttggagatactcatgattggcggcaacaaggtagatgccatcctggacatgaacttccggcccctggccaacctgcgtagcctggtgctagcaggcatgaacctgcgggagatctccgactatgccctggaggggctgcaaagcctggagagcctctccttctatgacaaccagctggcccgggtgcccaggcgggcactggaacaggtgcccgggctcaagttcctagacctcaacaagaacccgctccagcgggtagggccgggggactttgccaacatgctgcaccttaaggagctgggactgaacaacatggaggagctggtctccatcgacaagtttgccctggtgaacctccccgagctgaccaagctggacatcaccaataacccacggctgtccttcatccacccccgcgccttccaccacctgccccagatggagaccctcatgctcaacaacaacgctctcagtgccttgcaccagcagacggtggagtccctgcccaacctgcaggaggtaggtctccacggcaaccccatccgctgtgactgtgtcatccgctgggccaatgccacgggcacccgtgtccgcttcatcgagccgcaatccaccctgtgtgcggagcctccggacctccagcgcctcccggtccgtgaggtgcccttccgggagatgacggaccactgtttgcccctcatctccccacgaagcttccccccaagcctccaggtagccagtggagagagcatggtgctgcattgccgggcactggccgaacccgaacccgagatctactgggtcactccagctgggcttcgactgacacctgcccatgcaggcaggaggtaccgggtgtaccccgaggggaccctggagctgcggagggtgacagcagaagaggcagggctatacacctgtgtggcccagaacctggtgggggctgacactaagacggttagtgtggttgtgggccgtgctctcctccagccaggcagggacgaaggacaggggctggagctccgggtgcaggagacccacccctatcacatcctgctatcttgggtcaccccacccaacacagtgtccaccaacctcacctggtccagtgcctcctccctccggggccagggggccacagctctggcccgcctgcctcggggaacccacagctacaacattacccgcctccttcaggccacggagtactgggcctgcctgcaagtggcctttgctgatgcccacacccagttggcttgtgtatgggccaggaccaaagaggccacttcttgccacagagccttaggggaccgtcctgggctcattgccatcctggctctcgctgtccttctcctggcagctgggctagcggcccaccttggcacaggccaacccaggaagggtgtgggtgggaggcggcctctccctccagcctgggctttctggggctggagtgccccttctgtccgggttgtgtctgctcccctcgtcctgccctggaatccagggaggaagctgcccagatcctcagaaggggagacactgttgccaccattgtctcaaaattcttgaagctcagcctgttctcagcagtagagaaatcactaggactactttttaccaaaagagaagcagtctgggccagatgccctgccaggaaagggacatggacccacgtgcttgaggcctggcagctgggccaagacagatggggctttgtggccctgggggtgcttctgcagcctcgaaaaagttgcccttacctcctagggtcacctctgctgccattctgaggaacatctccaaggaacaggagggactttggctagagcctcctgcctccccatcttctctctgcccagaggctcctgggcctggcttggctgtcccctacctgtgtccccgggctgcaccccttcctcttctctttctctgtacagtctcagttgcttgctcttgtgcctcctgggcaagggctgaaggaggccactccatctcacctcggggggctgccctcaatgtgggagtgaccccagccagatctgaaggacatttgggagagggatgcccaggaacgcctcatctcagcagcctgggctcggcattccgaagctgactttctataggcaattttgtacctttgtggagaaatgtgtcacctcccccaacccgattcactcttttctcctgttttgtaaaaaataaaaataaataataacaataatacgggggaaaggaacgaaaggaaaataa

SEQ ID NO: 148230 - DNA, 3099 bp, Homo sapiens
  Payload ID: 9347
  Gene Symbol: LRRN3
  Gene Name: leucine rich repeat neuronal 3
  Uniprot ID: Q9H3W5
  ENST ID: ENST00000308478
  CDS Start-End: 940-3066
tttcagccaaccagactggagcagctgcgagtgctacatcttggctgtctgaagcgattggctcctctctggggagtggagggtgttcagttattaatgaccgctgagcaggcagcaccatgtcagtgtgacaactgatcgggtgaacgatgcaccactaaccaccatggaaacaaggaaaaataaagccagctcacaggatctctcttcactggattgagagcctcagcctgccgactgagaaaaagagttccaggaaaaagaaggaatcccggctgcagcctcctgccttcctttatattttaaaatagagagataagattgcgtgcatgtgtgcatatctatagtatatattttgtacactttgttacacagacacacaaatgcacctatttataccgggcaagaacacaaccatgtgattatctcaaccaaggaactgaggaatccagcacgcaaggacatcggaggtgggctagcactgaaactgcttttcaagacgaggaagaggaggagaaagagaaagaagaggaagatgttgggcaacatttatttaacatgctccacagcccggaccctggcatcatgctgctattcctgcaaatactgaagaagcatgggatttaaatattttacttctaaataaatgaattactcaatctcctatgaccatctatacatactccaccttcaaaaagtacatcaatattatatcattaaggaaatagtaaccttctcttctccaatatgcatgacatttttggacaatgcaattgtggcactggcacttatttcagtgaagaaaaactttgtggttctatggcattcatcatttgacaaatgcaagcatcttccttatcaatcagctcctattgaacttactagcactgactgtggaatccttaagggcccattacatttctgaagaagaaagctaagatgaaggacatgccactccgaattcatgtgctacttggcctagctatcactacactagtacaagctgtagataaaaaagtggattgtccacggttatgtacgtgtgaaatcaggccttggtttacacccagatccatttatatggaagcatctacagtggattgtaatgatttaggtcttttaactttcccagccagattgccagctaacacacagattcttctcctacagactaacaatattgcaaaaattgaatactccacagactttccagtaaaccttactggcctggatttatctcaaaacaatttatcttcagtcaccaatattaatgtaaaaaagatgcctcagctcctttctgtgtacctagaggaaaacaaacttactgaactgcctgaaaaatgtctgtccgaactgagcaacttacaagaactctatattaatcacaacttgctttctacaatttcacctggagcctttattggcctacataatcttcttcgacttcatctcaattcaaatagattgcagatgatcaacagtaagtggtttgatgctcttccaaatctagagattctgatgattggggaaaatccaattatcagaatcaaagacatgaactttaagcctcttatcaatcttcgcagcctggttatagctggtataaacctcacagaaataccagataacgccttggttggactggaaaacttagaaagcatctctttttacgataacaggcttattaaagtaccccatgttgctcttcaaaaagttgtaaatctcaaatttttggatctaaataaaaatcctattaatagaatacgaaggggtgattttagcaatatgctacacttaaaagagttggggataaataatatgcctgagctgatttccatcgatagtcttgctgtggataacctgccagatttaagaaaaatagaagctactaacaaccctagattgtcttacattcaccccaatgcatttttcagactccccaagctggaatcactcatgctgaacagcaatgctctcagtgccctgtaccatggtaccattgagtctctgccaaacctcaaggaaatcagcatacacagtaaccccatcaggtgtgactgtgtcatccgttggatgaacatgaacaaaaccaacattcgattcatggagccagattcactgttttgcgtggacccacctgaattccaaggtcagaatgttcggcaagtgcatttcagggacatgatggaaatttgtctccctcttatagctcctgagagctttccttctaatctaaatgtagaagctgggagctatgtttcctttcactgtagagctactgcagaaccacagcctgaaatctactggataacaccttctggtcaaaaactcttgcctaataccctgacagacaagttctatgtccattctgagggaacactagatataaatggcgtaactcccaaagaagggggtttatatacttgtatagcaactaacctagttggcgctgacttgaagtctgttatgatcaaagtggatggatcttttccacaagataacaatggctctttgaatattaaaataagagatattcaggccaattcagttttggtgtcctggaaagcaagttctaaaattctcaaatctagtgttaaatggacagcctttgtcaagactgaaaattctcatgctgcgcaaagtgctcgaataccatctgatgtcaaggtatataatcttactcatctgaatccatcaactgagtataaaatttgtattgatattcccaccatctatcagaaaaacagaaaaaaatgtgtaaatgtcaccaccaaaggtttgcaccctgatcaaaaagagtatgaaaagaataataccacaacacttatggcctgtcttggaggccttctggggattattggtgtgatatgtcttatcagctgcctctctccagaaatgaactgtgatggtggacacagctatgtgaggaattacttacagaaaccaacctttgcattaggtgagctttatcctcctctgataaatctctgggaagcaggaaaagaaaaaagtacatcactgaaagtaaaagcaactgttataggtttaccaacaaatatgtcctaaaaaccaccaaggaaacctactccaaaaatgaac

SEQ ID NO: 148231 - DNA, 3725 bp, Homo sapiens
  Payload ID: 9347
  Gene Symbol: LRRN3
  Gene Name: leucine rich repeat neuronal 3
  Uniprot ID: Q9H3W5
  ENST ID: ENST00000451085
  CDS Start-End: 1047-3173
tttcagccaaccagactggagcagctgcgagtgctacatcttggctgtctgaagcgattggctcctctctggggagtggagggtgttcagttattaatgaccgctgagcaggcagcaccatgtcagtgtgacaactgatcgggtgaacgatgcaccactaaccaccatggaaacaaggaaaaataaagccagctcacaggatctctcttcactggattgagagcctcagcctgccgactgagaaaaagagttccaggaaaaagaaggaatcccggctgcagcctcctgccttcctttatattttaaaatagagagataagattgcgtgcatgtgtgcatatctatagtatatattttgtacactttgttacacagacacacaaatgcacctatttataccgggcaagaacacaaccatgtgattatctcaaccaaggaactgaggaatccagcacgcaaggacatcggaggtgggctagcactgaaactgcttttcaaggaggtgaagcattccacagataatcagctactctattcagggaaggagtgtaaacatcaccactttttgcatgtttgcataaaaaaggcccactgaatcagttaaagacgaggaagaggaggagaaagagaaagaagaggaagatgttgggcaacatttatttaacatgctccacagcccggaccctggcatcatgctgctattcctgcaaatactgaagaagcatgggatttaaatattttacttctaaataaatgaattactcaatctcctatgaccatctatacatactccaccttcaaaaagtacatcaatattatatcattaaggaaatagtaaccttctcttctccaatatgcatgacatttttggacaatgcaattgtggcactggcacttatttcagtgaagaaaaactttgtggttctatggcattcatcatttgacaaatgcaagcatcttccttatcaatcagctcctattgaacttactagcactgactgtggaatccttaagggcccattacatttctgaagaagaaagctaagatgaaggacatgccactccgaattcatgtgctacttggcctagctatcactacactagtacaagctgtagataaaaaagtggattgtccacggttatgtacgtgtgaaatcaggccttggtttacacccagatccatttatatggaagcatctacagtggattgtaatgatttaggtcttttaactttcccagccagattgccagctaacacacagattcttctcctacagactaacaatattgcaaaaattgaatactccacagactttccagtaaaccttactggcctggatttatctcaaaacaatttatcttcagtcaccaatattaatgtaaaaaagatgcctcagctcctttctgtgtacctagaggaaaacaaacttactgaactgcctgaaaaatgtctgtccgaactgagcaacttacaagaactctatattaatcacaacttgctttctacaatttcacctggagcctttattggcctacataatcttcttcgacttcatctcaattcaaatagattgcagatgatcaacagtaagtggtttgatgctcttccaaatctagagattctgatgattggggaaaatccaattatcagaatcaaagacatgaactttaagcctcttatcaatcttcgcagcctggttatagctggtataaacctcacagaaataccagataacgccttggttggactggaaaacttagaaagcatctctttttacgataacaggcttattaaagtaccccatgttgctcttcaaaaagttgtaaatctcaaatttttggatctaaataaaaatcctattaatagaatacgaaggggtgattttagcaatatgctacacttaaaagagttggggataaataatatgcctgagctgatttccatcgatagtcttgctgtggataacctgccagatttaagaaaaatagaagctactaacaaccctagattgtcttacattcaccccaatgcatttttcagactccccaagctggaatcactcatgctgaacagcaatgctctcagtgccctgtaccatggtaccattgagtctctgccaaacctcaaggaaatcagcatacacagtaaccccatcaggtgtgactgtgtcatccgttggatgaacatgaacaaaaccaacattcgattcatggagccagattcactgttttgcgtggacccacctgaattccaaggtcagaatgttcggcaagtgcatttcagggacatgatggaaatttgtctccctcttatagctcctgagagctttccttctaatctaaatgtagaagctgggagctatgtttcctttcactgtagagctactgcagaaccacagcctgaaatctactggataacaccttctggtcaaaaactcttgcctaataccctgacagacaagttctatgtccattctgagggaacactagatataaatggcgtaactcccaaagaagggggtttatatacttgtatagcaactaacctagttggcgctgacttgaagtctgttatgatcaaagtggatggatcttttccacaagataacaatggctctttgaatattaaaataagagatattcaggccaattcagttttggtgtcctggaaagcaagttctaaaattctcaaatctagtgttaaatggacagcctttgtcaagactgaaaattctcatgctgcgcaaagtgctcgaataccatctgatgtcaaggtatataatcttactcatctgaatccatcaactgagtataaaatttgtattgatattcccaccatctatcagaaaaacagaaaaaaatgtgtaaatgtcaccaccaaaggtttgcaccctgatcaaaaagagtatgaaaagaataataccacaacacttatggcctgtcttggaggccttctggggattattggtgtgatatgtcttatcagctgcctctctccagaaatgaactgtgatggtggacacagctatgtgaggaattacttacagaaaccaacctttgcattaggtgagctttatcctcctctgataaatctctgggaagcaggaaaagaaaaaagtacatcactgaaagtaaaagcaactgttataggtttaccaacaaatatgtcctaaaaaccaccaaggaaacctactccaaaaatgaacaaaaaaaaaaaaagcgaaagactgcagttgtgctaaaaacaaaacaaaacaaacaaacaaacaaaaaagtaaaaaaagattactttcgagagagaagtttaagcttcaccaatgctgctcctgaccaatggaaatatgtacaacttcagcattttaagtaactggcttcaaggggtactgtggcaaccaaataaaataactccattttctaaaactttcatgtaacttttatgtctggactacagttcaagtggacaaaaacatttctgtattttttttaagtaaataagagtagttgaactgagcaatacctcctcctgtgttgtattacacatattagccacgagtttttgcagtgaccagataaacttgaattgacacgtggtgtaataaaatggacaaattctgtagagtagacacagtgagtatgtggacctcttttataaggaaaaatacattttggattaaaatcaattgcttctgtcttgttttgtttctaaataaagaataatttctggg

SEQ ID NO: 148232 - DNA, 1830 bp, Homo sapiens
  Payload ID: 9347
  Gene Symbol: LRRN3
  Gene Name: leucine rich repeat neuronal 3
  ENST ID: ENST00000421101
  CDS Start-End: 1010-1830
atcttggctgtctgaagcgattggctcctctctggggagtggagggtgttcagttattaatgaccgctgagcaggcagcaccatgtcagtgtgacaactgatcgggtgaacgatgcaccactaaccaccatggaaacaaggaaaaataaagccagctcacaggatctctcttcactggattgagagcctcagcctgccgactgagaaaaagagttccaggaaaaagaaggaatcccggctgcagcctcctgccttcctttatattttaaaatagagagataagattgcgtgcatgtgtgcatatctatagtatatattttgtacactttgttacacagacacacaaatgcacctatttataccgggcaagaacacaaccatgtgattatctcaaccaaggaactgaggaatccagcacgcaaggacatcggaggtgggctagcactgaaactgcttttcaaggaggtgaagcattccacagataatcagctactctattcagggaaggagtgtaaacatcaccactttttgcatgtttgcataaaaaaggcccactgaatcagttaaagacgaggaagaggaggagaaagagaaagaagaggaagatgttgggcaacatttatttaacatgctccacagcccggaccctggcatcatgctgctattcctgcaaatactgaagaagcatgggatttaaatattttacttctaaataaatgaattactcaatctcctatgaccatctatacatactccaccttcaaaaagtacatcaatattatatcattaaggaaatagtaaccttctcttctccaatatgcatgacatttttggacaatgcaattgtggcactggcacttatttcagtgaagaaaaactttgtggttctatggcattcatcatttgacaaatgcaagcatcttccttatcaatcagctcctattgaacttactagcactgactgtggaatccttaagggcccattacatttctgaagaagaaagctaagatgaaggacatgccactccgaattcatgtgctacttggcctagctatcactacactagtacaagctgtagataaaaaagtggattgtccacggttatgtacgtgtgaaatcaggccttggtttacacccagatccatttatatggaagcatctacagtggattgtaatgatttaggtcttttaactttcccagccagattgccagctaacacacagattcttctcctacagactaacaatattgcaaaaattgaatactccacagactttccagtaaaccttactggcctggatttatctcaaaacaatttatcttcagtcaccaatattaatgtaaaaaagatgcctcagctcctttctgtgtacctagaggaaaacaaacttactgaactgcctgaaaaatgtctgtccgaactgagcaacttacaagaactctatattaatcacaacttgctttctacaatttcacctggagcctttattggcctacataatcttcttcgacttcatctcaattcaaatagattgcagatgatcaacagtaagtggtttgatgctcttccaaatctagagattctgatgattggggaaaatccaattatcagaatcaaagacatgaactttaagcctcttatcaatcttcgcagcctggttatagctggtataaacctcacagaaataccagataacgccttggttggactggaaaacttagaaagcatctctttttacgataacaggcttattaaagtaccccatgttgctcttcaaaaagttgtaaatctcaaatttttggatctaaataaaaatcctattaatag

SEQ ID NO: 148233 - DNA, 3513 bp, Homo sapiens
  Payload ID: 9347
  Gene Symbol: LRRN3
  Gene Name: leucine rich repeat neuronal 3
  Uniprot ID: Q9H3W5
  ENST ID: ENST00000422987
  CDS Start-End: 832-2958
gcgagtgctacatcttggctgtctgaagcgattggctcctctctggggagtggagggtgttcagttattaatgaccgctgagcaggcagcaccatgtcagtgtgacaactgatcgggtgaacgatgcaccactaaccaccatggaaacaaggaaaaataaagccagctcacaggatctctcttcactggattgagagcctcagcctgccgactgagaaaaagagttccaggaaaaagaaggaatcccggctgcagcctcctgccttcctttatattttaaaatagagagataagattgcgtgcatgtgtgcatatctatagtatatattttgtacactttgttacacagacacacaaatgcacctatttataccgggcaagaacacaaccatgtgattatctcaaccaaggaactgaggaatccagcacgcaaggacatcggaggtgggctagcactgaaactgcttttcaagcatcatgctgctattcctgcaaatactgaagaagcatgggatttaaatattttacttctaaataaatgaattactcaatctcctatgaccatctatacatactccaccttcaaaaagtacatcaatattatatcattaaggaaatagtaaccttctcttctccaatatgcatgacatttttggacaatgcaattgtggcactggcacttatttcagtgaagaaaaactttgtggttctatggcattcatcatttgacaaatgcaagcatcttccttatcaatcagctcctattgaacttactagcactgactgtggaatccttaagggcccattacatttctgaagaagaaagctaagatgaaggacatgccactccgaattcatgtgctacttggcctagctatcactacactagtacaagctgtagataaaaaagtggattgtccacggttatgtacgtgtgaaatcaggccttggtttacacccagatccatttatatggaagcatctacagtggattgtaatgatttaggtcttttaactttcccagccagattgccagctaacacacagattcttctcctacagactaacaatattgcaaaaattgaatactccacagactttccagtaaaccttactggcctggatttatctcaaaacaatttatcttcagtcaccaatattaatgtaaaaaagatgcctcagctcctttctgtgtacctagaggaaaacaaacttactgaactgcctgaaaaatgtctgtccgaactgagcaacttacaagaactctatattaatcacaacttgctttctacaatttcacctggagcctttattggcctacataatcttcttcgacttcatctcaattcaaatagattgcagatgatcaacagtaagtggtttgatgctcttccaaatctagagattctgatgattggggaaaatccaattatcagaatcaaagacatgaactttaagcctcttatcaatcttcgcagcctggttatagctggtataaacctcacagaaataccagataacgccttggttggactggaaaacttagaaagcatctctttttacgataacaggcttattaaagtaccccatgttgctcttcaaaaagttgtaaatctcaaatttttggatctaaataaaaatcctattaatagaatacgaaggggtgattttagcaatatgctacacttaaaagagttggggataaataatatgcctgagctgatttccatcgatagtcttgctgtggataacctgccagatttaagaaaaatagaagctactaacaaccctagattgtcttacattcaccccaatgcatttttcagactccccaagctggaatcactcatgctgaacagcaatgctctcagtgccctgtaccatggtaccattgagtctctgccaaacctcaaggaaatcagcatacacagtaaccccatcaggtgtgactgtgtcatccgttggatgaacatgaacaaaaccaacattcgattcatggagccagattcactgttttgcgtggacccacctgaattccaaggtcagaatgttcggcaagtgcatttcagggacatgatggaaatttgtctccctcttatagctcctgagagctttccttctaatctaaatgtagaagctgggagctatgtttcctttcactgtagagctactgcagaaccacagcctgaaatctactggataacaccttctggtcaaaaactcttgcctaataccctgacagacaagttctatgtccattctgagggaacactagatataaatggcgtaactcccaaagaagggggtttatatacttgtatagcaactaacctagttggcgctgacttgaagtctgttatgatcaaagtggatggatcttttccacaagataacaatggctctttgaatattaaaataagagatattcaggccaattcagttttggtgtcctggaaagcaagttctaaaattctcaaatctagtgttaaatggacagcctttgtcaagactgaaaattctcatgctgcgcaaagtgctcgaataccatctgatgtcaaggtatataatcttactcatctgaatccatcaactgagtataaaatttgtattgatattcccaccatctatcagaaaaacagaaaaaaatgtgtaaatgtcaccaccaaaggtttgcaccctgatcaaaaagagtatgaaaagaataataccacaacacttatggcctgtcttggaggccttctggggattattggtgtgatatgtcttatcagctgcctctctccagaaatgaactgtgatggtggacacagctatgtgaggaattacttacagaaaccaacctttgcattaggtgagctttatcctcctctgataaatctctgggaagcaggaaaagaaaaaagtacatcactgaaagtaaaagcaactgttataggtttaccaacaaatatgtcctaaaaaccaccaaggaaacctactccaaaaatgaacaaaaaaaaaaaaagcgaaagactgcagttgtgctaaaaacaaaacaaaacaaacaaacaaacaaaaaagtaaaaaaagattactttcgagagagaagtttaagcttcaccaatgctgctcctgaccaatggaaatatgtacaacttcagcattttaagtaactggcttcaaggggtactgtggcaaccaaataaaataactccattttctaaaactttcatgtaacttttatgtctggactacagttcaagtggacaaaaacatttctgtattttttttaagtaaataagagtagttgaactgagcaatacctcctcctgtgttgtattacacatattagccacgagtttttgcagtgaccagataaacttgaattgacacgtggtgtaataaaatggacaaattctgtagagtagacacagtgagtatgtggacctcttttataaggaaaaatacattttggattaaaatcaattgcttctgtcttgttttgtttctaaataaagaataatttctgggaaa

SEQ ID NO: 148234 - DNA, 2692 bp, Homo sapiens
  Payload ID: 9348
  Gene Symbol: LRRN4
  Gene Name: leucine rich repeat neuronal 4
  Uniprot ID: Q8WUT4
  ENST ID: ENST00000378858
  CDS Start-End: 226-2448
cgtcttgatgggaaaggaggagcaatgggaaagactggagtatctcagtccctctcagtggatgggggttgtgggagagaggcagctgggagacaggcctccctctggagttcatagctgagttgctgtccaaatcagtggtccctagaatctataaaacaaagctgagaacttcagaggtgcatccagagaagccacactccaaaaggaccacttccagacgccatgcggcaaaccctaccgctgctgctgctgacggtgctgcgccccagctgggcagaccctccccaggagaaggtcccgctcttccgggtcactcagcagggcccctgggggagcagtggcagcaacgccaccgactcgccctgcgaggggctgcccgccgcggatgcgacggccttgaccctggcgaaccgcaacctggagcgcctgcccggctgcctaccgcgcacactgcgcagcctcgacgccagccacaacctgctgcgcgccctgagcacttccgagctcggccacctggagcagctgcaggtgctgaccctgcgccacaaccgcatcgccgcgctgcgctggggcccgggtgggccggcggggctgcacaccctggacctcagctacaaccagctggccgctctgccgccgtgcaccgggcccgcgctgagcagcctccgcgccctggcgctcgccgggaatccgctgcgggcgctgcagccccgggccttcgcctgcttccccgcgctgcagctcctcaacctctcctgcaccgcgctgggtcgcggagcccaggggggcatcgccgaggcggcgttcgctggagaggatggcgcgcccctggtcacgctcgaagtcctggatctcagcggcacgttccttgaacgggttgagtcagggtggatcagagacctgccgaagctcacatccctctacctgaggaagatgcctcggctgacgaccctggagggggacattttcaagatgacccccaacctgcagcagctggactgtcaggactccccagcacttgcttctgtcgccacacacatctttcaagatactccacatctacaggtccttctgttccagaactgcaacttgagttccttccctccttggaccctggattcctcccaggtcctatcgatcaacctctttggcaaccccctcacttgcagttgtgacttgtcttggctcctcacggatgcaaagagaactgtcctaagcagggcagcagacactatgtgcgcgccagctgcgggatccagcggccccttctcagcctccctgtcactctcccagctgcccggagtgtgccagtccgaccaaagcaccactctcggggcttcacacccaccttgcttcaaccgctccacctacgcacagggtaccaccgtcgcgcccagcgcagcccccgccacccggcctgcgggagaccagcagagtgtctccaaggcccctaacgtgggctctcgcacgatagctgcatggccgcacagcgatgcacgggaggggactgccccctccacgaccaactctgtagcaggtcacagcaactccagcgttttccccagggctgccagcaccaccaggacccagcaccgaggagaacatgcccccgagcttgtccttgagcctgatatctcagctgcctccaccccactggccagcaagctcctgggccccttccctacctcgtgggaccgcagcataagctcgcctcagcccggccagaggacacacgccacaccccaagcccccaacccgagtctttccgagggcgagattccagtcttgctgctggacgactacagtgaggaggaggaagggaggaaggaggaggtgggaacgcctcaccaggacgtcccctgtgattaccatccctgcaagcacctgcagaccccgtgcgcggagctgcagaggcggtggcggtgccggtgccccggcctcagcggggaagacaccatcccagacccgcccaggctgcagggggtgacggagaccacggacacgtcggcgctggtccactggtgtgcccccaactcggtagtgcatgggtaccagatccgctactctgcggagggctgggcggggaaccagtcggtggtgggggtcatctacgccacggcccggcagcaccctctgtacgggctgtcgccgggcaccacctaccgcgtgtgcgtgctggcggccaacagggcgggcttgagccagccacggtcttcgggctggaggagcccgtgcgccgccttcaccaccaagcccagcttcgcgctcctgctctctgggctgtgcgccgccagcggcctgttgctcgccagcaccgtggtgctgtccgcatgtctctgcaggcggggccagacgctgggcctgcagcgctgcgacacgcacctggtggcctacaaaaacccggcctttgatgattacccgctggggctccagaccgtcagttagcccagcttctgggataacgcgtctcatcgaactggatctgagcgcaaaaaggaagacacagacggtcaaaaacgaccccatccgctcctagggtttctaattcccgtgaagccagaatgccttgagcacacatggaacttgccacactgagtgtctgggtccaaggaactgctgccctcccttccttctacttaactctgttcccagaaacctgatggtcaatgccagatcgctccccactgcc

SEQ ID NO: 148235 - DNA, 1745 bp, Homo sapiens
  Payload ID: 9349
  Gene Symbol: LRR1
  Gene Name: leucine rich repeat protein 1
  Uniprot ID: Q96L50
  ENST ID: ENST00000298288
  CDS Start-End: 325-1569
aaccaccgctgccagctgcgcgctcgggggaaaagacgttgcgcccccgccgactgccggtttcccgggcgcgagcccggatccaggtggtcagtcccggtacgcaaccacggcgagaacccggccctgctaagggagaagggaagccgtttcccgcgggcttcatacagacacggtgctaagacagcccgagtcgcggaccagtccaacaggcaggcagatcagtgggcagcccgcgtgcgcgaggaccccgatggcggcgccgggtggcgggaaggaggaagtttcaaagccagcttgacgtggttgtggccgttgggcgagatgaagctacactgtgaggtggaggtgatcagccggcacttgcccgccttggggcttaggaaccggggcaagggcgtccgagccgtgttgagcctctgtcagcagacttccaggagtcagccgccggtccgagccttcctgctcatctccaccctgaaggacaagcgcgggacccgctatgagctaagggagaacattgagcaattcttcaccaaatttgtagatgaggggaaagccactgttcggttaaaggagcctcctgtggatatctgtctaagtaaggccatttccagcagtttaaaaggtttcctttcagctatgagactggctcatagaggctgtaatgttgatacaccagtttcaacgctcacaccagtgaagacttcagaatttgaaaactttaaaactaaaatggttatcacatccaaaaaagactatcctctaagtaagaattttccatattccttggaacatcttcagacttcttactgtgggcttgtccgagttgatatgcgtatgctttgcttaaaaagccttaggaaattagacttgagtcacaaccatataaaaaagcttccagctacaattggagacctcatacaccttcaagaacttaacctgaatgacaatcacttggagtcatttagtgtagccttgtgtcattctacactccagaagtcacttcggagtttggacctcagcaagaacaaaatcaaggcactccctgtgcagttttgccagctccaggaacttaagaatttaaaacttgacgataatgaattgattcaatttccttgcaagataggacaactaataaaccttcgctttttgtcagcagctcgaaataagcttccatttttgcctagtgaatttagaaatttatcccttgaatacttggatctttttggaaatacttttgaacaaccaaaagtccttccagtaataaagctgcaagcaccattaactttattggaatcttctgcacgaaccatattacataataggattccatatggctctcatatcattccattccatctctgccaagatttggataccgcaaaaatttgtgtttgtggaagattctgtctgaactctttcattcaaggaactactaccatgaatctgcattctgttgcccacactgtggtcttagtagataatttgggtggtactgaagcacctattatctcttatttctgttctctaggctgttatgttaattcctctgatatgttaaagtaatgggtgagaccagaaaaagaaatttcaataacagatcagtttggggtgcatgtatgattttgcagcgtcaaattggagtaagggaagatttctgtatacttgctggagaggaggaatgtgtatagttactcatttagatgactccaaaacttttattaaaaccaattttagtttta

SEQ ID NO: 148236 - DNA, 957 bp, Homo sapiens
  Payload ID: 9349
  Gene Symbol: LRR1
  Gene Name: leucine rich repeat protein 1
  Uniprot ID: Q96L50
  ENST ID: ENST00000318317
  CDS Start-End: 261-701
ccgggcgcgagcccggatccaggtggtcagtcccggtacgcaaccacggcgagaacccggccctgctaagggagaagggaagccgtttcccgcgggcttcatacagacacggtgctaagacagcccgagtcgcggaccagtccaacaggcaggcagatcagtgggcagcccgcgtgcgcgaggaccccgatggcggcgccgggtggcgggaaggaggaagtttcaaagccagcttgacgtggttgtggccgttgggcgagatgaagctacactgtgaggtggaggtgatcagccggcacttgcccgccttggggcttaggaaccggggcaagggcgtccgagccgtgttgagcctctgtcagcagacttccaggagtcagccgccggtccgagccttcctgctcatctccaccctgaaggacaagcgcgggacccgctatgagctaagggagaacattgagcaattcttcaccaaatttgtagatgaggggaaagccactgttcggttaaaggagcctcctgtggatatctgtctaagtaaggattccatatggctctcatatcattccattccatctctgccaagatttggataccgcaaaaatttgtgtttgtggaagattctgtctgaactctttcattcaaggaactactaccatgaatctgcattctgttgcccacactgtggtcttagtagataatttgggtggtactgaagcacctattatctcttatttctgttctctaggctgttatgttaattcctctgatatgttaaagtaatgggtgagaccagaaaaagaaatttcaataacagatcagtttggggtgcatgtatgattttgcagcgtcaaattggagtaagggaagatttctgtatacttgctggagaggaggaatgtgtatagttactcatttagatgactccaaaacttttattaaaaccaattttagttt

SEQ ID NO: 148237 - DNA, 1597 bp, Homo sapiens
  Payload ID: 9349
  Gene Symbol: LRR1
  Gene Name: leucine rich repeat protein 1
  ENST ID: ENST00000540712
  CDS Start-End: 70-264
ggcggcgccgggtggcgggaaggaggaagtttcaaagccagcttgacgtggttgtggccgttgggcgagatgaagctacactgtgaggtggaggtgatcagccggcacttgcccgccttggggcttaggaaccggggcaagggcgtccgagccgtgttgagcctctgtcagcagacttccaggagtcagccgccggtccgagccttcctgctcatctccaccctgaaggacaagcgcgggacccgctatgagcactcaggatagaatagcaaaggagacaagattcctgctctcatggagtttgtatataacctactgggaggtgtgcccaccccaggctaatggactgaagttatgaagctaagggagaacattgagcaattcttcaccaaatttgtagatgaggggaaagccactgttcggttaaaggagcctcctgtggatatctgtctaagtaaggccatttccagcagtttaaaaggtttcctttcagctatgagactggctcatagaggctgtaatgttgatacaccagtttcaacgctcacaccagtgaagacttcagaatttgaaaactttaaaactaaaatggttatcacatccaaaaaagactatcctctaagtaagaattttccatattccttggaacatcttcagacttcttactgtgggcttgtccgagttgatatgcgtatgctttgcttaaaaagccttaggaaattagacttgagtcacaaccatataaaaaagcttccagctacaattggagacctcatacaccttcaagaacttaacctgaatgacaatcacttggagtcatttagtgtagccttgtgtcattctacactccagaagtcacttcggagtttggacctcagcaagaacaaaatcaaggcactccctgtgcagttttgccagctccaggaacttaagaatttaaaacttgacgataatgaattgattcaatttccttgcaagataggacaactaataaaccttcgctttttgtcagcagctcgaaataagcttccatttttgcctagtgaatttagaaatttatcccttgaatacttggatctttttggaaatacttttgaacaaccaaaagtccttccagtaataaagctgcaagcaccattaactttattggaatcttctgcacgaaccatattacataataggattccatatggctctcatatcattccattccatctctgccaagatttggataccgcaaaaatttgtgtttgtggaagattctgtctgaactctttcattcaaggaactactaccatgaatctgcattctgttgcccacactgtggtcttagtagataatttgggtggtactgaagcacctattatctcttatttctgttctctaggctgttatgttaattcctctgatatgttaaagtaatgggtgagaccagaaaaagaaatttcaataacagatcagtttggggtgcatgtatgattttgcagcgtcaaattggagtaagggaagatttctgtatacttgctggagaggaggaatgtgtatagttactcatttagatgactccaaaacttttattaaaaccaattttagtttt

SEQ ID NO: 148238 - DNA, 1886 bp, Homo sapiens
  Payload ID: 9349
  Gene Symbol: LRR1
  Gene Name: leucine rich repeat protein 1
  ENST ID: ENST00000554869
  CDS Start-End: 247-648
ggatccaggtggtcagtcccggtacgcaaccacggcgagaacccggccctgctaagggagaagggaagccgtttcccgcgggcttcatacagacacggtgctaagacagcccgagtcgcggaccagtccaacaggcaggcagatcagtgggcagcccgcgtgcgcgaggaccccgatggcggcgccgggtggcgggaaggaggaagtttcaaagccagcttgacgtggttgtggccgttgggcgagatgaagctacactgtgaggtggaggtgatcagccggcacttgcccgccttggggcttaggaaccggggcaagggcgtccgagccgtgttgagcctctgtcagcagacttccaggagtcagccgccggtccgagccttcctgctcatctccaccctgaaggacaagcgcgggacccgctatgagctaagggagaacattgagcaattcttcaccaaatttgtagatgaggggaaagccactgttcggttaaaggagcctcctgtggatatctgtctaagtaagatggagtctcattctgtcacccaggttggagtgcagtgggaagagcttggttcactgcaacccacaggccatttccagcagtttaaaaggtttcctttcagctatgagactggctcatagaggctgtaatgttgatacaccagtttcaacgctcacaccagtgaagacttcagaatttgaaaactttaaaactaaaatggttatcacatccaaaaaagactatcctctaagtaagaattttccatattccttggaacatcttcagacttcttactgtgggcttgtccgagttgatatgcgtatgctttgcttaaaaagccttaggaaattagacttgagtcacaaccatataaaaaagcttccagctacaattggagacctcatacaccttcaagaacttaacctgaatgacaatcacttggagtcatttagtgtagccttgtgtcattctacactccagaagtcacttcggagtttggacctcagcaagaacaaaatcaaggcactccctgtgcagttttgccagctccaggaacttaagaatttaaaacttgacgataatgaattgattcaatttccttgcaagataggacaactaataaaccttcgctttttgtcagcagctcgaaataagcttccatttttgcctagtgaatttagaaatttatcccttgaatacttggatctttttggaaatacttttgaacaaccaaaagtccttccagtaataaagctgcaagcaccattaactttattggaatcttctgcacgaaccatattacataatagaaccatctatccgaaagagattaatgtaaacatgtgggagacactccctggcagagttttttaaaaaatggttacttaagcaacagattaataagtctttttatgaaaaatttaaaaattgcaaatagggccatcctagatcccgtaccaaaggattccatatggctctcatatcattccattccatctctgccaagatttggataccgcaaaaatttgtgtttgtggaagattctgtctgaactctttcattcaaggaactactaccatgaatctgcattctgttgcccacactgtggtcttagtagataatttgggtggtactgaagcacctattatctcttatttctgttctctaggctgttatgttaattcctctgatatgttaaagtaatgggtgagaccagaaaaagaaatttcaataacagatcagtttggggtgcatgtatgattttgcagcgtcaaattggagtaagggaagatttctgtatacttgctggagaggaggaatgtgtatagttactcatttagatgactccaaaacttttattaaaaccaattttagtttt

SEQ ID NO: 148239 - DNA, 2599 bp, Homo sapiens
  Payload ID: 9350
  Gene Symbol: LRRTM1
  Gene Name: leucine rich repeat transmembrane neuronal 1
  Uniprot ID: Q86UE6
  ENST ID: ENST00000295057
  CDS Start-End: 658-2226
actcagtgagcagtaggtgcctgtgcaagctcgcgccgcacactgcctggtggagggaaggagcccgggcgccgctcgccgctccccgcgccgccgtccgcacctccccaccgcccgccgcccgccgcccgccgcccgcaaagcatgagtgagcccgctctctgcagctgcccggggcgcgaatggcaggctgtttccgcggagtaaaaggtggcgccggtcagtggtcgtttccaatgacggacattaaccagactgtcagatcctggggagtcgcgagccccgagtttggagttttttccccccacaacgtcacagtccgaactgcagagggaaaggaaggcggcaggaaggcgaagctcgggctccggcacgtagttgggaaacttgcgggtcctagaagtcgcctccccgccttgccggccgcccttgcagccccgagccgagcagcaaagtgagacattgtgcgcctgccagatccgccggccgcggaccggggctgcctcggaaacacagaggggtcttctctcgccctgcatataattagcctgcacacaaagggagcagctgaatggaggttgtcactctctggaaaaggatttctgaccgagcgcttccaatggacattctccagtctctctggaaagattctcgctaatggatttcctgctgctcggtctctgtctatactggctgctgaggaggccctcgggggtggtcttgtgtctgctgggggcctgctttcagatgctgcccgccgcccccagcgggtgcccgcagctgtgccggtgcgaggggcggctgctgtactgcgaggcgctcaacctcaccgaggcgccccacaacctgtccggcctgctgggcttgtccctgcgctacaacagcctctcggagctgcgcgccggccagttcacggggttaatgcagctcacgtggctctatctggatcacaatcacatctgctccgtgcagggggacgcctttcagaaactgcgccgagttaaggaactcacgctgagttccaaccagatcacccaactgcccaacaccaccttccggcccatgcccaacctgcgcagcgtggacctctcgtacaacaagctgcaggcgctcgcgcccgacctcttccacgggctgcggaagctcaccacgctgcatatgcgggccaacgccatccagtttgtgcccgtgcgcatcttccaggactgccgcagcctcaagtttctcgacatcggatacaatcagctcaagagtctggcgcgcaactctttcgccggcttgtttaagctcaccgagctgcacctcgagcacaacgacttggtcaaggtgaacttcgcccacttcccgcgcctcatctccctgcactcgctctgcctgcggaggaacaaggtggccattgtggtcagctcgctggactgggtttggaacctggagaaaatggacttgtcgggcaacgagatcgagtacatggagccccatgtgttcgagaccgtgccgcacctgcagtccctgcagctggactccaaccgcctcacctacatcgagccccggatcctcaactcttggaagtccctgacaagcatcaccctggccgggaacctgtgggattgcgggcgcaacgtgtgtgccctagcctcgtggctcaacaacttccaggggcgctacgatggcaacttgcagtgcgccagcccggagtacgcacagggcgaggacgtcctggacgccgtgtacgccttccacctgtgcgaggatggggccgagcccaccagcggccacctgctctcggccgtcaccaaccgcagtgatctggggccccctgccagctcggccaccacgctcgcggacggcggggaggggcagcacgacggcacattcgagcctgccaccgtggctcttccaggcggcgagcacgccgagaacgccgtgcagatccacaaggtggtcacgggcaccatggccctcatcttctccttcctcatcgtggtcctggtgctctacgtgtcctggaagtgtttcccagccagcctcaggcagctcagacagtgctttgtcacgcagcgcaggaagcaaaagcagaaacagaccatgcatcagatggctgccatgtctgcccaggaatactacgttgattacaaaccgaaccacattgagggagccctggtgatcatcaacgagtatggctcgtgtacctgccaccagcagcccgcgagggaatgcgaggtgtgattgtcccagtggctctcaacccatgcgctaccaaatacgcctgggcagccgggacgggccggcgggcaccaggctggggtctccttgtctgtgctctgatatgctccttgactgaaactttaaggggatctctcccagagacttgacattttagctttattgtgtcttaaaaacaaaagcgaattaaaacacaacaaaaaaccccaccccacaaccttcaggacagtctatcttaaatttcatatgagaactccttcctccctttgaagatctgtccatattcaggaatctgagagtgtaaaaaaggtaccaatcattgattttttttttttttgtaaactaaaatgtttaaaataaaatagcatttacagtt

SEQ ID NO: 148240 - DNA, 2126 bp, Homo sapiens
  Payload ID: 9350
  Gene Symbol: LRRTM1
  Gene Name: leucine rich repeat transmembrane neuronal 1
  Uniprot ID: Q86UE6
  ENST ID: ENST00000409148
  CDS Start-End: 187-1755
agatccgccggccgcggaccggggctgcctcggaaacacagaggggtcttctctcgccctgcatataattagcctgcacacaaagggagcagctgaatggaggttgtcactctctggaaaagggtggatttctgaccgagcgcttccaatggacattctccagtctctctggaaagattctcgctaatggatttcctgctgctcggtctctgtctatactggctgctgaggaggccctcgggggtggtcttgtgtctgctgggggcctgctttcagatgctgcccgccgcccccagcgggtgcccgcagctgtgccggtgcgaggggcggctgctgtactgcgaggcgctcaacctcaccgaggcgccccacaacctgtccggcctgctgggcttgtccctgcgctacaacagcctctcggagctgcgcgccggccagttcacggggttaatgcagctcacgtggctctatctggatcacaatcacatctgctccgtgcagggggacgcctttcagaaactgcgccgagttaaggaactcacgctgagttccaaccagatcacccaactgcccaacaccaccttccggcccatgcccaacctgcgcagcgtggacctctcgtacaacaagctgcaggcgctcgcgcccgacctcttccacgggctgcggaagctcaccacgctgcatatgcgggccaacgccatccagtttgtgcccgtgcgcatcttccaggactgccgcagcctcaagtttctcgacatcggatacaatcagctcaagagtctggcgcgcaactctttcgccggcttgtttaagctcaccgagctgcacctcgagcacaacgacttggtcaaggtgaacttcgcccacttcccgcgcctcatctccctgcactcgctctgcctgcggaggaacaaggtggccattgtggtcagctcgctggactgggtttggaacctggagaaaatggacttgtcgggcaacgagatcgagtacatggagccccatgtgttcgagaccgtgccgcacctgcagtccctgcagctggactccaaccgcctcacctacatcgagccccggatcctcaactcttggaagtccctgacaagcatcaccctggccgggaacctgtgggattgcgggcgcaacgtgtgtgccctagcctcgtggctcaacaacttccaggggcgctacgatggcaacttgcagtgcgccagcccggagtacgcacagggcgaggacgtcctggacgccgtgtacgccttccacctgtgcgaggatggggccgagcccaccagcggccacctgctctcggccgtcaccaaccgcagtgatctggggccccctgccagctcggccaccacgctcgcggacggcggggaggggcagcacgacggcacattcgagcctgccaccgtggctcttccaggcggcgagcacgccgagaacgccgtgcagatccacaaggtggtcacgggcaccatggccctcatcttctccttcctcatcgtggtcctggtgctctacgtgtcctggaagtgtttcccagccagcctcaggcagctcagacagtgctttgtcacgcagcgcaggaagcaaaagcagaaacagaccatgcatcagatggctgccatgtctgcccaggaatactacgttgattacaaaccgaaccacattgagggagccctggtgatcatcaacgagtatggctcgtgtacctgccaccagcagcccgcgagggaatgcgaggtgtgattgtcccagtggctctcaacccatgcgctaccaaatacgcctgggcagccgggacgggccggcgggcaccaggctggggtctccttgtctgtgctctgatatgctccttgactgaaactttaaggggatctctcccagagacttgacattttagctttattgtgtcttaaaaacaaaagcgaattaaaacacaacaaaaaaccccaccccacaaccttcaggacagtctatcttaaatttcatatgagaactccttcctccctttgaagatctgtccatattcaggaatctgagagtgtaaaaaaggtaccaatcattgattttttttttttttgtaaactaaaatgtttaaaataaaatagcatttacag

SEQ ID NO: 148241 - DNA, 765 bp, Homo sapiens
  Payload ID: 9350
  Gene Symbol: LRRTM1
  Gene Name: leucine rich repeat transmembrane neuronal 1
  ENST ID: ENST00000452811
  CDS Start-End: 215-765
acgtcacagtccgaactgcagagggaaaggaaggcggcaggaaggcgaagctcgggctccggcacgtagttgggaaacttgcgggtcctagaagtcgcctccccgccttgccggccgcccttgcagccccgagccgagcagcaaagtgagacattatttctgaccgagcgcttccaatggacattctccagtctctctggaaagattctcgctaatggatttcctgctgctcggtctctgtctatactggctgctgaggaggccctcgggggtggtcttgtgtctgctgggggcctgctttcagatgctgcccgccgcccccagcgggtgcccgcagctgtgccggtgcgaggggcggctgctgtactgcgaggcgctcaacctcaccgaggcgccccacaacctgtccggcctgctgggcttgtccctgcgctacaacagcctctcggagctgcgcgccggccagttcacggggttaatgcagctcacgtggctctatctggatcacaatcacatctgctccgtgcagggggacgcctttcagaaactgcgccgagttaaggaactcacgctgagttccaaccagatcacccaactgcccaacaccaccttccggcccatgcccaacctgcgcagcgtggacctctcgtacaacaagctgcaggcgctcgcgcccgacctcttccacgggctgcggaagctcaccacgctgcatatgcgggccaacgccatccagtttgtgcccgtgcgcatcttccaggactg

SEQ ID NO: 148242 - DNA, 3021 bp, Homo sapiens
  Payload ID: 9350
  Gene Symbol: LRRTM1
  Gene Name: leucine rich repeat transmembrane neuronal 1
  Uniprot ID: Q86UE6
  ENST ID: ENST00000417012
  CDS Start-End: 302-1870
aagctcgggctccggcacgtagttgggaaacttgcgggtcctagaagtcgcctccccgccttgccggccgcccttgcagccccgagccgagcagcaaagtgagacattgtgcgcctgccagatccgccggccgcggaccggggctgcctcggaaacacagaggggtcttctctcgccctgcatataattagcctgcacacaaagggagcagctgaatggaggttgtcactctctggaaaaggatttctgaccgagcgcttccaatggacattctccagtctctctggaaagattctcgctaatggatttcctgctgctcggtctctgtctatactggctgctgaggaggccctcgggggtggtcttgtgtctgctgggggcctgctttcagatgctgcccgccgcccccagcgggtgcccgcagctgtgccggtgcgaggggcggctgctgtactgcgaggcgctcaacctcaccgaggcgccccacaacctgtccggcctgctgggcttgtccctgcgctacaacagcctctcggagctgcgcgccggccagttcacggggttaatgcagctcacgtggctctatctggatcacaatcacatctgctccgtgcagggggacgcctttcagaaactgcgccgagttaaggaactcacgctgagttccaaccagatcacccaactgcccaacaccaccttccggcccatgcccaacctgcgcagcgtggacctctcgtacaacaagctgcaggcgctcgcgcccgacctcttccacgggctgcggaagctcaccacgctgcatatgcgggccaacgccatccagtttgtgcccgtgcgcatcttccaggactgccgcagcctcaagtttctcgacatcggatacaatcagctcaagagtctggcgcgcaactctttcgccggcttgtttaagctcaccgagctgcacctcgagcacaacgacttggtcaaggtgaacttcgcccacttcccgcgcctcatctccctgcactcgctctgcctgcggaggaacaaggtggccattgtggtcagctcgctggactgggtttggaacctggagaaaatggacttgtcgggcaacgagatcgagtacatggagccccatgtgttcgagaccgtgccgcacctgcagtccctgcagctggactccaaccgcctcacctacatcgagccccggatcctcaactcttggaagtccctgacaagcatcaccctggccgggaacctgtgggattgcgggcgcaacgtgtgtgccctagcctcgtggctcaacaacttccaggggcgctacgatggcaacttgcagtgcgccagcccggagtacgcacagggcgaggacgtcctggacgccgtgtacgccttccacctgtgcgaggatggggccgagcccaccagcggccacctgctctcggccgtcaccaaccgcagtgatctggggccccctgccagctcggccaccacgctcgcggacggcggggaggggcagcacgacggcacattcgagcctgccaccgtggctcttccaggcggcgagcacgccgagaacgccgtgcagatccacaaggtggtcacgggcaccatggccctcatcttctccttcctcatcgtggtcctggtgctctacgtgtcctggaagtgtttcccagccagcctcaggcagctcagacagtgctttgtcacgcagcgcaggaagcaaaagcagaaacagaccatgcatcagatggctgccatgtctgcccaggaatactacgttgattacaaaccgaaccacattgagggagccctggtgatcatcaacgagtatggctcgtgtacctgccaccagcagcccgcgagggaatgcgaggtgtgattgtcccagtggctctcaacccatgcgctaccaaatacgcctgggcagccgggacgggccggcgggcaccaggctggggtctccttgtctgtgctctgatatgctccttgactgaaactttaaggggatctctcccagagacttgacattttagctttattgtgtcttaaaaacaaaagcgaattaaaacacaacaaaaaaccccaccccacaaccttcaggacagtctatcttaaatttcatatgagaactccttcctccctttgaagatctgtccatattcaggaatctgagagtgtaaaaaagttctgtcaacagattcagtccccagtcctccttctctgagcagacctctcatccgcagcatatatctgctagatcttctaagagctgaaatggagacttctggaagaaggtgggaaagaaatccatctcggcttaattaaccatttatcgcatcatattactcccatcttaaaagtgcacgcgttgtttttctgaaccctcacacaaaggctactactgtggtcccatatctgtcggcccatgagaaacagtgttcttggacctcacagccaagcagcactgaactgcagcaaaatccagcaacacattcagcagcgagcagcctgctgagctccactggtttatccggggccaccaaccccaaagaactgggatgaaagcagatgtgagagaggaaaaggatctgtttttgttttattttctaccaggcccagctctttgtggggggaataaaaaagaagaaaaatcgagctccaagctggtgccctgccaagcttcctcccctcccttcctagtccaagcactccaccgtctgtgcagactgcataacagcaatttctggaaacaggctgaagaatctgggccagtccagaggcagtggattcctggtttatgtgtggtggggtttttaggaattttatttttcaccttaattctttcaacaactgccagctgtttgaagcacatctgtaataaacagcttctgtttgtaaaatgagactgaagttatcctctccagagaaattcctgaatcttctctgtagttcaatgccttcactgacagtttggctcaaaaagtatgagtgtggtaaatattaaagaatgttaatacaagtgtaatgaaa

SEQ ID NO: 148243 - DNA, 578 bp, Homo sapiens
  Payload ID: 9350
  Gene Symbol: LRRTM1
  Gene Name: leucine rich repeat transmembrane neuronal 1
  ENST ID: ENST00000415098
  CDS Start-End: 252-578
cttgcagccccgagccgagcagcaaagtgagacattgtgcgcctgccagatccgccggccgcggaccggggctgcctcggaaacacagaggggtcttctctcgccctgcatataattagcctgcacacaaagggagcagctgaatggaggttgtcactctctggaaaagggtggctttctgcatgcttagagatttctgaccgagcgcttccaatggacattctccagtctctctggaaagattctcgctaatggatttcctgctgctcggtctctgtctatactggctgctgaggaggccctcgggggtggtcttgtgtctgctgggggcctgctttcagatgctgcccgccgcccccagcgggtgcccgcagctgtgccggtgcgaggggcggctgctgtactgcgaggcgctcaacctcaccgaggcgccccacaacctgtccggcctgctgggcttgtccctgcgctacaacagcctctcggagctgcgcgccggccagttcacggggttaatgcagctcacgtggctctatctggatcacaatcacatctgctccgtgcagggggacgccttt

SEQ ID NO: 148244 - DNA, 4023 bp, Homo sapiens
  Payload ID: 9350
  Gene Symbol: LRRTM1
  Gene Name: leucine rich repeat transmembrane neuronal 1
  Uniprot ID: Q86UE6
  ENST ID: ENST00000433224
  CDS Start-End: 639-2207
cctgtgcaagctcgcgccgcacactgcctggtggagggaaggagcccgggcgccgctcgccgctccccgcgccgccgtccgcacctccccaccgcccgccgcccgccgcccgccgcccgcaaagcatgagtgagcccgctctctgcagctgcccggggcgcgaatggcaggctgtttccgcggagtaaaaggtggcgccggtcagtggtcgtttccaatgacggacattaaccagactgtcagatcctggggagtcgcgagccccgagtttggagttttttccccccacaacgtcacagtccgaactgcagagggaaaggaaggcggcaggaaggcgaagctcgggctccggcacgtagttgggaaacttgcgggtcctagaagtcgcctccccgccttgccggccgcccttgcagccccgagccgagcagcaaagtgagacattgtgcgcctgccagatccgccggccgcggaccggggctgcctcggaaacacagaggggtcttctctcgccctgcatataattagcctgcacacaaagggagcagctgaatggaggttgtcactctctggaaaaggatttctgaccgagcgcttccaatggacattctccagtctctctggaaagattctcgctaatggatttcctgctgctcggtctctgtctatactggctgctgaggaggccctcgggggtggtcttgtgtctgctgggggcctgctttcagatgctgcccgccgcccccagcgggtgcccgcagctgtgccggtgcgaggggcggctgctgtactgcgaggcgctcaacctcaccgaggcgccccacaacctgtccggcctgctgggcttgtccctgcgctacaacagcctctcggagctgcgcgccggccagttcacggggttaatgcagctcacgtggctctatctggatcacaatcacatctgctccgtgcagggggacgcctttcagaaactgcgccgagttaaggaactcacgctgagttccaaccagatcacccaactgcccaacaccaccttccggcccatgcccaacctgcgcagcgtggacctctcgtacaacaagctgcaggcgctcgcgcccgacctcttccacgggctgcggaagctcaccacgctgcatatgcgggccaacgccatccagtttgtgcccgtgcgcatcttccaggactgccgcagcctcaagtttctcgacatcggatacaatcagctcaagagtctggcgcgcaactctttcgccggcttgtttaagctcaccgagctgcacctcgagcacaacgacttggtcaaggtgaacttcgcccacttcccgcgcctcatctccctgcactcgctctgcctgcggaggaacaaggtggccattgtggtcagctcgctggactgggtttggaacctggagaaaatggacttgtcgggcaacgagatcgagtacatggagccccatgtgttcgagaccgtgccgcacctgcagtccctgcagctggactccaaccgcctcacctacatcgagccccggatcctcaactcttggaagtccctgacaagcatcaccctggccgggaacctgtgggattgcgggcgcaacgtgtgtgccctagcctcgtggctcaacaacttccaggggcgctacgatggcaacttgcagtgcgccagcccggagtacgcacagggcgaggacgtcctggacgccgtgtacgccttccacctgtgcgaggatggggccgagcccaccagcggccacctgctctcggccgtcaccaaccgcagtgatctggggccccctgccagctcggccaccacgctcgcggacggcggggaggggcagcacgacggcacattcgagcctgccaccgtggctcttccaggcggcgagcacgccgagaacgccgtgcagatccacaaggtggtcacgggcaccatggccctcatcttctccttcctcatcgtggtcctggtgctctacgtgtcctggaagtgtttcccagccagcctcaggcagctcagacagtgctttgtcacgcagcgcaggaagcaaaagcagaaacagaccatgcatcagatggctgccatgtctgcccaggaatactacgttgattacaaaccgaaccacattgagggagccctggtgatcatcaacgagtatggctcgtgtacctgccaccagcagcccgcgagggaatgcgaggtgtgattgtcccagtggctctcaacccatgcgctaccaaatacgcctgggcagccgggacgggccggcgggcaccaggctggggtctccttgtctgtgctctgatatgctccttgactgaaactttaaggggatctctcccagagacttgacattttagctttattgtgtcttaaaaacaaaagcgaattaaaacacaacaaaaaaccccaccccacaaccttcaggacagtctatcttaaatttcatatgagaactccttcctccctttgaagatctgtccatattcaggaatctgagagtgtaaaaaaggtggccataagacagagagagaataatcgtgctttgttttatgctactcctcccaccctgcccatgattaaacatcatgtatgtagaagatcttaagtccatacgcatttcatgaagaaccattggaaagaggaatctgcaatctgggagcttaagagcaaatgatgaccatagaaagctatgttcttactttgtgtgtgtgtctgtatgtttctgcgttgtgtgtctttgtaggcaagcaaacgttgtctacacaaacgggaatttagctcacatcatttcatgcccctgtgcctctagctctggagattggtggggggaggtggggggaaacggcaggaataagggaaagtggtagttttaactaaggttttgtaacacttgaaatcttttctttctcaaattaattaatctttaagcttcaagaaacttgctctgacccctctaagcaaactactaagcatttaaaagagaatctaatttttaaaggtgtagcaccttttttttattcttcccacagagggtgctaatctcattatgctgtgctatctgaaaagaacttaaggccacaattcacgtctcgtcctgggcattgtgatggattgaccctccatttgcagtaccttcccagctgattaaagttcagcagtggtattgaggtttttcgaatatttatatagaaaaaaagtcttttcacatgacaaatgacactctcacaccagtcttagccctagtagttttttaggttggaccagaggaagcaggttaaatgagacctgtcctctgctgcactcagaaaaaataggcagtccctgatgctcagatcttagccttgatattaatagttgagaccacctacccacaatgcagcctatactcccaagactacaaagttaccatcgcaaaggaaaggttattccagtaaaaggaaatagttttctcaaccatttaaaaatattcttctgaactcatcaaagtagaagagcccccaaccttttctctctgccttcaagaaggcagacatttggtatgatttagcatcaacaacacatttatgagtatatgtaagtaatcagaggggcaaatgccacttgttattcctcccaagttttccaagcaagtacacacagatctctggtaggattaggggccacttgtgtttccggcttattttagtcgacttgtcagcaagtttgatgcctagtctatctgacatggcccagtagaacagggcattgatggatcacatgagatggtagaaggaacatcatcacatacccctctcacagagaaaattatcaaagaaccagaaattatatctgttttggagcaagagtgtcataatgtttcagggtagtcaaaataaacataaattatctcctctagatgagtggcgatgttggctgatttgggtctgccattgacagaatgtcaaataaaaaggaattagctagaatatgaccattaaatgtgcttctgaaatatattttgagataggtttagaatgtca

SEQ ID NO: 148245 - DNA, 879 bp, Homo sapiens
  Payload ID: 9350
  Gene Symbol: LRRTM1
  Gene Name: leucine rich repeat transmembrane neuronal 1
  ENST ID: ENST00000416268
  CDS Start-End: 211-879
ccgctctctgcagctgcccggggcgcgaatggcaggctgtttccgcggagtaaaaggtggcgccgcatctaacatggaccaaatcaccatctctttgatctttccgtggctgtgaactttctatgctgcccagctttctgcatgcttagagatttctgaccgagcgcttccaatggacattctccagtctctctggaaagattctcgctaatggatttcctgctgctcggtctctgtctatactggctgctgaggaggccctcgggggtggtcttgtgtctgctgggggcctgctttcagatgctgcccgccgcccccagcgggtgcccgcagctgtgccggtgcgaggggcggctgctgtactgcgaggcgctcaacctcaccgaggcgccccacaacctgtccggcctgctgggcttgtccctgcgctacaacagcctctcggagctgcgcgccggccagttcacggggttaatgcagctcacgtggctctatctggatcacaatcacatctgctccgtgcagggggacgcctttcagaaactgcgccgagttaaggaactcacgctgagttccaaccagatcacccaactgcccaacaccaccttccggcccatgcccaacctgcgcagcgtggacctctcgtacaacaagctgcaggcgctcgcgcccgacctcttccacgggctgcggaagctcaccacgctgcatatgcgggccaacgccatccagtttgtgcccgtgcgcatcttccaggactgccgcagcctcaagtttctcgacatcggatacaatcagctcaagagtctggcgcgcaactctttcgccggcttgtttaagctcaccgagctgcacctcgagcacaacgacttggtcaag

SEQ ID NO: 148246 - DNA, 6017 bp, Homo sapiens
  Payload ID: 9351
  Gene Symbol: LRRTM2
  Gene Name: leucine rich repeat transmembrane neuronal 2
  Uniprot ID: O43300
  ENST ID: ENST00000274711
  CDS Start-End: 380-1930
tgctgctccaggagctcttctctgcaacaagccacccatctgccatcaacaagttaagaccaagagaactaacggctgcggaaaggagactgaagctttgattaaccagctgagcagttagaggtggagaaatttaataacttatattcaaaactgatttagggatcagagcaatcacagaaaatgaaaccaatgctttccagagggatatcctaaggaaaaaacaactcgtcctggtggattcaattttacttggaaagcctgggacacagaaaacaggaaactggtcaaaggctcctacatgttagagccttttacagactcactgcgttgagtctaacaaccgcgactgaatgcagcctccaatgtgctcagaagaatgggcttacatttcaagtggccattaggggcccctatgctggcagcaatatatgcaatgagtatggttttaaaaatgctgcctgccctgggtatggcgtgtccacccaaatgccgctgcgagaagctgctcttctactgcgactctcagggcttccactcagtgccaaacgccacagacaagggctctctgggcctgtccctgaggcacaatcacatcacagagctcgaaagagatcaatttgccagcttcagtcaacttacttggctccacttagatcacaatcaaatttcaacagtaaaagaagatgcttttcaaggactatataaacttaaggaattaatcttaagttccaacaaaatattttacttgccaaacacaacttttacccaactgattaacctgcaaaatttggacctgtcttttaatcagctgtcatctctgcacccagagctcttctatggccttcggaagctgcagaccttgcatttacgttccaactccctgcggactatcccagtacgcctgttctgggactgtcgtagtctggagtttctggatttgagcacaaatcgtttgcgaagtttggctcgcaatggatttgcaggattaattaaactgagagagcttcacctagagcacaaccagctgacgaagattaattttgctcatttcctacggctaagcagtctgcacacgctcttcttacaatggaacaaaatcagcaacttgacatgtgggatggagtggacctggggcactttagaaaagctagacctgactggaaatgaaatcaaagccatcgacttgacagtgtttgaaacgatgcccaatcttaaaatactcctcatggataacaacaagttaaacagccttgattccaagatcttaaactccctgagatccctcacaaccgttggtctctctggcaatctgtgggaatgcagcgcccgaatatgtgctctggcctcctggctgggcagtttccaaggtcggtgggaacactccatcctatgccacagtcctgaccacacccaaggagaggatattctagatgcagtccatggatttcagctctgctggaatttgtcaaccactgtcactgtcatggctacaacttatagagatccaaccactgaatatacaaaaagaataagctcatcaagttaccatgtgggagacaaagaaatcccaactactgcaggcatagcagttactaccgaggaacactttcctgaaccagacaatgccatcttcactcagcgggtaattacgggaacaatggctttattgttttctttcttttttattatttttatagtgttcatctccaggaagtgctgccctcccactttaagaagaattaggcagtgctcaatggttcagaaccacaggcagctccgatcccaaacacgactccatatgtcaaacatgtcagaccaaggaccgtataatgaatatgaacccacccatgaaggacccttcatcatcattaatggttatggacagtgcaagtgtcagcagctgccatacaaagaatgtgaagtataatatctacccatcatcaaaaatcacatcagataagtaacctattttacatagtagaggctaaatacatatctaatttttaccaatggtgacattaagcctaattttccaaactaagtggagacttagtttttgaagtgttgaagtatttttaattttttaaatgaaaccatattttaagtgttaaatgaatcaatgctcacattaatttgcactcctgttggaaagtctaaaatgcttacttcaaaataagaaatgtatgtaattatatacaatcgtgtgtaaacctttacactaaggtctccatatactatttttttctactgaaaacaatttagaaagaagctattgggcagaaacagatatagatcaatacctgtttgatcactgctctccatcccatgtaccacaactatcttgctgcttaaaaggagacttagtaaagttctcttgtatgataatttggtatttactcaaatcttcaatttcttgccagggtgggaagtagaatttcatgtatgctgaagactggtaaatattaaacattctccttccagagtttctgcctgggttagtagatattatcaaagtccatatcatgaattcagaaccctttaatgtaattctaataagctgagtgactctttaatatatttacacaatgaatccaagtgactgtgaaaaggtctcattacaatgaaaccaatcctaaataattacaccaacttcttatacatttctcgtttgacttataatggacatgatttttgtggcatttagacaactgttttaaactagcattaaactgtcattgtactaattaatgtactaaatcctatgtttacattaatatgtgaaaaaagatttagaagatattttggagataaacaagacaaactgagtcaatttaacaatcctgacatgctccctccaatttaaaagcgcacacacacacacacacacacacacacacacacacacacactctcgcgctctctctctcaactatcatgatcaaagatgccttgacaaaggggtttaaacctctttcttctgctttttcctgatcttcaaacctcaaagagccaagttaaaaataattggctagcaacaggcttaacactgattcttattgtattacaaaggaaccatgaaaaaaaacactttccaactattatataatacatttcgatctttcaataaagatacgcattcacgctgtaagtgtagttcagtgtaggtgaagaaaacagcaccactgagatgaatctcatggcagaacaactcgacatgcctatgcagccacacagtggtaacttgaaggcagcacagaggtgagggattaaaaggaaaggcagattttgaaatctgactctcaggttagctggagttacaaggcagccaacaatgattatacacaatctgcaccaaacagggaaaggacctgctgctgaaaagggaagaggggtagatcctccaatgtaaatataaacatgccatagttaacaaatgataaggatgccacatttttcatgcagaaaagaaccacaggtattcagtttcttgtattatgatttctaaagaaaacctattaaatatttggaatttagatgcaagctactcattcacacagaacttttccataaacattgttccacatattgaaaaaactgtaaaattatagcactaacttgattttagaaaatgagcattttttacaactgccatttactgtatgtagaaaaaagacataaaaccttagagaaagccactaccatttttcaagttatcttttccccaacatcaacatcaacatgatatccttcattcagggcatattttttcttcccaggatcaaactgaaaacatgttaaggctatagtttagccagtaagatttaatcacaatttttcttctttaatactaagagatgggtaccttagtacccttcacctaacatctctcggtaaaaagcagacaagatcacaaattacagtaaaaatgtgctcttttttaaggtgggcagattagtttgtcaaagtctcagcccagttcaattcagttgatctcgagtggtgagtattttgtctcttgttaaaccagaccctgggcttgtctgggcagagacagaagctgatttaacagcatagagcacagcgccctacttccccacagacaggctgaattagaagcccctattacaaataagagcaccacgagctaaaatttaccaacccatttatcaggatgaccattgccatttgtcaggtgacagacagcttggtcacaacacaactgtgtcctgagcacacaagattccatcagccctgaaggacagcagaggagtattttccatcatttcaaaccacaaacaaaattaagatttaaactgtgggatgggtaagaaatccccttctttggctgggaatctccaccttaatccttaaaggaccataactggcaaaatccttagtgtacggacaaaagcaaattggaaaagccagccatttactaattcagaggaacagcatagccaaggctagcgaggcatactttccagttgaaaaaaatcaaaattttttgccttccatttttctgggtaatgtcctttaagaaaagtgaatgacagtagtaccaaaaaggtattttcctttctcatttaaaagcaaaaacctccctttttaattgcctgtagaaggcaagattttctttcatttttgtccatttgtgtttcagaatcagcacaggtttgaagattagactgttagtcatctgtgctttctttaccaactggctagaacggaacagcatcacagcaacgctgcggatcttggttacacagtgtcagagcttttgttttttgatggggttttatcctcttcaccaccactacccactccattttttttctatttttaagattagaggaaaatgaccattaagaaccagaaaaataattaatctctctggaaaaaggaaagctaaagaagactatgataccatacccatctagaaaccaagaactagtttgaaatcgtttatattcatttctgtagcatgacagggatttcaatcacctttctgaaaagagtgggctgataaacttgtaaatccacacacaactctgagaatacccactgccagcatcaaaaagcaaagatactaattttttaagccaaaaatctgtactaacacatgtaatttcttaatgtgcctaagttaatttctgtatcaattcaataaatggaattgactgaacttcccaacgccactaattattaaaatccatctgcttattctaatgctagtcaccaagagctagactccatctttccaataaaaatgagccctatgtagcactaggtttgaattctaaaattcaaaacaggcatttcattttcttaaggcacacttcctacacacagctatcaggggaaaaagctataaatgtcctgttctttttctgaagtgtggatatcaatataaaatttgttaaagaatatttttaacagctgacttacatgatcgttttcctaatacaggaatacagcgacagacctatctgaaaagtctgtttgggggcatacttttcatatcttattgactaaagcccttgagccaggaaaaaaaaaaaaaaagagagagagacagtaaggccatctatagataattaaatatttctctatctaacctggggcaaactcatagtacttgaataaggccaaaaacaaatagaaaattactgtttaagctttcattctgctattgcaaacatttggaaacctctgcaactctttcaactaacatttttgtccttagcggtttttttttttttttttaagtctgatatatggaatgtttggtgaaccttcctatcaacactgagactggaaactcaaagtacagtccaaatacattgtgttcaatcaccttcaagagccatttttctttttgggtgggaggtgggcagatgggttgagggtgggaagaaaatactattatgcagggtgttttgggaggggggagggtaacataaagagcagtgtacaggcaagttttgttattaaaattgtgtatactgtaaaaagtg

SEQ ID NO: 148247 - DNA, 1958 bp, Homo sapiens
  Payload ID: 9351
  Gene Symbol: LRRTM2
  Gene Name: leucine rich repeat transmembrane neuronal 2
  ENST ID: ENST00000518785
  CDS Start-End: 458-574
agttctgtgtggtcgcagcacataagcaaatccattcttgtgccgtttctcggaaaagcttttcagtaaatgcactcatgctgctccaggagctcttctctgcaacaagccacccatctgccatcaacaagttaagaccaagagaactaacggctgcggaaaggagactgaagctttgattaaccagctgagcagttagaggtggagaaatttaataacttatattcaaaactgatttagggatcagagcaatcacagaaaatgaaaccaatgctttccagagggatatcctaaggaaaaaacaactcgtcctggtggattcaattttacttggaaagcctgggacacagaaaacaggaaactggtcaaaggctcctacatgttagagccttttacagactcactgcgttgagtctaacaaccgcgactgaatgcagcctccaatgtgctcagaagaatggctgtcatctctgcacccagagctcttctatggccttcggaagctgcagaccttgcatttacgttccaactccctgcggactatcccagtacgcctgttctgggactgtcgtagtctggagtttctggatttgagcacaaatcgtttgcgaagtttggctcgcaatggatttgcaggattaattaaactgagagagcttcacctagagcacaaccagctgacgaagattaattttgctcatttcctacggctaagcagtctgcacacgctcttcttacaatggaacaaaatcagcaacttgacatgtgggatggagtggacctggggcactttagaaaagctagacctgactggaaatgaaatcaaagccatcgacttgacagtgtttgaaacgatgcccaatcttaaaatactcctcatggataacaacaagttaaacagccttgattccaagatcttaaactccctgagatccctcacaaccgttggtctctctggcaatctgtgggaatgcagcgcccgaatatgtgctctggcctcctggctgggcagtttccaaggtcggtgggaacactccatcctatgccacagtcctgaccacacccaaggagaggatattctagatgcagtccatggatttcagctctgctggaatttgtcaaccactgtcactgtcatggctacaacttatagagatccaaccactgaatatacaaaaagaataagctcatcaagttaccatgtgggagacaaagaaatcccaactactgcaggcatagcagttactaccgaggaacactttcctgaaccagacaatgccatcttcactcagcgggtaattacgggaacaatggctttattgttttctttcttttttattatttttatagtgttcatctccaggaagtgctgccctcccactttaagaagaattaggcagtgctcaatggttcagaaccacaggcagctccgatcccaaacacgactccatatgtcaaacatgtcagaccaaggaccgtataatgaatatgaacccacccatgaaggacccttcatcatcattaatggttatggacagtgcaagtgtcagcagctgccatacaaagaatgtgaagtataatatctacccatcatcaaaaatcacatcagataagtaacctattttacatagtagaggctaaatacatatctaatttttaccaatggtgacattaagcctaattttccaaactaagtggagacttagtttttgaagtgttgaagtatttttaattttttaaatgaaaccatattttaagtgttaaatgaatcaatgctcacattaatttgcactcctgttggaaagtctaaaatgcttacttcaaaataagaaatgtatgtaattatatacaatcgtgtgtaaacctttacactaaggtctccatatactatttttttctactgaaaacaatttagaaagaagctattgggcagaaacagatatagatcaatacctgtt

SEQ ID NO: 148248 - DNA, 1182 bp, Homo sapiens
  Payload ID: 9351
  Gene Symbol: LRRTM2
  Gene Name: leucine rich repeat transmembrane neuronal 2
  ENST ID: ENST00000521094
  CDS Start-End: 394-627
agtaaatgcactcatgctgctccaggagctcttctctgcaacaagccacccatctgccatcaacaagttaagaccaagagaactaacggctgcggaaaggagactgaagctttgattaaccagctgagcagttagaggtggagaaatttaataacttatattcaaaactgatttagggatcagagcaatcacagaaaatgaaaccaatgctttccagagggatatcctaaggaaaaaacaactcgtcctggtggattcaattttacttggaaagcctgggacacagaaaacaggaaactggtcaaaggctcctacatgttagagccttttacagactcactgcgttgagtctaacaaccgcgactgaatgcagcctccaatgtgctcagaagaatggtgttcatctccaggaagtgctgccctcccactttaagaagaattaggcagtgctcaatggttcagaaccacaggcagctccgatcccaaacacgactccatatgtcaaacatgtcagaccaaggaccgtataatgaatatgaacccacccatgaaggacccttcatcatcattaatggttatggacagtgcaagtgtcagcagctgccatacaaagaatgtgaagtataatatctacccatcatcaaaaatcacatcagataagtaacctattttacatagtagaggctaaatacatatctaatttttaccaatggtgacattaagcctaattttccaaactaagtggagacttagtttttgaagtgttgaagtatttttaattttttaaatgaaaccatattttaagtgttaaatgaatcaatgctcacattaatttgcactcctgttggaaagtctaaaatgcttacttcaaaataagaaatgtatgtaattatatacaatcgtgtgtaaacctttacactaaggtctccatatactatttttttctactgaaaacaatttagaaagaagctattgggcagaaacagatatagatcaatacctgtttgatcactgctctccatcccatgtaccacaactatcttgctgcttaaaaggagacttagtaaagttctcttgtatgataatttggtatttactcaaatcttcaatttcttgccagggtgggaagtagaatttcatgtatgctgaagactggtaaatattaaacattctccttccaga

SEQ ID NO: 148249 - DNA, 4358 bp, Homo sapiens
  Payload ID: 9352
  Gene Symbol: LRRTM3
  Gene Name: leucine rich repeat transmembrane neuronal 3
  Uniprot ID: Q86VH5
  ENST ID: ENST00000361320
  CDS Start-End: 579-2324
acataagactgcattcactgaaaccaaagcaacagtccgagcagctttcagaatgacagtctgcagaagtgagctgagcgtgtgcgcggtacggggctctcctgccttctgggctccaacgcagctctgtggctgaactgggtgctcatcacgggaactgctggggtatggaatacagatgtggcagctcaggtagccccaaattgcctggaagaatacatcatgtttttcgataagaagaaattgtaggatccagttttttttttaaccgccccctccccaccccccaaaaaactgtaaagatgcaaaaacgtaatatccatgaagatcctattacctaggaagattttgatgttttgctgcgaatgcggtgttgggatttatttgttcttggagtgttctgcgtggctggcaaagaataatgttccaaaatcggtccatctcccaaggggtccaatttttcttcctgggtgtcagcgagccctgactcactacagtgcagctgacaggggctgtcatgcaactggcccctaagccaaagcaaaagacctaaggacgacctttgaacaatacaaaggatgggtttcaatgtaattaggctactgagcggatcagctgtagcactggttatagcccccactgtcttactgacaatgctttcttctgccgaacgaggatgccctaagggctgtaggtgtgaaggcaaaatggtatattgtgaatctcagaaattacaggagataccctcaagtatatctgctggttgcttaggtttgtcccttcgctataacagccttcaaaaacttaagtataatcaatttaaagggctcaaccagctcacctggctataccttgaccataaccatatcagcaatattgacgaaaatgcttttaatggaatacgcagactcaaagagctgattcttagttccaatagaatctcctattttcttaacaataccttcagacctgtgacaaatttacggaacttggatctgtcctataatcagctgcattctctgggatctgaacagtttcggggcttgcggaagctgctgagtttacatttacggtctaactccctgagaaccatccctgtgcgaatattccaagactgccgcaacctggaacttttggacctgggatataaccggatccgaagtttagccaggaatgtctttgctggcatgatcagactcaaagaacttcacctggagcacaatcaattttccaagctcaacctggccctttttccaaggttggtcagccttcagaacctttacttgcagtggaataaaatcagtgtcataggacagaccatgtcctggacctggagctccttacaaaggcttgatttatcaggcaatgagatcgaagctttcagtggacccagtgttttccagtgtgtcccgaatctgcagcgcctcaacctggattccaacaagctcacatttattggtcaagagattttggattcttggatatccctcaatgacatcagtcttgctgggaatatatgggaatgcagcagaaatatttgctcccttgtaaactggctgaaaagttttaaaggtctaagggagaatacaattatctgtgccagtcccaaagagctgcaaggagtaaatgtgatcgatgcagtgaagaactacagcatctgtggcaaaagtactacagagaggtttgatctggccagggctctcccaaagccgacgtttaagcccaagctccccaggccgaagcatgagagcaaaccccctttgcccccgacggtgggagccacagagcccggcccagagaccgatgctgacgccgagcacatctctttccataaaatcatcgcgggcagcgtggcgcttttcctgtccgtgctcgtcatcctgctggttatctacgtgtcatggaagcggtaccctgcgagcatgaagcagctgcagcagcgctccctcatgcgaaggcacaggaaaaagaaaagacagtccctaaagcaaatgactcccagcacccaggaattttatgtagattataaacccaccaacacggagaccagcgagatgctgctgaatgggacgggaccctgcacctataacaaatcgggctccagggagtgtgagatacctttatcaatgaatgtgtcaacctttctggcatacgaccagcccacaataagttactgtggggtgcatcatgaacttctctcccataagtcctttgaaacgaatgcacaggaagatacgatggaaacacacctagagactgagctggacctgagcacaatcacaacagctggccgaatcagtgaccataaacagcagctagcttaactgagatcattggtagccaggggttgctaccaaactttgtaacctcaaggacaaaatgaggaagatgtgttcattgtggactctaaaaacaaaacaaaacacaaaatcccctgttcaaataaacaaaaaatccaagattgattcatgaaataaagaagacatgaattgttttaagtctacactttgtaattagctaagttgtgcagtattttttgacttaaacagagtatgaccctgaaaaataaaagaatctttttttttcaaaactcatcctacctacctgtaaaaactgtacaaagctaatgtatttttcatattgtaaagtttcaattgtagaaacaactggtatgtacagtaccataatttaattacattttactttaaaaactttacacatttcagtttctaaaattttaaattaacaaaaattatttcttgtgttattcagagttactcagttttgtaaggactgttttgttactgcttttgtgcccagaaaccttgactctaaaattctgtgctgtgcgaaacatgcacgatttttattatgcttactgcgtagaattttatctacttgttccagaaataatacattaaccaaaaaggatttaattgttcagacttgtaagaggttcttcaattacataggcaggtttttcttaaaaatgaaaaaaaaatcaaagatttttttaacagttctcagacttaactgttgccttgaattacagcctagtttctaagcagtgaaatgtaatgataaagagggatattttaacatatttccgaatgaatgactcattatttcattcttttgagtaaccattgttaagggttgggggaaagcatggacaaaacatcactggaaacaaaggctgtaaccacagcaacagactttgtgatacagttaaaaggtgcagctgccagtgacaaataaaaacttttgttacatctcattattttcaggccaaggtgggagtatagtgcataataattgtacagtagcaatttttatcctaattaacccatagcggtttacctaaaagtaaccatcagtcagtgcaaaatgtgcctggttcttaagacaactttttatttagaactgtgagaccggtattttggaaacatttcaaaggaaacatatgaatttgttttgcgttgtgcactacatcatttctctcctgaggaagaattttaaacatgtacagctcattcaatatagatatgagccatggtggagaactttatcactcaagtagacggtaaacatccttaatatgttctaaattgtttatattgctatccataatgggattcacctccaaattatcaaagaaataactcagagtaatttgacaccagcccagatcatatattgattatacaattgtattataaagttcattcaaatcaaattaagaaaacctgagtctttagaagctgaaataatcaacttgtttgtgctgtttgcttgacataggttattgtttgaaaatattgttactttatcaatagtaatcatgcattcttgtgtttttttttaatggaaaactgcaagtttcaattactgttgcactagaagtgctttttatgttgtcattttatattcatgccatcaaaagtagattgacaatacatcaatctaacaggggccaatcaaaacaatgaagaaaagaataactgaaaacaatgtcaaacttttaaatttttatctcttccaaagaagttatatctataaaatctagttttatgcaggtttgtcacagcaaatgtaaaagcggattcaagaagaatgaacttaaaaactgtggagcaaatttttgttgaaaatatataaagtcagaaagaaaaaagatgtaaatgttggaagaagcaaattctattactaattcaaatgaaactaaatgtcaaacacagtacttgtgtcaactatttagcatcccagattttgtaacatattttgcataaattatttgctcttcaaaaatttttgtcattttaaatctaattttaatctttatgttttccattttctaa

SEQ ID NO: 148250 - DNA, 3616 bp, Homo sapiens
  Payload ID: 9353
  Gene Symbol: LRRTM4
  Gene Name: leucine rich repeat transmembrane neuronal 4
  Uniprot ID: Q86VH4
  ENST ID: ENST00000409088
  CDS Start-End: 416-1972
agtgtatcacaaactcaagcattagcaccaacaagctctgagcatcatcagtctctggaaagccttctgaattagacaagggctgcctcccagcacagctacaaaacactttaaacctgaccagctaaatggataaacctagcctgcatagcttttaaactggggtctcatacagcacaggaggcctacttgcttcaagaactgaaaatccagaggatgaattgctttatctgggaatggcaaaagccagcacaataaggaatgccagtttgtatggggctactagctcacatgcgggatcagaatggtgtgaatgacagccgcactgtgtcatgaaggtggtggtggtttccgcacaagagaccaaataagaagaaagctgagagaggggggaaacgtttttggatgacaaaggatgggtttccatttaattacgcagctgaaaggcatgagtgtggtgctggtgctacttcctacactgctgcttgttatgctcacgggtgctcagagagcttgcccaaagaactgcagatgtgatggcaaaattgtgtactgtgagtctcatgctttcgcagatatccctgagaacatttctggagggtcacaaggcttatcattaaggttcaacagcattcagaagctcaaatccaatcagtttgccggccttaaccagcttatatggctttatcttgaccataattacattagctcagtggatgaagatgcatttcaagggatccgtagactgaaagaattaattctaagctccaacaaaattacttatctgcacaataaaacatttcacccagttcccaatctccgcaatctggacctctcctacaataagcttcagacattgcaatctgaacaatttaaaggccttcggaaactcatcattttgcacttgagatctaactcactaaagactgtgcccataagagtttttcaagactgtcggaatcttgattttttggatttgggttacaatcgtcttcgaagcttgtcccgaaatgcatttgctggcctcttgaagttaaaggagctccacctggagcacaaccagttttccaagatcaactttgctcattttccacgtctcttcaacctccgctcaatttacttacaatggaacaggattcgctccattagccaaggtttgacatggacttggagttccttacacaacttggatttatcagggaatgacatccaaggaattgagccgggcacatttaaatgcctccccaatttacaaaaattgaatttggattccaacaagctcaccaatatctcacaggaaactgtcaatgcgtggatatcattaatatccatcacattgtctggaaatatgtgggaatgcagtcggagcatttgtcctttattttattggcttaagaatttcaaaggaaataaggaaagcaccatgatatgtgcgggacctaagcacatccagggtgaaaaggttagtgatgcagtggaaacatataatatctgttctgaagtccaggtggtcaacacagaaagatcacacctggtgccccaaactccccagaaacctctgattatccctagacctaccatcttcaaacctgacgtcacccaatccacctttgaaacaccaagcccttccccagggtttcagattcctggcgcagagcaagagtatgagcatgtttcatttcacaaaattattgccgggagtgtggctctctttctctcagtggccatgatcctcttggtgatctatgtgtcttggaaacgctacccagccagcatgaaacaactccagcaacactctcttatgaagaggcggcggaaaaaggccagagagtctgaaagacaaatgaattcccctttacaggagtattatgtggactacaagcctacaaactctgagaccatggatatatcggttaatggatctgggccctgcacatataccatctctggctccagggaatgtgaggtatgaaccatgatcctcctaaaagcatttctactgcggggaaggagaggtaaatgtttgaagccctagaggtgtctctaatcactagaaagattaatgacccttttgcttttgggttttgctcagtgtgaaaggttacttaattaaattacaaccaccaggaaattgactgctttttttttttttttaaatggttgaaacttgaaggaagttcattcaaggataagttggaataaagcactatgttaaaacatctgctttttaacaatttgtatacaggggttggacttaaaaacacacatacaaacaaaactcttttcattctgaaatttctgtctggttcttggtgtttgactgttgtaatggagtaaagaagagggccagcttaatttaaaaataaagtgagtttaccaaaattccagaaggtaatgaagatttaaaccaaagagcaattttcccaagggttgattttgttgtaaatttttagttttaatgaaagcatgcaacagggatctcacacccatgttacttgccatttagttattataccagcatagagaatgtcagaggcctactgtgtaattgtatcaggctcctaaggcttctttctttttttttttttgtttccttctttcctactttctttcactccttcctttccttcctttctcttccttctttttttgtttgtttgtttgttttttaattactgggatatagatccgatttcaaaggtttttatgcactggctatttgtgtttaatcagaatgaaacttcaattccatgctttggctttgtccctggtaactaaaatcaggtcacaattttgtggatgatttagcaataataaaatggcagtcataacagggactgtttgtcagtattgctgtcatccccaaaagaaatgatatgtattcttgttaaacttattaaaaaataagtgatacaaatatttataaataaaaggagagaggtttgagttctgggtatcctccctttctgtaacagcctcaaataaaggtgtaccttccatgttatattatttttgtttttataagaataaatttggacccggtttctgattatttaatttaaaagatcacttacaggatcatgttagtgagcagacaaatagtcacaaatttcaaacttgtcaataagtaatgctggatgtaaattgttcttttcttggtaatgttgatcattatgtgcaaagactgactactaaggccttgttgctggaagaaactagtgaagagaggttaaattctggcaatataatgttttagtatctgattttagatgatcactctttcaaaagacagttttaatgagtaattaaagatgttgccctttctaatgctagttaacagttggaaaatataattgctctttgatagcatatactccaatttttccatagtcctaactacaaatgctaatgaaaatgttttcagacaaagcactgaatttgaaataatctctaactcagtacaatttggactattgaactgttcttcaaagaattcattttcttcttttttgtgtatcattgaaaataagagaagtaatcccagataataaattcctaaaaggaaactgtataagcaattgcccttaaaaattaaaaagaataaaagattttctat

SEQ ID NO: 148251 - DNA, 2451 bp, Homo sapiens
  Payload ID: 9353
  Gene Symbol: LRRTM4
  Gene Name: leucine rich repeat transmembrane neuronal 4
  ENST ID: ENST00000409282
  CDS Start-End: 96-1655
ctcatacagcacaggaggcctacttgcttcaagaactgaaaatccagaggatgaattgctttatctgggaatggcaaaagccagcacaataaggaatgccaggtttccatttaattacgcagctgaaaggcatgagtgtggtgctggtgctacttcctacactgctgcttgttatgctcacgggtgctcagagagcttgcccaaagaactgcagatgtgatggcaaaattgtgtactgtgagtctcatgctttcgcagatatccctgagaacatttctggagggtcacaaggcttatcattaaggttcaacagcattcagaagctcaaatccaatcagtttgccggccttaaccagcttatatggctttatcttgaccataattacattagctcagtggatgaagatgcatttcaagggatccgtagactgaaagaattaattctaagctccaacaaaattacttatctgcacaataaaacatttcacccagttcccaatctccgcaatctggacctctcctacaataagcttcagacattgcaatctgaacaatttaaaggccttcggaaactcatcattttgcacttgagatctaactcactaaagactgtgcccataagagtttttcaagactgtcggaatcttgattttttggatttgggttacaatcgtcttcgaagcttgtcccgaaatgcatttgctggcctcttgaagttaaaggagctccacctggagcacaaccagttttccaagatcaactttgctcattttccacgtctcttcaacctccgctcaatttacttacaatggaacaggattcgctccattagccaaggtttgacatggacttggagttccttacacaacttggatttatcagggaatgacatccaaggaattgagccgggcacatttaaatgcctccccaatttacaaaaattgaatttggattccaacaagctcaccaatatctcacaggaaactgtcaatgcgtggatatcattaatatccatcacattgtctggaaatatgtgggaatgcagtcggagcatttgtcctttattttattggcttaagaatttcaaaggaaataaggaaagcaccatgatatgtgcgggacctaagcacatccagggtgaaaaggttagtgatgcagtggaaacatataatatctgttctgaagtccaggtggtcaacacagaaagatcacacctggtgccccaaactccccagaaacctctgattatccctagacctaccatcttcaaacctgacgtcacccaatccacctttgaaacaccaagcccttccccagggtttcagattcctggcgcagagcaagagtatgagcatgtttcatttcacaaaattattgccgggagtgtggctctctttctctcagtggccatgatcctcttggtgatctatgtgtcttggaaacgctacccagccagcatgaaacaactccagcaacactctcttatgaagaggcggcggaaaaaggccagagagtctgaaagacaaatgaattcccctttacaggagtattatgtggactacaagcctacaaactctgagaccatggatatatcggttaatggatctgggccctgcacatataccatctctggctccagggaatgtgaggtatgaaccatgatcctcctaaaagcatttctactgcggggaaggagaggtaaatgtttgaagccctagaggtgtctctaatcactagaaagattaatgacccttttgcttttgggttttgctcagtgtgaaaggttacttaattaaattacaaccaccaggaaattgactgctttttttttttttttaaatggttgaaacttgaaggaagttcattcaaggataagttggaataaagcactatgttaaaacatctgctttttaacaatttgtatacaggggttggacttaaaaacacacatacaaacaaaactcttttcattctgaaatttctgtctggttcttggtgtttgactgttgtaatggagtaaagaagagggccagcttaatttaaaaataaagtgagtttaccaaaattccagaaggtaatgaagatttaaaccaaagagcaattttcccaagggttgattttgttgtaaatttttagttttaatgaaagcatgcaacagggatctcacacccatgttacttgccatttagttattataccagcatagagaatgtcagaggcctactgtgtaattgtatcaggctcctaaggcttctttctttttttttttttgtttccttctttcctactttctttcactccttcctttccttcctttctcttccttctttttttgtttgtttgtttgttttttaattactgggatatagatccgatttcaaaggtttttatgcactggctatttgtgtttaatcagaatgaaacttcaattccatgctttggctttgtccc

SEQ ID NO: 148252 - DNA, 2247 bp, Homo sapiens
  Payload ID: 9353
  Gene Symbol: LRRTM4
  Gene Name: leucine rich repeat transmembrane neuronal 4
  Uniprot ID: Q86VH4
  ENST ID: ENST00000409093
  CDS Start-End: 338-2110
acaaactcaagcattagcaccaacaagctctgagcatcatcagtctctggaaagccttctgaattagacaagggctgcctcccagcacagctacaaaacactttaaacctgaccagctaaatggataaacctagcctgcatagcttttaaactggggtctcatacagcacaggaggcctacttgcttcaagaactgaaaatccagaggatgaattgctttatctgggaatggcaaaagccagcacaataaggaatgccaggtggtggtggtttccgcacaagagaccaaataagaagaaagctgagagaggggggaaacgtttttggatgacaaaggatgggtttccatttaattacgcagctgaaaggcatgagtgtggtgctggtgctacttcctacactgctgcttgttatgctcacgggtgctcagagagcttgcccaaagaactgcagatgtgatggcaaaattgtgtactgtgagtctcatgctttcgcagatatccctgagaacatttctggagggtcacaaggcttatcattaaggttcaacagcattcagaagctcaaatccaatcagtttgccggccttaaccagcttatatggctttatcttgaccataattacattagctcagtggatgaagatgcatttcaagggatccgtagactgaaagaattaattctaagctccaacaaaattacttatctgcacaataaaacatttcacccagttcccaatctccgcaatctggacctctcctacaataagcttcagacattgcaatctgaacaatttaaaggccttcggaaactcatcattttgcacttgagatctaactcactaaagactgtgcccataagagtttttcaagactgtcggaatcttgattttttggatttgggttacaatcgtcttcgaagcttgtcccgaaatgcatttgctggcctcttgaagttaaaggagctccacctggagcacaaccagttttccaagatcaactttgctcattttccacgtctcttcaacctccgctcaatttacttacaatggaacaggattcgctccattagccaaggtttgacatggacttggagttccttacacaacttggatttatcagggaatgacatccaaggaattgagccgggcacatttaaatgcctccccaatttacaaaaattgaatttggattccaacaagctcaccaatatctcacaggaaactgtcaatgcgtggatatcattaatatccatcacattgtctggaaatatgtgggaatgcagtcggagcatttgtcctttattttattggcttaagaatttcaaaggaaataaggaaagcaccatgatatgtgcgggacctaagcacatccagggtgaaaaggttagtgatgcagtggaaacatataatatctgttctgaagtccaggtggtcaacacagaaagatcacacctggtgccccaaactccccagaaacctctgattatccctagacctaccatcttcaaacctgacgtcacccaatccacctttgaaacaccaagcccttccccagggtttcagattcctggcgcagagcaagagtatgagcatgtttcatttcacaaaattattgccgggagtgtggctctctttctctcagtggccatgatcctcttggtgatctatgtgtcttggaaacgctacccagccagcatgaaacaactccagcaacactctcttatgaagaggcggcggaaaaaggccagagagtctgaaagacaaatgaattcccctttacaggagtattatgtggactacaagcctacaaactctgagaccatggatatatcggttaatggatctgggccctgcacatataccatctctggctccagggaatgtgagatgccacaccacatgaagcccttgccatattacagctatgaccagcctgtgatcgggtactgccaggcccaccagccactccatgtcaccaagggctatgagacagtgtctccagagcaggacgaaagccccggcctggagctgggccgagaccacagcttcatcgccaccatcgccaggtcggcagcaccggccatctacctagagagaattgcaaactaacgctgaagccaactcctcactggggagctccatgggggggagggagggccttcatcttaaaggagaatgggtgtccacaatcgcgcaatcgagcaagctcatcgttcctgttaaaacatttatggcatagagaaaag

SEQ ID NO: 148253 - DNA, 2976 bp, Homo sapiens
  Payload ID: 9353
  Gene Symbol: LRRTM4
  Gene Name: leucine rich repeat transmembrane neuronal 4
  ENST ID: ENST00000409911
  CDS Start-End: 225-2000
ctgagcatcatcagtctctggaaagccttctgaattagacaagggctgcctcccagcacagctacaaaacactttaaacctgaccagctaaatggataaacctagcctgcatagcttttaaactggggtctcatacagcacaggaggcctacttgcttcaagaactgaaaatccagaggatgaattgctttatctgggaatggcaaaagccagcacaataaggaatgccaggtttccatttaattacgcagctgaaaggcatgagtgtggtgctggtgctacttcctacactgctgcttgttatgctcacgggtgctcagagagcttgcccaaagaactgcagatgtgatggcaaaattgtgtactgtgagtctcatgctttcgcagatatccctgagaacatttctggagggtcacaaggcttatcattaaggttcaacagcattcagaagctcaaatccaatcagtttgccggccttaaccagcttatatggctttatcttgaccataattacattagctcagtggatgaagatgcatttcaagggatccgtagactgaaagaattaattctaagctccaacaaaattacttatctgcacaataaaacatttcacccagttcccaatctccgcaatctggacctctcctacaataagcttcagacattgcaatctgaacaatttaaaggccttcggaaactcatcattttgcacttgagatctaactcactaaagactgtgcccataagagtttttcaagactgtcggaatcttgattttttggatttgggttacaatcgtcttcgaagcttgtcccgaaatgcatttgctggcctcttgaagttaaaggagctccacctggagcacaaccagttttccaagatcaactttgctcattttccacgtctcttcaacctccgctcaatttacttacaatggaacaggattcgctccattagccaaggtttgacatggacttggagttccttacacaacttggatttatcagggaatgacatccaaggaattgagccgggcacatttaaatgcctccccaatttacaaaaattgaatttggattccaacaagctcaccaatatctcacaggaaactgtcaatgcgtggatatcattaatatccatcacattgtctggaaatatgtgggaatgcagtcggagcatttgtcctttattttattggcttaagaatttcaaaggaaataaggaaagcaccatgatatgtgcgggacctaagcacatccagggtgaaaaggttagtgatgcagtggaaacatataatatctgttctgaagtccaggtggtcaacacagaaagatcacacctggtgccccaaactccccagaaacctctgattatccctagacctaccatcttcaaacctgacgtcacccaatccacctttgaaacaccaagcccttccccagggtttcagattcctggcgcagagcaagagtatgagcatgtttcatttcacaaaattattgccgggagtgtggctctctttctctcagtggccatgatcctcttggtgatctatgtgtcttggaaacgctacccagccagcatgaaacaactccagcaacactctcttatgaagaggcggcggaaaaaggccagagagtctgaaagacaaatgaattcccctttacaggagtattatgtggactacaagcctacaaactctgagaccatggatatatcggttaatggatctgggccctgcacatataccatctctggctccagggaatgtgagatgccacaccacatgaagcccttgccatattacagctatgaccagcctgtgatcgggtactgccaggcccaccagccactccatgtcaccaagggctatgagacagtgtctccagagcaggacgaaagccccggcctggagctgggccgagaccacagcttcatcgccaccatcgccaggtcggcagcaccggccatctacctagagagaattgcaaactaacgctgaagccaactcctcactggggagctccatgggggggagggagggccttcatcttaaaggagaatgggtgtccacaatcgcgcaatcgagcaagctcatcgttcctgttaaaacatttatggcatagagaaaagaaaaagagaaaaaaaaactgcttgaagagggcagcgaatgcacctgcagcattaccgggaggactgcagaactttctttgctttaaaacataaaacaaacaaaaatgctcccggatgtaaatagtaagagtgtcaagttcttataaaaatagatttcaccctagctacatataggtttgtttgtatatttgatttttctacactgcatggttcctgggctggagaaccacaggggagcaaataaacaggggtgggtgggaagctagggaaacaaccgttttcctctttaggtgtgtgtaattctcacagattttatttaaattgctttcatttattttttctttaaaaatgctgtttgttcttgttttgtttgttttaatttttttctttcctggtcaagtttctaatacaaaacatgagcattaaagcttatgttgtaccaaaagaaaatgtgctttaccacggaccacggagaaagttgaccacaaagtttgacaaaactactggaaaacccaataagtctgggtgaatgacccttcatgacaaatgccatatatggtacatgatagaaggaattttgttttgtcccattggcagccctcactgtgtaggatgcctgagagagccatgaagatctccgaatgagaagaccagcagaatcattctcatgtggactaaggctataagagagatatgaccatgggctcaatgaatgaaactgccaagctgacaaatttctaaacacaagataatgtgtaacattgctttttaaattaattatcaattagcttttgtgtagtttttatcaataaaagaaaaaatattgaaaaataaatata

SEQ ID NO: 148254 - DNA, 2227 bp, Homo sapiens
  Payload ID: 9353
  Gene Symbol: LRRTM4
  Gene Name: leucine rich repeat transmembrane neuronal 4
  Uniprot ID: Q86VH4
  ENST ID: ENST00000409884
  CDS Start-End: 313-2085
aaacactttaaacctgaccagctaaatggataaacctagcctgcatagcttttaaactggggtctcatacagcacaggaggcctacttgcttcaagaactgaaaatccagaggatgaattgctttatctgggaatggcaaaagccagcacaataaggaatgccagtttgtatggggctactagctcacatgcgggatcagaatggtgtgaatgacagccgcactgtgtcatgaaggtggtggtggtttccgcacaagagaccaaataagaagaaagctgagagaggggggaaacgtttttggatgacaaaggatgggtttccatttaattacgcagctgaaaggcatgagtgtggtgctggtgctacttcctacactgctgcttgttatgctcacgggtgctcagagagcttgcccaaagaactgcagatgtgatggcaaaattgtgtactgtgagtctcatgctttcgcagatatccctgagaacatttctggagggtcacaaggcttatcattaaggttcaacagcattcagaagctcaaatccaatcagtttgccggccttaaccagcttatatggctttatcttgaccataattacattagctcagtggatgaagatgcatttcaagggatccgtagactgaaagaattaattctaagctccaacaaaattacttatctgcacaataaaacatttcacccagttcccaatctccgcaatctggacctctcctacaataagcttcagacattgcaatctgaacaatttaaaggccttcggaaactcatcattttgcacttgagatctaactcactaaagactgtgcccataagagtttttcaagactgtcggaatcttgattttttggatttgggttacaatcgtcttcgaagcttgtcccgaaatgcatttgctggcctcttgaagttaaaggagctccacctggagcacaaccagttttccaagatcaactttgctcattttccacgtctcttcaacctccgctcaatttacttacaatggaacaggattcgctccattagccaaggtttgacatggacttggagttccttacacaacttggatttatcagggaatgacatccaaggaattgagccgggcacatttaaatgcctccccaatttacaaaaattgaatttggattccaacaagctcaccaatatctcacaggaaactgtcaatgcgtggatatcattaatatccatcacattgtctggaaatatgtgggaatgcagtcggagcatttgtcctttattttattggcttaagaatttcaaaggaaataaggaaagcaccatgatatgtgcgggacctaagcacatccagggtgaaaaggttagtgatgcagtggaaacatataatatctgttctgaagtccaggtggtcaacacagaaagatcacacctggtgccccaaactccccagaaacctctgattatccctagacctaccatcttcaaacctgacgtcacccaatccacctttgaaacaccaagcccttccccagggtttcagattcctggcgcagagcaagagtatgagcatgtttcatttcacaaaattattgccgggagtgtggctctctttctctcagtggccatgatcctcttggtgatctatgtgtcttggaaacgctacccagccagcatgaaacaactccagcaacactctcttatgaagaggcggcggaaaaaggccagagagtctgaaagacaaatgaattcccctttacaggagtattatgtggactacaagcctacaaactctgagaccatggatatatcggttaatggatctgggccctgcacatataccatctctggctccagggaatgtgagatgccacaccacatgaagcccttgccatattacagctatgaccagcctgtgatcgggtactgccaggcccaccagccactccatgtcaccaagggctatgagacagtgtctccagagcaggacgaaagccccggcctggagctgggccgagaccacagcttcatcgccaccatcgccaggtcggcagcaccggccatctacctagagagaattgcaaactaacgctgaagccaactcctcactggggagctccatgggggggagggagggccttcatcttaaaggagaatgggtgtccacaatcgcgcaatcgagcaagctcatcgttcctgttaaaacatttatggcatagagaaaagaaaaa

SEQ ID NO: 148255 - DNA, 485 bp, Homo sapiens
  Payload ID: 9353
  Gene Symbol: LRRTM4
  Gene Name: leucine rich repeat transmembrane neuronal 4
  ENST ID: ENST00000456154
  CDS Start-End: 412-485
aagactccgtgggcgtaggaccctccgagccaggtgagggatataatctcgtggtgccgttttttaagcccgtcgaaaatcgcagtattcgggtgggagtgacccgattttccagatgctgtctgtcacccctttctttgactaggaaagggaactccctgaccccttgcgcttcccgagtgaggcaatgcctcaccctgcttcggctcacgcacggtgcgcgcacccactgacctgcgcccactgtctggcactccctagtgagatgaacccagtacctcagatggaaatgcagaaatcacctgtcttctgtgtcgctcacactgagagctgtagaccggagcttttcctatttggccatcttgcgacaaagtgatcccaggtttccatttaattacgcagctgaaaggcatgagtgtggtgctggtgctacttcctacactgctgcttgttatgctcacgggtgctcagagagcttgcccaaa

SEQ ID NO: 148256 - DNA, 2332 bp, Homo sapiens
  Payload ID: 9354
  Gene Symbol: LRTOMT
  Gene Name: leucine rich transmembrane and O-methyltransferase domain containing
  Uniprot ID: Q96E66
  ENST ID: ENST00000289488
  CDS Start-End: 379-957
agagaaggggtatcaccgcttccggaccccggcctgtacttgaaggcaaagagaactacaaatcccagcgtcacccgcggccttgaagccccgcccctgacaaactgaaggtcccggtaagcatcgcgtcagtacttatggcgcctgccgggttgtggtgacgaaagcagttgccatggagttgctctgagtaaccctgaggcagtgggacgccaagactggagaggaagcgactgcggggagtatttccattttaaccggaaacaatccctgaacccacaggaatgaatgcctaatggtggagtttcagccatcagtgacaggctgaacccagactcccagggcacctgcttgcacctttgaatgatggcctgaactatgaacaaacgggactatatgaacacttcggtacaggagccccctcttgactactccttcagaagcatccacgtcattcaagatctggtaaatgaggagccaaggacaggactacgaccactgaagcgttcaaagtcggggaaatcactgacccagtccctgtggctgaataacaatgttctcaatgatctgagagacttcaaccaggtggcttcacagctgttggagcacccagagaacctggcctggatcgacctgtcctttaatgacctgacttccattgaccctgtcctaacaactttcttcaacctgagtgtcctctatcttcacggcaacagcatccagcgcctgggggaggtgaataagctggctgtccttcctcggctccgtagcctgacactccatgggaaccccatggaggaagagaaagggtataggcaatatgtgctgtgcaccctgtcccgtatcaccacgttcgacttcagtggggtcaccaaagcagaccgcaccacagctgaagtctggaaacgcatgaacatcaagcccaagaaggcctggaccaagcagaatacactttgaggctcccacgaccctagtagtcctaaaggcctaagcatagacagcatggtttgacaataaataatttgagctgttgagcagatgagaagtcacttacaccttgtagagatgttctctaactcaggcaactgcaagtagctctagccttttcttttcttttttttttttttgagacggagtctcactctgtcacacaggctggagtgcagtggcacgatcttggctcactgcaacctcagcctcccaggttcaagagattctcctgcctcagcctccccagtagctgtgattaaaggcgcctgccaccatgactggctaattttgttgttgttgttgttgttttgagacggtttcactcgtcaccccagctggagtgcagtggtgcgatctcagctcactgcaacctccgcctgctgggttcaagcgattctcctgcctcagcctcctgagtagctgggattacaggcgcctgctaccacatccagctaatttttttttttgagacggagtctcgctctgtcacccaggctggagtgcagtggcacgatctcggctcactgcaaactccgccttccaggttcacgccattctcctgcctcagcctcccaagtagctgggactataggcacctactaccacgcctggctaattttttgtatttttagtagagacggggtttcaccatgttagccaggatggtctccatctcctgaccttgtgatccacccacctcggcttcccccagctaattttttatattttagtagagacaaggtttcgccatgttggccaggctggtcttgaactcctgacctcaggtgatccgtctgctttggcctcccaaagtgctgggattagaagcgtgagccaccacgcccagcctttttttgtatttttagtagagatggggtttcgccatgttggccaggctggtctcaaactcctgacctcaggtgatctgcccacctcagcctcccaaagtgctaggattacaggataagccactgcacctggccagctctagtcttattttgctgaaaaagggaggcaattgagggaaaggcctgctggcctgggacactggagacgtgggtttaccacacagccttgggaaatttatctaactctctgggcccctttgtacttttcagcttagagatttgggggttaaagtagatcagtaatttccaaactcttcacagagtaccagggtctgtagagatgcctcacaggcctccatgacaggccaagaagatggcctatgatctctgaaaccagcccccacttcaatcagatcaaagtaattccattctgttttatatgctgggattctgcttaagatttcatttgataaaaagaatcttctgcttaaaaa

SEQ ID NO: 148257 - DNA, 3604 bp, Homo sapiens
  Payload ID: 9354
  Gene Symbol: LRTOMT
  Gene Name: leucine rich transmembrane and O-methyltransferase domain containing
  Uniprot ID: Q8WZ04
  ENST ID: ENST00000307198
  CDS Start-End: 877-1752
ctgccctttcggactcggttatggaggaggccttccgctcgcagcggcctctccagcaccccttttaggcctgagcacccgcaggggtgcccaggccgcacgccaaacgcgggcccgcgccggttacctggctgcgcgctcccgctctgcctcgcgattctccggaatcgtacctcttcgtgggctcgcgccagcgctgtgagcgcacaattagtttaaactatggccccgccccctcgcgctgccctctgattggcctctgtcggcggggcccgcttaaggacccgggaaaaggaagtttgagggccactgggaaagagaaggggtatcaccgcttccggaccccggcctgtacttgaaggcaaagagaactacaaatcccagcgtcacccgcggccttgaagccccgcccctgacaaactgaaggtcccggtaagcatcgcgtcagtacttatggcgcctgccgggttgtggtgacgaaagcagttgccatggagttgctctgagtaaccctgaggcagtgggacgccaagactggagaggaagcgactgcggatctggtaaatgaggagccaaggacaggactacgaccactgaagcgttcaaagtcggggaaatcactgacccagtccctgtggctgaataacaatgttctcaatgatctgagagacttcaaccaggtggcttcacagctgttggagcacccagagaacctggcctggatcgacctgtcctttaatgacctgacttccattgaccctgtcctaacaactttcttcaacctgagtgtcctctatcttcacggcaacagcatccagcgcctgggggaggtgaataagctggctgtccttcctcggctccgtagcctgacactccatgggaaccccatggaggaagagaaagggtatagcaggccctggactccccgacctgtcctgtgctctggtcctccagcccagggcccaggtagggaccatgtcccctgccattgcattggccttcctgccactggtggtaacattgctggtgcggtaccggcactacttccgattgctggtgcgcacggtcttgctgcgaagcctccgagactgcctgtcagggctgcggatcgaggagcgggccttcagctacgtgctcacccatgccctgcccggtgaccctggtcacatcctcaccaccctggaccactggagcagccgctgcgagtacttgagccacatggggcctgtcaaaggtcagatcctgatgcggctggtggaggagaaggcccctgcttgtgtgctggaattgggaacctactgtggatactctaccctgcttattgcccgagccctgccccctgggggtcgccttcttactgtggagcgggacccacgcacggcagcagtggctgaaaaactcatccgcctggccggctttgatgagcacatggtggagctcatcgtgggcagctcagaggacgtgatcccgtgcctacgcacccagtatcagctgagtcgggcagacctggtgctcctggcacaccggccacgatgttacctgagggacctgcagctgctggaggcccatgccctactgccagcaggtgccaccgtgctggctgaccatgtgctcttccctggtgcaccccgcttcttgcagtatgctaagagctgtggccgctaccgctgccgcctccaccacactggccttccagacttccctgccatcaaggatggaatagctcagctcacctatgctggaccaggctgaggtccaggcccaggggtacttactgatgcccacccccacccccacccaagcagggacctcaaaatcccctccctttcctgtttggggccttgacacacgctgggctcagggctagggagtctctcttcccacctctgacctctttcagcctctacactgacctcaagtgtcaagttctatcaggctgcttggtctcactaggccccctctttccagagagaaccatggactgacagcaagaagcctgagctcccgacccagctctgtcactgatttgctgagtgactccaagggaatccccaccttgctctgagatttaatcttctctcttaacacgaaggaagctggatgggagagctccaggggcctcccagttctcggcctcagaaagcctcccatcctcagcccatgccattctgggtgggatcagaggaagtggcaatgagttagacgccctgcaggaatagctggatgcaagctgggccagagaaaatggcacagaaccctggacccagggccagggatgccctggccttccctaactctggcccacctagccaattaggtgtggctgatgtcccttgagtgccctcttcctaaagcccaaaagaagatgctggactcctctgggccccaccaacaaatagggaatagacatgggtggaaaatcactcctttgtctttattaaagaaacttagaccagacctggcaatcaaggggtgaggtactggccaggaaggtggagtaggtttcaggccctggggatttcaagtgcagactgatggcctgggaggggccaaagagaccagatcctggcagcagctgaggaggtgcccaagggcactttcaggcactggggccatcagctggttctgtgggcaggggttgggggttgggatgcagggtagtttgggctggcctggaatctccctgaggccaccctgccttgtctacctagatcatccactggtcctgatcctgttcgttgccttccatgtccacctggagaggaggctgggtgtgggtggggaggggcctcagccagcctcagccccagatcctgcccctggctggatccagggtttctgtaccccttggccatcaactgggtcaggagcaagggtccaggaacagaggccctcccccataccccttgcctacctcattgacctctccatcatccggtgactcattgtagtcattcatctcgtccatgtcctgcatatcctcatcatcctctgagtcctcttcactatcctcatcatcttcatcatcctcttcttcctcgtcatcatagtgctggtgggcaggacagagcctgtaagccctacaggcctgcatggaccagttcaagaactgacccacttgagcctctctctagggccaatgaatgaccccctaccccgacactccctccttgagtctagcaggctggtgcatgttctgcaggaccttaatgctaggcccaatgcccaccccttctatctccccttttaggcttttacccagatctgagaaccacaactgctctgggtcagagacaggacattcagaattagagcagagcctcggtccactgcggcccccacacaggccccacctgctagagccactcacctctgaggctggcttgccaataggaaccaggttgttgtctttctccgcgatgctttggagctgtgggcaaaggcacagaggaacaaggccagagcccaagtagggcaggtcaggggcatgggactggcccattctgcccagaagacaacccacacgtgttggggagaagcttcctcccagttctcagggagatacaatccctttcttgtcatctgccatttatgaacttgatcc

SEQ ID NO: 148258 - DNA, 253 bp, Homo sapiens
  Payload ID: 9354
  Gene Symbol: LRTOMT
  Gene Name: leucine rich transmembrane and O-methyltransferase domain containing
  ENST ID: ENST00000440313
  CDS Start-End: 74-217
ggcaacagcatccagcgcctgggggaggtgaataagctggctgtccttcctcggctccgtagcctgacactccatgggaaccccatggaggaagagaaagggtatagacggagtctcactctgtcacacaggctggagtgcagtggcacgatcttggctcactgcaacctcagcctcccaggttcaagagattctcctgcctcagcctccccagtagctgtgattaaaggcgcctgccaccatgactggctaa

SEQ ID NO: 148259 - DNA, 2685 bp, Homo sapiens
  Payload ID: 9354
  Gene Symbol: LRTOMT
  Gene Name: leucine rich transmembrane and O-methyltransferase domain containing
  ENST ID: ENST00000419228
  CDS Start-End: 79-546
ttcacggcaacagcatccagcgcctgggggaggtgaataagctggctgtccttcctcggctccgtagcctgacactccatgggaaccccatggaggaagagaaagggtatagcaggccctggactccccgacctgtcctgtgctctggtcctccagcccagcctccgagactgcctgtcagggctgcggatcgaggagcgggccttcagctacgtgctcacccatgccctgcccggtgaccctggtcacatcctcaccaccctggaccactggagcagccgctgcgagtacttgagccacatggggcctgtcaaaggtcagatcctgatgcggctggtggaggagaagcccctgcttgtgtgctggaattgggaacctactgtggatactctaccctgcttattgcccgagccctgccccctgggggtcgccttcttactgtggagcgggacccacgcacggcagcagtggctgaaaaactcatccgcctggccggctttgatgagcacatggtggagctcatcgtgggcagctcagaggacgtgatcccgtgcctacgcacccagtatcagctgagtcgggcagacctggtgctcctggcacaccggccacgatgttacctgagggacctgcagctgctggaggcccatgccctactgccagcaggtgccaccgtgctggctgaccatgtgctcttccctggtgcaccccgcttcttgcagtatgctaagagctgtggccgctaccgctgccgcctccaccacactggccttccagacttccctgccatcaaggatggaatagctcagctcacctatgctggaccaggctgaggtccaggcccaggggtacttactgatgcccacccccacccccacccaagcagggacctcaaaatcccctccctttcctgtttggggccttgacacacgctgggctcagggctagggagtctctcttcccacctctgacctctttcagcctctacactgacctcaagtgtcaagttctatcaggctgcttggtctcactaggccccctctttccagagagaaccatggactgacagcaagaagcctgagctcccgacccagctctgtcactgatttgctgagtgactccaagggaatccccaccttgctctgagatttaatcttctctcttaacacgaaggaagctggatgggagagctccaggggcctcccagttctcggcctcagaaagcctcccatcctcagcccatgccattctgggtgggatcagaggaagtggcaatgagttagacgccctgcaggaatagctggatgcaagctgggccagagaaaatggcacagaaccctggacccagggccagggatgccctggccttccctaactctggcccacctagccaattaggtgtggctgatgtcccttgagtgccctcttcctaaagcccaaaagaagatgctggactcctctgggccccaccaacaaatagggaatagacatgggtggaaaatcactcctttgtctttattaaagaaacttagaccagacctggcaatcaaggggtgaggtactggccaggaaggtggagtaggtttcaggccctggggatttcaagtgcagactgatggcctgggaggggccaaagagaccagatcctggcagcagctgaggaggtgcccaagggcactttcaggcactggggccatcagctggttctgtgggcaggggttgggggttgggatgcagggtagtttgggctggcctggaatctccctgaggccaccctgccttgtctacctagatcatccactggtcctgatcctgttcgttgccttccatgtccacctggagaggaggctgggtgtgggtggggaggggcctcagccagcctcagccccagatcctgcccctggctggatccagggtttctgtaccccttggccatcaactgggtcaggagcaagggtccaggaacagaggccctcccccataccccttgcctacctcattgacctctccatcatccggtgactcattgtagtcattcatctcgtccatgtcctgcatatcctcatcatcctctgagtcctcttcactatcctcatcatcttcatcatcctcttcttcctcgtcatcatagtgctggtgggcaggacagagcctgtaagccctacaggcctgcatggaccagttcaagaactgacccacttgagcctctctctagggccaatgaatgaccccctaccccgacactccctccttgagtctagcaggctggtgcatgttctgcaggaccttaatgctaggcccaatgcccaccccttctatctccccttttaggcttttacccagatctgagaaccacaactgctctgggtcagagacaggacattcagaattagagcagagcctcggtccactgcggcccccacacaggccccacctgctagagccactcacctctgaggctggcttgccaataggaaccaggttgttgtctttctccgcgatgctttggagctgtgggcaaaggcacagaggaacaaggccagagcccaagtagggcaggtcaggggcatgggactggcccattctgcccagaagacaacccacacgtgttggggagaagcttcctcccagttctcagggagatacaatccctttcttgtcatctgccatttatgaacttgatcc

SEQ ID NO: 148260 - DNA, 801 bp, Homo sapiens
  Payload ID: 9354
  Gene Symbol: LRTOMT
  Gene Name: leucine rich transmembrane and O-methyltransferase domain containing
  ENST ID: ENST00000439209
  CDS Start-End: 167-637
ccaagactggagaggaagcgactgcggggagtatttccattttaaccggaaacaatccctgaacccacaggaatgaatgcctaatggtggagtttcagccatcagtgacaggctgaacccagactcccagggcacctgcttgcacctttgaatgatggcctgaactatgaacaaacgggactatatgaacacttcggtacaggagccccctcttgactactccttcagaagcatccacgtcattcaagatctggtaaatgaggagccaaggacaggactacgaccactgaagcgttcaaagtcggggaaatcactgacccagtccctgtggctgaataacaatgttctcaatgatctgagagacttcaaccaggtggcttcacagctgttggagcacccagagaacctggcctggatcgacctgtcctttaatgacctgacttccattgaccctgtcctaacaactttcttcaacctgagtgtcctctatcttcacggcaacagcatccagcgcctgggggaggtgaataagctggctgtccttcctcggctccgtagcctgacactccatgggaaccccatggaggaagagaaagggtataggtggagctcatcgtgggcagctcagaggacgtgatcccgtgcctacgcacccagtatcagctgagtcgggcagacctggtgctcctggcacaccggccacgatgttacctgagggacctgcagctgctggaggcccatgccctactgccagcaggtgccaccgtgctggctgaccatgtgctcttccctggtgcaccc

SEQ ID NO: 148261 - DNA, 3299 bp, Homo sapiens
  Payload ID: 9354
  Gene Symbol: LRTOMT
  Gene Name: leucine rich transmembrane and O-methyltransferase domain containing
  Uniprot ID: Q96E66
  ENST ID: ENST00000427369
  CDS Start-End: 167-850
ccaagactggagaggaagcgactgcggggagtatttccattttaaccggaaacaatccctgaacccacaggaatgaatgcctaatggtggagtttcagccatcagtgacaggctgaacccagactcccagggcacctgcttgcacctttgaatgatggcctgaactatgaacaaacgggactatatgaacacttcggtacaggagccccctcttgactactccttcagaagcatccacgtcattcaagatctggtaaatgaggagccaaggacaggactacgaccactgaagcgttcaaagtcggggaaatcactgacccagtccctgtggctgaataacaatgttctcaatgatctgagagacttcaaccaggtggcttcacagctgttggagcacccagagaacctggcctggatcgacctgtcctttaatgacctgacttccattgaccctgtcctaacaactttcttcaacctgagtgtcctctatcttcacggcaacagcatccagcgcctgggggaggtgaataagctggctgtccttcctcggctccgtagcctgacactccatgggaaccccatggaggaagagaaagggtatagcaggccctggactccccgacctgtcctgtgctctggtcctccagcccagggcccaggtagggaccatgtcccctgccattgcattggccttcctgccactggtggtaacattgctggtgcggtaccggcactacttccgattgctggtgcgcacggtcttgctgcgaagcctccgagactgcctgtcagggctgcggatcgaggagcgggccttcagctacgtgctcacccatgccctgcccggtgaccctggtcacatcctcaccaccctggaccactggagcagccgctgcgagtacttgagccacatggggcctgtcaaaggtcagatcctgatgcggctggtggaggagaaggcccctgcttgtgtgctggaattgggaacctactgtggatactctaccctgcttattgcccgagccctgccccctgggggtcgccttcttactgtggagcgggacccacgcacggcagcagtggctgaaaaactcatccgcctggccggctttgatgagcacatggtggagctcatcgtgggcagctcagaggacgtgatcccgtgcctacgcacccagtatcagctgagtcgggcagacctggtgctcctggcacaccggccacgatgttacctgagggacctgcagctgctggaggcccatgccctactgccagcaggtgccaccgtgctggctgaccatgtgctcttccctggtgcaccccgcttcttgcagtatgctaagagctgtggccgctaccgctgccgcctccaccacactggccttccagacttccctgccatcaaggatggaatagctcagctcacctatgctggaccaggctgaggtccaggcccaggggtacttactgatgcccacccccacccccacccaagcagggacctcaaaatcccctccctttcctgtttggggccttgacacacgctgggctcagggctagggagtctctcttcccacctctgacctctttcagcctctacactgacctcaagtgtcaagttctatcaggctgcttggtctcactaggccccctctttccagagagaaccatggactgacagcaagaagcctgagctcccgacccagctctgtcactgatttgctgagtgactccaagggaatccccaccttgctctgagatttaatcttctctcttaacacgaaggaagctggatgggagagctccaggggcctcccagttctcggcctcagaaagcctcccatcctcagcccatgccattctgggtgggatcagaggaagtggcaatgagttagacgccctgcaggaatagctggatgcaagctgggccagagaaaatggcacagaaccctggacccagggccagggatgccctggccttccctaactctggcccacctagccaattaggtgtggctgatgtcccttgagtgccctcttcctaaagcccaaaagaagatgctggactcctctgggccccaccaacaaatagggaatagacatgggtggaaaatcactcctttgtctttattaaagaaacttagaccagacctggcaatcaaggggtgaggtactggccaggaaggtggagtaggtttcaggccctggggatttcaagtgcagactgatggcctgggaggggccaaagagaccagatcctggcagcagctgaggaggtgcccaagggcactttcaggcactggggccatcagctggttctgtgggcaggggttgggggttgggatgcagggtagtttgggctggcctggaatctccctgaggccaccctgccttgtctacctagatcatccactggtcctgatcctgttcgttgccttccatgtccacctggagaggaggctgggtgtgggtggggaggggcctcagccagcctcagccccagatcctgcccctggctggatccagggtttctgtaccccttggccatcaactgggtcaggagcaagggtccaggaacagaggccctcccccataccccttgcctacctcattgacctctccatcatccggtgactcattgtagtcattcatctcgtccatgtcctgcatatcctcatcatcctctgagtcctcttcactatcctcatcatcttcatcatcctcttcttcctcgtcatcatagtgctggtgggcaggacagagcctgtaagccctacaggcctgcatggaccagttcaagaactgacccacttgagcctctctctagggccaatgaatgaccccctaccccgacactccctccttgagtctagcaggctggtgcatgttctgcaggaccttaatgctaggcccaatgcccaccccttctatctccccttttaggcttttacccagatctgagaaccacaactgctctgggtcagagacaggacattcagaattagagcagagcctcggtccactgcggcccccacacaggccccacctgctagagccactcacctctgaggctggcttgccaataggaaccaggttgttgtctttctccgcgatgctttggagctgtgggcaaaggcacagaggaacaaggccagagcccaagtagggcaggtcaggggcatgggactggcccattctgcccagaagacaacccacacgtgttggggagaagcttcctcccagttctcagggagatacaatccctttcttgtcatctgccatttatgaacttgatccaa

SEQ ID NO: 148262 - DNA, 3194 bp, Homo sapiens
  Payload ID: 9354
  Gene Symbol: LRTOMT
  Gene Name: leucine rich transmembrane and O-methyltransferase domain containing
  Uniprot ID: Q8WZ04
  ENST ID: ENST00000435085
  CDS Start-End: 462-1337
caggctgaacccagactcccagggcacctgcttgcacctttgaatgatggcctgaactatgaacaaacgggactatatgaacacttcggtacaggagccccctcttgactactccttcagaagcatccacgtcattcaagatctggtaaatgaggagccaaggacaggactacgaccactgaagcgttcaaagtcggggaaatcactgacccagtccctgtggctgaataacaatgttctcaatgatctgagagacttcaaccaggtggcttcacagctgttggagcacccagagaacctggcctggatcgacctgtcctttaatgacctgacttccattgaccctgtcctaacaactttcttcaacctgagtgtcctctatcttcacggcaacagcatccagcgcctgggggaggtgaataagctggctgtccttcctcggctccgtagcctgacactccatgggaaccccatggaggaagagaaagggtatagcaggccctggactccccgacctgtcctgtgctctggtcctccagcccagggcccaggtagggaccatgtcccctgccattgcattggccttcctgccactggtggtaacattgctggtgcggtaccggcactacttccgattgctggtgcgcacggtcttgctgcgaagcctccgagactgcctgtcagggctgcggatcgaggagcgggccttcagctacgtgctcacccatgccctgcccggtgaccctggtcacatcctcaccaccctggaccactggagcagccgctgcgagtacttgagccacatggggcctgtcaaaggtcagatcctgatgcggctggtggaggagaaggcccctgcttgtgtgctggaattgggaacctactgtggatactctaccctgcttattgcccgagccctgccccctgggggtcgccttcttactgtggagcgggacccacgcacggcagcagtggctgaaaaactcatccgcctggccggctttgatgagcacatggtggagctcatcgtgggcagctcagaggacgtgatcccgtgcctacgcacccagtatcagctgagtcgggcagacctggtgctcctggcacaccggccacgatgttacctgagggacctgcagctgctggaggcccatgccctactgccagcaggtgccaccgtgctggctgaccatgtgctcttccctggtgcaccccgcttcttgcagtatgctaagagctgtggccgctaccgctgccgcctccaccacactggccttccagacttccctgccatcaaggatggaatagctcagctcacctatgctggaccaggctgaggtccaggcccaggggtacttactgatgcccacccccacccccacccaagcagggacctcaaaatcccctccctttcctgtttggggccttgacacacgctgggctcagggctagggagtctctcttcccacctctgacctctttcagcctctacactgacctcaagtgtcaagttctatcaggctgcttggtctcactaggccccctctttccagagagaaccatggactgacagcaagaagcctgagctcccgacccagctctgtcactgatttgctgagtgactccaagggaatccccaccttgctctgagatttaatcttctctcttaacacgaaggaagctggatgggagagctccaggggcctcccagttctcggcctcagaaagcctcccatcctcagcccatgccattctgggtgggatcagaggaagtggcaatgagttagacgccctgcaggaatagctggatgcaagctgggccagagaaaatggcacagaaccctggacccagggccagggatgccctggccttccctaactctggcccacctagccaattaggtgtggctgatgtcccttgagtgccctcttcctaaagcccaaaagaagatgctggactcctctgggccccaccaacaaatagggaatagacatgggtggaaaatcactcctttgtctttattaaagaaacttagaccagacctggcaatcaaggggtgaggtactggccaggaaggtggagtaggtttcaggccctggggatttcaagtgcagactgatggcctgggaggggccaaagagaccagatcctggcagcagctgaggaggtgcccaagggcactttcaggcactggggccatcagctggttctgtgggcaggggttgggggttgggatgcagggtagtttgggctggcctggaatctccctgaggccaccctgccttgtctacctagatcatccactggtcctgatcctgttcgttgccttccatgtccacctggagaggaggctgggtgtgggtggggaggggcctcagccagcctcagccccagatcctgcccctggctggatccagggtttctgtaccccttggccatcaactgggtcaggagcaagggtccaggaacagaggccctcccccataccccttgcctacctcattgacctctccatcatccggtgactcattgtagtcattcatctcgtccatgtcctgcatatcctcatcatcctctgagtcctcttcactatcctcatcatcttcatcatcctcttcttcctcgtcatcatagtgctggtgggcaggacagagcctgtaagccctacaggcctgcatggaccagttcaagaactgacccacttgagcctctctctagggccaatgaatgaccccctaccccgacactccctccttgagtctagcaggctggtgcatgttctgcaggaccttaatgctaggcccaatgcccaccccttctatctccccttttaggcttttacccagatctgagaaccacaactgctctgggtcagagacaggacattcagaattagagcagagcctcggtccactgcggcccccacacaggccccacctgctagagccactcacctctgaggctggcttgccaataggaaccaggttgttgtctttctccgcgatgctttggagctgtgggcaaaggcacagaggaacaaggccagagcccaagtagggcaggtcaggggcatgggactggcccattctgcccagaagacaacccacacgtgttggggagaagcttcctcccagttctcagggagatacaatccctttcttgtcatctgccatttatgaacttgatccaaata

SEQ ID NO: 148263 - DNA, 2007 bp, Homo sapiens
  Payload ID: 9354
  Gene Symbol: LRTOMT
  Gene Name: leucine rich transmembrane and O-methyltransferase domain containing
  Uniprot ID: Q96E66
  ENST ID: ENST00000447974
  CDS Start-End: 59-637
caggctgaacccagactcccagggcacctgcttgcacctttgaatgatggcctgaactatgaacaaacgggactatatgaacacttcggtacaggagccccctcttgactactccttcagaagcatccacgtcattcaagatctggtaaatgaggagccaaggacaggactacgaccactgaagcgttcaaagtcggggaaatcactgacccagtccctgtggctgaataacaatgttctcaatgatctgagagacttcaaccaggtggcttcacagctgttggagcacccagagaacctggcctggatcgacctgtcctttaatgacctgacttccattgaccctgtcctaacaactttcttcaacctgagtgtcctctatcttcacggcaacagcatccagcgcctgggggaggtgaataagctggctgtccttcctcggctccgtagcctgacactccatgggaaccccatggaggaagagaaagggtataggcaatatgtgctgtgcaccctgtcccgtatcaccacgttcgacttcagtggggtcaccaaagcagaccgcaccacagctgaagtctggaaacgcatgaacatcaagcccaagaaggcctggaccaagcagaatacactttgaggctcccacgaccctagtagtcctaaaggcctaagcatagacagcatggtttgacaataaataatttgagctgttgagcagatgagaagtcacttacaccttgtagagatgttctctaactcaggcaactgcaagtagctctagccttttcttttcttttttttttttttgagacggagtctcactctgtcacacaggctggagtgcagtggcacgatcttggctcactgcaacctcagcctcccaggttcaagagattctcctgcctcagcctccccagtagctgtgattaaaggcgcctgccaccatgactggctaattttgttgttgttgttgttgttttgagacggtttcactcgtcaccccagctggagtgcagtggtgcgatctcagctcactgcaacctccgcctgctgggttcaagcgattctcctgcctcagcctcctgagtagctgggattacaggcgcctgctaccacatccagctaatttttttttttgagacggagtctcgctctgtcacccaggctggagtgcagtggcacgatctcggctcactgcaaactccgccttccaggttcacgccattctcctgcctcagcctcccaagtagctgggactataggcacctactaccacgcctggctaattttttgtatttttagtagagacggggtttcaccatgttagccaggatggtctccatctcctgaccttgtgatccacccacctcggcttcccccagctaattttttatattttagtagagacaaggtttcgccatgttggccaggctggtcttgaactcctgacctcaggtgatccgtctgctttggcctcccaaagtgctgggattagaagcgtgagccaccacgcccagcctttttttgtatttttagtagagatggggtttcgccatgttggccaggctggtctcaaactcctgacctcaggtgatctgcccacctcagcctcccaaagtgctaggattacaggataagccactgcacctggccagctctagtcttattttgctgaaaaagggaggcaattgagggaaaggcctgctggcctgggacactggagacgtgggtttaccacacagccttgggaaatttatctaactctctgggcccctttgtacttttcagcttagagatttgggggttaaagtagatcagtaatttccaaactcttcacagagtaccagggtctgtagagatgcctcacaggcctccatgacaggccaagaagatggcctatgatctctgaaaccagcccccacttcaatcagatcaaagtaattccattctgttttatatgctgggattctgcttaagatttcatttgataaaaagaatcttctgctt

SEQ ID NO: 148264 - DNA, 1263 bp, Homo sapiens
  Payload ID: 9354
  Gene Symbol: LRTOMT
  Gene Name: leucine rich transmembrane and O-methyltransferase domain containing
  ENST ID: ENST00000535883
  CDS Start-End: 460-576
ctcgcgctgccctctgattggcctctgtcggcggggcccgcttaaggacccgggaaaaggaagtttgagggccactgggaaagagaaggggtatcaccgcttccggaccccggcctgtacttgaaggcaaagagaactacaaatcccagcgtcacccgcggccttgaagccccgcccctgacaaactgaaggtcccggtaagcatcgcgtcagtacttatggcgcctgccgggttgtggtgacgaaagcagttgccatggagttgctctgagtaaccctgaggcagtgggacgccaagactggagaggaagcgactgcggggagtatttccattttaaccggaaacaatccctgaacccacaggaatgaatgcctaatggtggagtttcagccatcagtgacaggctgaacccagactcccagggcacctgcttgcacctttgaatgatggcctgaactatgaacaaacgggactatatgaacacttcggtacaggagccccctcttgactactccttcagaagcatccacgtcattcaagcaaatctgaaaggaaacagggggctatcacagtagttgatcatctttaaaagaagccaggctacagcaggaaagtcaagtggaagaaaactgggaagccagtctatcagccaatagttttattctcctgtttttacctgaagagaggaggaaaacacaggctcctgtggagtcccagcaaatctggtaaatgaggagccaaggacaggactacgaccactgaagcgttcaaagtcggggaaatcactgacccagtccctgtggctgaataacaatgttctcaatgatctgagagacttcaaccaggtggcttcacagctgttggagcacccagagaacctggcctggatcgacctgtcctttaatgacctgacttccattgaccctgtcctaacaactttcttcaacctgagtgtcctctatcttcacggcaacagcatccagcgcctgggggaggtgaataagctggctgtccttcctcggctccgtagcctgacactccatgggaaccccatggaggaagagaaagggtataggcaatatgtgctgtgcaccctgtcccgtatcaccacgttcgacttcagtggggtcaccaaagcagaccgcaccacagctgaagtctggaaacgcatgaacatcaagcccaagaaggcctggaccaagcagaatacactttgaggctcccacgaccctagtagtcctaaaggcctaagcatagacagc

SEQ ID NO: 148265 - DNA, 428 bp, Homo sapiens
  Payload ID: 9354
  Gene Symbol: LRTOMT
  Gene Name: leucine rich transmembrane and O-methyltransferase domain containing
  ENST ID: ENST00000539587
  CDS Start-End: 176-307
agttgctctgagtaaccctgaggcagtgggacgccaagactggagaggaagcgactgcgggtcctaacaactttcttcaacctgagtgtcctctatcttcacggcaacagcatccagcgcctgggggaggtgaataagctggctgtccttcctcggctccgtagcctgacactccatgggaaccccatggaggaagagaaagggtataggcaatatgtgctgtgcaccctgtcccgtatcaccacgttcgacttcagtggggtcaccaaagcagaccgcaccacagctgaagtctggaaacgcatgaacatcaagcccaagaaggcctggaccaagcagaatacactttgaggctcccacgaccctagtagtcctaaaggcctaagcatagacagcatggtttgacaataaataatttgagctgttga

SEQ ID NO: 148266 - DNA, 308 bp, Homo sapiens
  Payload ID: 9354
  Gene Symbol: LRTOMT
  Gene Name: leucine rich transmembrane and O-methyltransferase domain containing
  ENST ID: ENST00000537483
  CDS Start-End: 113-308
atccctgaacccacaggaatgaatgcctaatggtggagtttcagccatcagtgacaggctgaacccagactcccagggcacctgcttgcacctttgaatgatggcctgaactatgaacaaacgggactatatgaacacttcggtacaggagccccctcttgactactccttcagaagcatccacgtcattcaaggtcagcccccagagcacagtactccactcactaaggcagcaggcccagtgtggtccctaggaagaaaccataatctacttaaaagcctaaagagattcttcccatatgcttgca

SEQ ID NO: 148267 - DNA, 726 bp, Homo sapiens
  Payload ID: 9354
  Gene Symbol: LRTOMT
  Gene Name: leucine rich transmembrane and O-methyltransferase domain containing
  Uniprot ID: Q96E66
  ENST ID: ENST00000541614
  CDS Start-End: 117-593
aacaatccctgaacccacaggaatgaatgcctaatggtggagtttcagccatcagtgacaggctgaacccagactcccagggcacctgcttgcacctttgaatgatggcctgaactatgaacaaacgggactatatgaacacttcggtacaggagccccctcttgactactccttcagaagcatccacgtcattcaagatctggtaaatgaggagccaaggacaggactacgaccactgaagcgttcaaagtcggggaaatcactgacccagtccctgtggctgaataacaatgttctcaatgatctgagagacttcaaccaggtggcttcacagctgttggagcacccagagaacctggcctggatcgacctgtcctttaatgacctgacttccattgaccctgtcctaacaactttcttcaacctgagtgtcctctatcttcacggcaacagcatccagcgcctgggggaggtgaataagctggctgtccttcctcggctccgtagcctgacactccatgggaaccccatggaggaagagaaagggtatagagtaccagggtctgtagagatgcctcacaggcctccatgacaggccaagaagatggcctatgatctctgaaaccagcccccacttcaatcagatcaaagtaattccattctgttttatatgctgggattctgcttaagatttcatttgataaaaagaatcttctgcttaaaaa

SEQ ID NO: 148268 - DNA, 842 bp, Homo sapiens
  Payload ID: 9354
  Gene Symbol: LRTOMT
  Gene Name: leucine rich transmembrane and O-methyltransferase domain containing
  ENST ID: ENST00000538413
  CDS Start-End: 566-842
tttcggactcggttatggaggaggccttccgctcgcagcggcctctccagcaccccttttaggcctgagcacccgcaggggtgcccaggccgcacgccaaacgcgggcccgcgccggttacctggctgcgcgctcccgctctgcctcgcgattctccggaatcgtacctcttcgtgggctcgcgccagcgctgtgagcgcacaattagtttaaactatggccccgccccctcgcgctgccctctgattggcctctgtcggcggggcccgcttaaggacccgggaaaaggaagtttgagggccactgggaaagagaaggggtatcaccgcttccggaccccggcctgtacttgaaggcaaagagaactacaaatcccagcgtcacccgcggccttgaagccccgcccctgacaaactgaaggtcccgggagtatttccattttaaccggaaacaatccctgaacccacaggaatgaatgcctaatggtggagtttcagccatcagtgacaggctgaacccagactcccagggcacctgcttgcacctttgaatgatggcctgaactatgaacaaacgggactatatgaacacttcggtacaggagccccctcttgactactccttcagaagcatccacgtcattcaagatctggtaaatgaggagccaaggacaggactacgaccactgaagcgttcaaagtcggggaaatcactgacccagtccctgtggctgaataacaatgttctcaatgatctgagagacttcaaccaggtggcttcacagctgttggagcacccagagaacctggcctggatcgacctgtcctttaatgacctgactt

SEQ ID NO: 148269 - DNA, 527 bp, Homo sapiens
  Payload ID: 9354
  Gene Symbol: LRTOMT
  Gene Name: leucine rich transmembrane and O-methyltransferase domain containing
  ENST ID: ENST00000542846
  CDS Start-End: 217-527
ctatattccaagcagacagagctggaaggagacactgttccacttagaggcccagtggcaggtgcagggaacttatgggagtatttccattttaaccggaaacaatccctgaacccacaggaatgaatgcctaatggtggagtttcagccatcagtgacaggctgaacccagactcccagggcacctgcttgcacctttgaatgatggcctgaactatgaacaaacgggactatatgaacacttcggtacaggagccccctcttgactactccttcagaagcatccacgtcattcaagatctggtaaatgaggagccaaggacaggactacgaccactgaagcgttcaaagtcggggaaatcactgacccagtccctgtggctgaataacaatgttctcaatgatctgagagacttcaaccaggtggcttcacagctgttggagcacccagagaacctggcctggatcgacctgtcctttaatgacctgacttccattgaccctgtcctaacaactttcttcaacct

SEQ ID NO: 148270 - DNA, 2402 bp, Homo sapiens
  Payload ID: 9354
  Gene Symbol: LRTOMT
  Gene Name: leucine rich transmembrane and O-methyltransferase domain containing
  Uniprot ID: Q96E66
  ENST ID: ENST00000324866
  CDS Start-End: 167-607
ccaagactggagaggaagcgactgcggggagtatttccattttaaccggaaacaatccctgaacccacaggaatgaatgcctaatggtggagtttcagccatcagtgacaggctgaacccagactcccagggcacctgcttgcacctttgaatgatggcctgaactatgaacaaacgggactatatgaacacttcggtacaggagccccctcttgactactccttcagaagcatccacgtcattcaagatctggtaaatgaggagccaaggacaggactacgaccactgaagcgttcaaagtcggggaaatcactgacccagtccctgtggctgaataacaatgttctcaatgatctgagagacttcaaccaggtggcttcacagctgttggagcacccagagaacctggcctggatcgacctgtcctttaatgacctgacttccattgaccctgtcctaacaactttcttcaacctgagtgtcctctatcttcacggcaacagcatccagcgcctgggggaggtgaataagctggctgtccttcctcggctccgtagcctgacactccatgggaaccccatggaggaagagaaagggtataggtaagtgccctgcccctggaggtagcgtctagctgggctcccctaaaggaaaggaggaggagaaacaagaaatctacgaccattcttctgccatgcttggacctgggaagggagtaacagacctctaagcattccttgctctcagtcaggataaacctaatctttcccaaactatgctcaagtccctccattccttgcagtcagggaagacaacagcaactagtggagggggaaggggattctggtgggggtgctggcccccagcctaagtcttccccacaggcaatatgtgctgtgcaccctgtcccgtatcaccacgttcgacttcagtggggtcaccaaagcagaccgcaccacagctgaagtctggaaacgcatgaacatcaagcccaagaaggcctggaccaagcagaatacactttgaggctcccacgaccctagtagtcctaaaggcctaagcatagacagcatggtttgacaataaataatttgagctgttgagcagatgagaagtcacttacaccttgtagagatgttctctaactcaggcaactgcaagtagctctagccttttcttttcttttttttttttttgagacggagtctcactctgtcacacaggctggagtgcagtggcacgatcttggctcactgcaacctcagcctcccaggttcaagagattctcctgcctcagcctccccagtagctgtgattaaaggcgcctgccaccatgactggctaattttgttgttgttgttgttgttttgagacggtttcactcgtcaccccagctggagtgcagtggtgcgatctcagctcactgcaacctccgcctgctgggttcaagcgattctcctgcctcagcctcctgagtagctgggattacaggcgcctgctaccacatccagctaatttttttttttgagacggagtctcgctctgtcacccaggctggagtgcagtggcacgatctcggctcactgcaaactccgccttccaggttcacgccattctcctgcctcagcctcccaagtagctgggactataggcacctactaccacgcctggctaattttttgtatttttagtagagacggggtttcaccatgttagccaggatggtctccatctcctgaccttgtgatccacccacctcggcttcccccagctaattttttatattttagtagagacaaggtttcgccatgttggccaggctggtcttgaactcctgacctcaggtgatccgtctgctttggcctcccaaagtgctgggattagaagcgtgagccaccacgcccagcctttttttgtatttttagtagagatggggtttcgccatgttggccaggctggtctcaaactcctgacctcaggtgatctgcccacctcagcctcccaaagtgctaggattacaggataagccactgcacctggccagctctagtcttattttgctgaaaaagggaggcaattgagggaaaggcctgctggcctgggacactggagacgtgggtttaccacacagccttgggaaatttatctaactctctgggcccctttgtacttttcagcttagagatttgggggttaaagtagatcagtaatttccaaactcttcacagagtaccagggtctgtagagatgcctcacaggcctccatgacaggccaagaagatggcctatgatctctgaaaccagcccccacttcaatcagatcaaagtaattccattctgttttatatgctgggattctgcttaagatttcatttgataaaaagaatcttctgcttaaaaa

SEQ ID NO: 148271 - DNA, 3182 bp, Homo sapiens
  Payload ID: 9354
  Gene Symbol: LRTOMT
  Gene Name: leucine rich transmembrane and O-methyltransferase domain containing
  Uniprot ID: Q96E66
  ENST ID: ENST00000544409
  CDS Start-End: 167-730
ccaagactggagaggaagcgactgcggggagtatttccattttaaccggaaacaatccctgaacccacaggaatgaatgcctaatggtggagtttcagccatcagtgacaggctgaacccagactcccagggcacctgcttgcacctttgaatgatggcctgaactatgaacaaacgggactatatgaacacttcggtacaggagccccctcttgactactccttcagaagcatccacgtcattcaagatctggtaaatgaggagccaaggacaggactacgaccactgaagcgttcaaagtcggggaaatcactgacccagtccctgtggctgaataacaatgttctcaatgatctgagagacttcaaccaggtggcttcacagctgttggagcacccagagaacctggcctggatcgacctgtcctttaatgacctgacttccattgaccctgtcctaacaactttcttcaacctgagtgtcctctatcttcacggcaacagcatccagcgcctgggggaggtgaataagctggctgtccttcctcggctccgtagcctgacactccatgggaaccccatggaggaagagaaagggtatagcaggccctggactccccgacctgtcctgtgctctggtcctccagcccagcctccgagactgcctgtcagggctgcggatcgaggagcgggccttcagctacgtgctcacccatgccctgcccggtgaccctggtcacatcctcaccaccctggaccactggagcagccgctgcgagtacttgagccacatggggcctgtcaaaggtcagatcctgatgcggctggtggaggagaaggcccctgcttgtgtgctggaattgggaacctactgtggatactctaccctgcttattgcccgagccctgccccctgggggtcgccttcttactgtggagcgggacccacgcacggcagcagtggctgaaaaactcatccgcctggccggctttgatgagcacatggtggagctcatcgtgggcagctcagaggacgtgatcccgtgcctacgcacccagtatcagctgagtcgggcagacctggtgctcctggcacaccggccacgatgttacctgagggacctgcagctgctggaggcccatgccctactgccagcaggtgccaccgtgctggctgaccatgtgctcttccctggtgcaccccgcttcttgcagtatgctaagagctgtggccgctaccgctgccgcctccaccacactggccttccagacttccctgccatcaaggatggaatagctcagctcacctatgctggaccaggctgaggtccaggcccaggggtacttactgatgcccacccccacccccacccaagcagggacctcaaaatcccctccctttcctgtttggggccttgacacacgctgggctcagggctagggagtctctcttcccacctctgacctctttcagcctctacactgacctcaagtgtcaagttctatcaggctgcttggtctcactaggccccctctttccagagagaaccatggactgacagcaagaagcctgagctcccgacccagctctgtcactgatttgctgagtgactccaagggaatccccaccttgctctgagatttaatcttctctcttaacacgaaggaagctggatgggagagctccaggggcctcccagttctcggcctcagaaagcctcccatcctcagcccatgccattctgggtgggatcagaggaagtggcaatgagttagacgccctgcaggaatagctggatgcaagctgggccagagaaaatggcacagaaccctggacccagggccagggatgccctggccttccctaactctggcccacctagccaattaggtgtggctgatgtcccttgagtgccctcttcctaaagcccaaaagaagatgctggactcctctgggccccaccaacaaatagggaatagacatgggtggaaaatcactcctttgtctttattaaagaaacttagaccagacctggcaatcaaggggtgaggtactggccaggaaggtggagtaggtttcaggccctggggatttcaagtgcagactgatggcctgggaggggccaaagagaccagatcctggcagcagctgaggaggtgcccaagggcactttcaggcactggggccatcagctggttctgtgggcaggggttgggggttgggatgcagggtagtttgggctggcctggaatctccctgaggccaccctgccttgtctacctagatcatccactggtcctgatcctgttcgttgccttccatgtccacctggagaggaggctgggtgtgggtggggaggggcctcagccagcctcagccccagatcctgcccctggctggatccagggtttctgtaccccttggccatcaactgggtcaggagcaagggtccaggaacagaggccctcccccataccccttgcctacctcattgacctctccatcatccggtgactcattgtagtcattcatctcgtccatgtcctgcatatcctcatcatcctctgagtcctcttcactatcctcatcatcttcatcatcctcttcttcctcgtcatcatagtgctggtgggcaggacagagcctgtaagccctacaggcctgcatggaccagttcaagaactgacccacttgagcctctctctagggccaatgaatgaccccctaccccgacactccctccttgagtctagcaggctggtgcatgttctgcaggaccttaatgctaggcccaatgcccaccccttctatctccccttttaggcttttacccagatctgagaaccacaactgctctgggtcagagacaggacattcagaattagagcagagcctcggtccactgcggcccccacacaggccccacctgctagagccactcacctctgaggctggcttgccaataggaaccaggttgttgtctttctccgcgatgctttggagctgtgggcaaaggcacagaggaacaaggccagagcccaagtagggcaggtcaggggcatgggactggcccattctgcccagaagacaacccacacgtgttggggagaagcttcctcccagttctcagggagatacaatccctttcttgtcatctgccatttatgaacttgatccaaata

SEQ ID NO: 148272 - DNA, 1270 bp, Homo sapiens
  Payload ID: 9354
  Gene Symbol: LRTOMT
  Gene Name: leucine rich transmembrane and O-methyltransferase domain containing
  Uniprot ID: Q96E66
  ENST ID: ENST00000423494
  CDS Start-End: 131-655
agcagttgccatggagttgctctgagtaaccctgaggcagtgggacgccaagactggagaggaagcgactgcggggagtatttccattttaaccggaaacaatccctgaacccacaggaatgaatgcctaatggtggagtttcagccatcagtgacagatctggtaaatgaggagccaaggacaggactacgaccactgaagcgttcaaagtcggggaaatcactgacccagtccctgtggctgaataacaatgttctcaatgatctgagagacttcaaccaggtggcttcacagctgttggagcacccagagaacctggcctggatcgacctgtcctttaatgacctgacttccattgaccctgtcctaacaactttcttcaacctgagtgtcctctatcttcacggcaacagcatccagcgcctgggggaggtgaataagctggctgtccttcctcggctccgtagcctgacactccatgggaaccccatggaggaagagaaagggtataggcaatatgtgctgtgcaccctgtcccgtatcaccacgttcgacttcagtggggtcaccaaagcagaccgcaccacagctgaagtctggaaacgcatgaacatcaagcccaagaaggcctggaccaagcagaatacactttgaggctcccacgaccctagtagtcctaaaggcctaagcatagacagcatggtttgacaataaataatttgagctgttgagcagatgagaagtcacttacaccttgtagagatgttctctaactcaggcaactgcaagtagctctagccttttcttttcttttttttttttttgagacggagtctcactctgtcacacaggctggagtgcagtggcacgatcttggctcactgcaacctcagcctcccaggttcaagagattctcctgcctcagcctccccagtagctgtgattaaaggcgcctgccaccatgactggctaattttgttgttgttgttgttgttttgagacggtttcactcgtcaccccagctggagtgcagtggtgcgatctcagctcactgcaacctccgcctgctgggttcaagcgattctcctgcctcagcctcctgagtagctgggattacaggcgcctgctaccacatccagctaatttttttttttgagacggagtctcgctctgtcacccaggctggagtgcagtggcacgatctcggctcactgcaaactccgccttccaggttcacgccattctcctgcctcagcctcccaagtagct

SEQ ID NO: 148273 - DNA, 570 bp, Homo sapiens
  Payload ID: 9354
  Gene Symbol: LRTOMT
  Gene Name: leucine rich transmembrane and O-methyltransferase domain containing
  ENST ID: ENST00000539271
  CDS Start-End: 431-562
agtacttatggcgcctgccgggttgtggtgacgaaagcagttgccatggagttgctctgagtaaccctgaggcagtgggacgccaagactggagaggaagcgactgcggatctggtaaatgaggagccaaggacaggactacgaccactgaagcgttcaaagtcggggaaatcactgacccagtccctgtggctgaataacaatgttctcaatgatctgagagacttcaaccaggtggcttcacagctgttggagcacccagagaacctggcctggatcgacctgtcctttaatgacctgacttccattgaccctgtcctaacaactttcttcaacctgagtgtcctctatcttcacggcaacagcatccagcgcctgggggaggtgaataagctggctgtccttcctcggctccgtagcctgacactccatgggaaccccatggaggaagagaaagggtataggcaatatgtgctgtgcaccctgtcccgtatcaccacgttcgacttcagtggggtcaccaaagcagaccgcaccacagctgaagtctggaaacgcatgaacatcaag

SEQ ID NO: 148274 - DNA, 579 bp, Homo sapiens
  Payload ID: 9354
  Gene Symbol: LRTOMT
  Gene Name: leucine rich transmembrane and O-methyltransferase domain containing
  Uniprot ID: Q96E66
  ENST ID: ENST00000536917
  CDS Start-End: 18-458
gaatgatggcctgaactatgaacaaacgggactatatgaacacttcggtacaggagccccctcttgactactccttcagaagcatccacgtcattcaagatctggtaaatgaggagccaaggacaggactacgaccactgaagcgttcaaagtcggggaaatcactgacccagtccctgtggctgaataacaatgttctcaatgatctgagagacttcaaccaggtggcttcacagctgttggagcacccagagaacctggcctggatcgacctgtcctttaatgacctgacttccattgaccctgtcctaacaactttcttcaacctgagtgtcctctatcttcacggcaacagcatccagcgcctgggggaggtgaataagctggctgtccttcctcggctccgtagcctgacactccatgggaaccccatggaggaagagaaagggtataggtaagtgccctgcccctggaggtagcgtctagctgggctcccctaaaggaaaggaggaggagaaacaagaaatctacgaccattcttctgccatgcttggacctgggaagggagtaacagacctc

SEQ ID NO: 148275 - DNA, 814 bp, Homo sapiens
  Payload ID: 9354
  Gene Symbol: LRTOMT
  Gene Name: leucine rich transmembrane and O-methyltransferase domain containing
  Uniprot ID: Q96E66
  ENST ID: ENST00000538478
  CDS Start-End: 138-716
gaggcagtgggacgccaagactggagaggaagcgactgcgggaatgaatgcctaatggtggagtttcagccatcagtgacaggctgaacccagactcccagggcacctgcttgcacctttgaatgatggcctgaactatgaacaaacgggactatatgaacacttcggtacaggagccccctcttgactactccttcagaagcatccacgtcattcaagatctggtaaatgaggagccaaggacaggactacgaccactgaagcgttcaaagtcggggaaatcactgacccagtccctgtggctgaataacaatgttctcaatgatctgagagacttcaaccaggtggcttcacagctgttggagcacccagagaacctggcctggatcgacctgtcctttaatgacctgacttccattgaccctgtcctaacaactttcttcaacctgagtgtcctctatcttcacggcaacagcatccagcgcctgggggaggtgaataagctggctgtccttcctcggctccgtagcctgacactccatgggaaccccatggaggaagagaaagggtataggcaatatgtgctgtgcaccctgtcccgtatcaccacgttcgacttcagtggggtcaccaaagcagaccgcaccacagctgaagtctggaaacgcatgaacatcaagcccaagaaggcctggaccaagcagaatacactttgaggctcccacgaccctagtagtcctaaaggcctaagcatagacagcatggtttgacaataaataatttgagctgttgagcagatgagaagtcacttaca

SEQ ID NO: 148276 - DNA, 1895 bp, Homo sapiens
  Payload ID: 9354
  Gene Symbol: LRTOMT
  Gene Name: leucine rich transmembrane and O-methyltransferase domain containing
  Uniprot ID: Q96E66
  ENST ID: ENST00000615940
  CDS Start-End: 1-525
atggtggagtttcagccatcagtgacagatctggtaaatgaggagccaaggacaggactacgaccactgaagcgttcaaagtcggggaaatcactgacccagtccctgtggctgaataacaatgttctcaatgatctgagagacttcaaccaggtggcttcacagctgttggagcacccagagaacctggcctggatcgacctgtcctttaatgacctgacttccattgaccctgtcctaacaactttcttcaacctgagtgtcctctatcttcacggcaacagcatccagcgcctgggggaggtgaataagctggctgtccttcctcggctccgtagcctgacactccatgggaaccccatggaggaagagaaagggtataggcaatatgtgctgtgcaccctgtcccgtatcaccacgttcgacttcagtggggtcaccaaagcagaccgcaccacagctgaagtctggaaacgcatgaacatcaagcccaagaaggcctggaccaagcagaatacactttgaggctcccacgaccctagtagtcctaaaggcctaagcatagacagcatggtttgacaataaataatttgagctgttgagcagatgagaagtcacttacaccttgtagagatgttctctaactcaggcaactgcaagtagctctagccttttcttttcttttttttttttttgagacggagtctcactctgtcacacaggctggagtgcagtggcacgatcttggctcactgcaacctcagcctcccaggttcaagagattctcctgcctcagcctccccagtagctgtgattaaaggcgcctgccaccatgactggctaattttgttgttgttgttgttgttttgagacggtttcactcgtcaccccagctggagtgcagtggtgcgatctcagctcactgcaacctccgcctgctgggttcaagcgattctcctgcctcagcctcctgagtagctgggattacaggcgcctgctaccacatccagctaatttttttttttgagacggagtctcgctctgtcacccaggctggagtgcagtggcacgatctcggctcactgcaaactccgccttccaggttcacgccattctcctgcctcagcctcccaagtagctgggactataggcacctactaccacgcctggctaattttttgtatttttagtagagacggggtttcaccatgttagccaggatggtctccatctcctgaccttgtgatccacccacctcggcttcccccagctaattttttatattttagtagagacaaggtttcgccatgttggccaggctggtcttgaactcctgacctcaggtgatccgtctgctttggcctcccaaagtgctgggattagaagcgtgagccaccacgcccagcctttttttgtatttttagtagagatggggtttcgccatgttggccaggctggtctcaaactcctgacctcaggtgatctgcccacctcagcctcccaaagtgctaggattacaggataagccactgcacctggccagctctagtcttattttgctgaaaaagggaggcaattgagggaaaggcctgctggcctgggacactggagacgtgggtttaccacacagccttgggaaatttatctaactctctgggcccctttgtacttttcagcttagagatttgggggttaaagtagatcagtaatttccaaactcttcacagagtaccagggtctgtagagatgcctcacaggcctccatgacaggccaagaagatggcctatgatctctgaaaccagcccccacttcaatcagatcaaagtaattccattctgttttatatgctgggattctgcttaagatttcatttgataaaaagaatcttctgctt

SEQ ID NO: 148277 - DNA, 671 bp, Homo sapiens
  Payload ID: 9355
  Gene Symbol: LEUTX
  Gene Name: leucine twenty homeobox
  Uniprot ID: A8MZ59
  ENST ID: ENST00000396841
  CDS Start-End: 165-671
ctgcacacggttttcagcctcatgcctccgtggaacctgcctgtcaggcgggcacctggaatctcaagcaactttctcaagaagggccaaggcgttatcgtcggccacgcacaagatttctctccaaacaactcacagcattgagagaattgcttgaaaagaccatgcacccaagtttggctacaatggggaaactggcttcaaagctacaacttgatctatccgtagtaaagatctggttcaagaaccagcgtgccaaatggaagaggcagcagcggcagcaaatgcagacacggccatcactagggccagcaaaccagacaacttcagtgaagaaggaggagactccctcagccataactactgcaaacattcgtccagtaagtcctggaatctctgatgcaaatgaccatgatctacgtgagccttctggtatcaagaatcctggaggagccagcgcctctgcgagggtttcatcctgggattctcagtcatatgacattgaacagatatgtctgggggcttcaaatcctccttgggcctccactctctttgaaatagatgaatttgtaaagatctatgacttgccaggggaagatgacaccagcagcctaaatcaatatctttttccagtatgccttgagtatgaccagctccaatcttcagtgtaa

SEQ ID NO: 148278 - DNA, 671 bp, Homo sapiens; identical to SEQ ID NO: 148277
  Payload ID: 9355
  Gene Symbol: LEUTX
  Gene Name: leucine twenty homeobox
  Uniprot ID: A8MZ59
  ENST ID: ENST00000629267
  CDS Start-End: 165-671

SEQ ID NO: 148279 - DNA, 945 bp, Homo sapiens
  Payload ID: 9356
  Gene Symbol: LZIC
  Gene Name: leucine zipper and CTNNBIP1 domain containing
  Uniprot ID: Q8WZA0
  ENST ID: ENST00000377213
  CDS Start-End: 227-799
agtgcgtgcgtccagcggaagtgctcccccggcgcggtccgccaggccagtgccctcagcatctccaccccgaggtggtttgaactttgagccttttgtagtcctgatgaataatttcattttcctcaagtttatgacactcggaacgtcaagaactggaggtttgtgcaatttgagaccggtcggcactgtgcagagatcagagtactaagagacagagattaaaatggcttccagaggaaagacagagacaagcaaattaaagcagaatttagaagaacagttggatagactcatgcaacaattacaagatctggaggaatgcagagaggaacttgatacagatgaatatgaagaaaccaaaaaggaaactctggagcaactaagtgaatttaatgattcactaaagaaaattatgtctggaaatatgactttggtagatgaactaagtggaatgcagctggctattcaggcagctatcagccaggcctttaaaaccccagaggtcatcagattgtttgcaaagaaacaaccaggtcagcttcggacaaggttagcagagatggatagagatctgatggtaggaaagctggaaagagacctgtacactcaacagaaagtggagatactaacagctcttaggaaacttggagagaagctgactgcagatgatgaggccttcttgtcagcaaatgcaggtgctatactcagccagtttgagaaagtctctacagaccttggctctggagacaaaattcttgctctggcaagttttgaggttgaaaaaacaaaaaaatgacatggtgcagaagcttgtaacattgatcacattcttaatgtaaatggtgtctttcttctggggttttcagttattgcaaagaaatgaagagattctggaaatgcatcaataacctaagaaaaagcgacataaaaatatacttatgg

SEQ ID NO: 148280 - DNA, 2281 bp, Homo sapiens
  Payload ID: 9356
  Gene Symbol: LZIC
  Gene Name: leucine zipper and CTNNBIP1 domain containing
  Uniprot ID: Q8WZA0
  ENST ID: ENST00000377223
  CDS Start-End: 249-821
ctaaactctgggactggcgggcggtcaggcggcacagggggaatcccgggggcctaaggaggttgtcccagtttttgtcagcatctccaccccgaggtggtttgaactttgagccttttgtagtcctgatgaataatttcattttcctcaagtttatgacactcggaacgtcaagaactggaggtttgtgcaatttgagaccggtcggcactgtgcagagatcagagtactaagagacagagattaaaatggcttccagaggaaagacagagacaagcaaattaaagcagaatttagaagaacagttggatagactcatgcaacaattacaagatctggaggaatgcagagaggaacttgatacagatgaatatgaagaaaccaaaaaggaaactctggagcaactaagtgaatttaatgattcactaaagaaaattatgtctggaaatatgactttggtagatgaactaagtggaatgcagctggctattcaggcagctatcagccaggcctttaaaaccccagaggtcatcagattgtttgcaaagaaacaaccaggtcagcttcggacaaggttagcagagatggatagagatctgatggtaggaaagctggaaagagacctgtacactcaacagaaagtggagatactaacagctcttaggaaacttggagagaagctgactgcagatgatgaggccttcttgtcagcaaatgcaggtgctatactcagccagtttgagaaagtctctacagaccttggctctggagacaaaattcttgctctggcaagttttgaggttgaaaaaacaaaaaaatgacatggtgcagaagcttgtaacattgatcacattcttaatgtaaatggtgtctttcttctggggttttcagttattgcaaagaaatgaagagattctggaaatgcatcaataacctaagaaaaagcgacataaaaatatacttatggcttgtgtttatgctcttcatcattgtgcgttgtgtgcggttacctgcttgagtgatcctgaacttgttgcgacagagggactcactggactctgttcgttatgatttgtctgtttaagagagaaaacaaagtggacttgatttttattaaggctgtttgtttttaagtgttgatagtgaacgaaaagatgtgaagtaatgatatttttctgcttacaacttatccccactcattggagtgaacagtgacgcaagctcaatagacttcataagtgttcatagaattttacaattctgagtgatcttagaaatcatttctgtttttacaaacaaggaaactgaggtccagaaagagcaagcgactttgcttaaagtcgcatcagagagctgagggtaagactcaggtgtcctgactcccagtttagtatcttttgaattttatttctgtaccatttaaaaaaaataattaacactatttgtgcaagtcagtgtttttgaaaattcagtgtcccaataaaaagtggactgcacactaagggaccatcccccagcctgtaagctgtctgtattaatggggcccgttgtatctcggaattttgaggttggaacaatgggagccctgttgagcgtttcctaaagtgacttagccgcctgcgttgtttgaccagggaagcaacaggaaatggcagctagaggccctccctgtgcgtgacctcttgtcacactcagaggggggtaactgtcagctgttatctactcttcaggttttggagaaacacaaaataagttatgaggaaaagcaaatttctctcctgagtatttacatgtctctgtatgctcaaatatgcagatgtgtccctatgcgtgtatattagcttattttttaggctctagccattttatattctttcatgtgcttctcaatattctttttctttgcactttatacaaattaaaagcatttttaaagcttcttctgtactgtaaactactaggtgctttgccaaccagacagattagaggacctccgctacactgatgccttatttggaacttaaaagaggtgaaattcatatatcataaaattcaccattttaaagtgtaccattcgttggcagaacatttacagtggtgtgcaaccatcactactctctagttgcagaacattcttatcacccccaaaggaggccctatacctattaagcagttagtccccattcccttctcctccgactgctaacaatagccactaatctgcaccctgtctctgtggatttacctattctggatatttcatataaatggaatcatatga

SEQ ID NO: 148281 - DNA, 1405 bp, Homo sapiens
  Payload ID: 9356
  Gene Symbol: LZIC
  Gene Name: leucine zipper and CTNNBIP1 domain containing
  Uniprot ID: Q8WZA0
  ENST ID: ENST00000400903
  CDS Start-End: 154-726
ggtggtttgaactttgagccttttgtagtcctgatgaataatttcattttcctcaagtttatgacactcggaacgtcaagaactggaggtttgtgcaatttgagaccggtcggcactgtgcagagatcagagtactaagagacagagattaaaatggcttccagaggaaagacagagacaagcaaattaaagcagaatttagaagaacagttggatagactcatgcaacaattacaagatctggaggaatgcagagaggaacttgatacagatgaatatgaagaaaccaaaaaggaaactctggagcaactaagtgaatttaatgattcactaaagaaaattatgtctggaaatatgactttggtagatgaactaagtggaatgcagctggctattcaggcagctatcagccaggcctttaaaaccccagaggtcatcagattgtttgcaaagaaacaaccaggtcagcttcggacaaggttagcagagatggatagagatctgatggtaggaaagctggaaagagacctgtacactcaacagaaagtggagatactaacagctcttaggaaacttggagagaagctgactgcagatgatgaggccttcttgtcagcaaatgcaggtgctatactcagccagtttgagaaagtctctacagaccttggctctggagacaaaattcttgctctggcaagttttgaggttgaaaaaacaaaaaaatgacatggtgcagaagcttgtaacattgatcacattcttaatgtaaatggtgtctttcttctggggttttcagttattgcaaagaaatgaagagattctggaaatgcatcaataacctaagaaaaagcgacataaaaatatacttatggcttgtgtttatgctcttcatcattgtgcgttgtgtgcggttacctgcttgagtgatcctgaacttgttgcgacagagggactcactggactctgttcgttatgatttgtctgtttaagagagaaaacaaagtggacttgatttttattaaggctgtttgtttttaagtgttgatagtgaacgaaaagatgtgaagtaatgatatttttctgcttacaacttatccccactcattggagtgaacagtgacgcaagctcaatagacttcataagtgttcatagaattttacaattctgagtgatcttagaaatcatttctgtttttacaaacaaggaaactgaggtccagaaagagcaagcgactttgcttaaagtcgcatcagagagctgagggtaagactcaggtgtcctgactcccagtttagtatcttttgaattttatttctgtaccatttaaaaaaaataattaacactatttgtgcaagtcagtgtttttgaaaattcagtgtcccaataaaaagtggactgcacact

SEQ ID NO: 148282 - DNA, 652 bp, Homo sapiens
  Payload ID: 9356
  Gene Symbol: LZIC
  Gene Name: leucine zipper and CTNNBIP1 domain containing
  ENST ID: ENST00000488540
  CDS Start-End: 1-510
cttgatacagatgaatatgaagaaaccaaaaaggaaactctggagcaactaagtgaatttaatgattcactaaagaaaattatgtctggaaatatgactttggtagatgaactaagtggaatgcagctggctattcaggcagctatcagccaggcctttaaaaccccagaggtcatcagattgtttgcaaagaaacaaccaggtcagcttcggacaaggttagcagagatggatagagatctgatggtaggaaagctggaaagagacctgtacactcaacagaaagtggagatactaacagctcttaggaaacttggagagaagctgactgcagatgatgaggccttcttgtcagcaaatgcaggtgctatactcagccagtttgagaaagtctctacagaccttggacggcccccaagttacatgaactacctgctagactcacaccccagcaaaaatattgatgtccccagcaagattagcttcctgttaaagatccaggacctgtgaatacatgcgtaactgcaagaatggaagcaaaggatgaacccaagttaaagcccagcacaagaatatgatgtaagcgcttttgggaaatgcagagattttcttttctcttcaaataataaattacatctaaaaattaatgaga

SEQ ID NO: 148283 - DNA, 8898 bp, Homo sapiens
  Payload ID: 9357
  Gene Symbol: LUZP1
  Gene Name: leucine zipper protein 1
  Uniprot ID: Q86V48
  ENST ID: ENST00000302291
  CDS Start-End: 803-4033
gagagcgcgcccggcaccggcggcttcccaggcccgcggccggctggcggcgcggagctgtcactgcggcaaacggcgaacgcgccggccccctcccccgccgcccgcaagcctggtgcagtcggcccatgagtatttcatgaagtgccgcagccggattcatggctcactggcgcaggaggggagagaggctgagtcctgtcaagcgccagcgccccacccgtcacggagcgcacgccgcgggggccaggctggggagggaagggtgtccagccctctcttttgggtggtgagatgctgaggcctgagggtttctagggcgcctagcacaggacccagctacggaggcaataaaaacttggtggagtctaagtcctgggaagggaaaaaaaggacggagggggcggggcctacagacaaccccgcccatcacaaagaccccgccttccagaacgctgacgtcacaatttggccccgcccctcattgtcagtcccgcggagccagaggaggcgccggtcgctggcagctgagcggcggaacccttcgctggcgggagcgcggttcggggccgcagaggtcaagagacaactgcctttgaaagagagtgagtgactgtttccaaaacagcaagcatagggagagccgccggaagtattgacggaaagcttgaattacctacatgattgatgatggtctccagctgtcaaagaagattgtggttgccaagagaaaggtaaccatttctcatccccttgagtggaattggatgcctctaggagcccacattggctggcagtagacatggccgaatttacaagctacaaggagacggcctccagccgccacttgcggtttaagctacagagtctaagccgccgccttgatgagttggaggaagccacaaaaaacctccagaaagcagaggatgaactcctggatctccaggacaaggtgattcaggcagaaggtagcaactccagcatgttggcggagattgaagtgctgcgccagcgggtgctgagaattgaaggcaaagacgaggaaattaagagagcagaggatctgtgtcgtctgatgaaggagaaacttgaagaggaagaaaacctcacccgggagctgaaatctgagattgagcggcttcagaaacgaatggctgaattagagaagctagaagaggccttcagcaggagtaagaatgactgtacccagctgtgtctgagcctgaatgaggagagaaatctgaccaagaaaatctcctctgagctggaaatgctcagagtcaaagtgaaagaactagaatcttctgaggaccgcctggataaaactgagcagagtttagcgtcagagttagaaaagctgaaatcattaactctgagctttgtaagtgagagaaaatacttgaatgaaaaggagaaagaaaatgagaaattgataaaagaactcactcaaaaactagagcagaacaaaaaaatgaaccgagattatacaaggaatgcttctaatctggaaagaaatgacctacggattgaggatggcatctcttccacactgccgtccaaagaatcaagaaggaagggtggtctggactacctaaagcaggtagagaatgaaacaagaaacaaatcagaaaatgaaaagaaccgcaatcaggaagacaacaaagtcaaagaccttaaccaagagattgagaaacttaagacacaaatcaaacactttgaatcgttggaagaagagcttaagaaaatgaagtccaaaaataacgaccttcaggataattacctaagtgaacaaaataaaaacaaattattagccagccaactggaggagataaagctacaaatcaagaaacagaaagagttagaaaatggagaggtagaaggggaagatgctttcctgtccagcaaaggcagacatgagaggactaagtttagaggccacggaagtgaagcttctgtgtccaagcacacagcgcgggaactgtctcctcagcataagcgggaacgactccggaacagggagtttgctctcaacaatgaaaactattctctgagcaacaggcaggtttcttctcccagtttcaccaacaggagggcagcaaaagcttctcacatgggggtgagtacagacagtgggactcaggagacaaagaaaactgaagaccggtttgtacccggctcctcccagagcgaagggaagaagtctagggagcagccctcagtgctgagtcgctaccccccggctgctcaggagcacagtaaagcgtggaaggggacttccaagccaggcaccgagagcggactgaagggaaaagtggagaagacaacacgaacgtttagtgacaccacccatggatctgttcccagtgacccattgggtagagctgacaaggcttctgacacctcctctgagactgtctttggcaagaggggacacgtgcttggcaacggaagtcaagtaactcaggctgcaaactctggctgttctaaggccattggagccctggcctcatctcgaagatcctcctcagaagggctctctaaaggcaaaaaggctgccaatggccttgaggctgataacagttgcccgaattccaaggctcctgttctatcgaagtatccttatagctgtagaagccaagagaacatccttcagggattttcaacctcacataaagaaggggttaatcaacctgcagcagttgtgatggaagacagcagtccgcatgaagccttgaggtgtcgagtcatcaaatccagtggcagagagaagccagactcagatgatgacttggacatagcatctcttgttactgccaagttggtaaatacaaccatcactccagagccagagcccaaaccacagcctaactctagagaaaaggctaaaacccgaggggcacctagaacctccctatttgagaatgataaagatgctggaatggagaatgaatctgtgaaatctgtcagagcctccaccaataccatggagctcccagataccaatggtgctggggtaaaaagccaaaggccctttagccccagagaggcgttgcggtctagagccatcatcaaacctgttattgttgataaggatgtgaaaaaaatcatgggaggatctggaacagagactacgttggagaaacagaaacccgtctccaaaccagggccaaacaaagtgacaagtagcattactatatatccatctgacagcagcagccccagagctgctccgggtgaggccctgagggagaggcacacatccactagcaatatccaggtggggctggcagagctcacatcagttagcaaccatgtcagctccccttttgagctctccattcacaaacatgacatcaccctgcagcttgcagaagcggagagaatggcagatgggcccctgaaggacaggccagaaacagtggtctctcggagcagcattataatcaagccatcggatcctgtggagaggaatagccatgcacctccagcggagacaatcaggtggaaaagccatagtgccccttcagaagtgggcttctcagatgccagacatgttactgtgcggaatgcctggaagagtaggcgagacttgaaatctttagaagaccccccaactcgaataggtaaaaacgtggaatctaccaatagcaatgcctacacccagaggtcttccacagacttctcagaactcgaacagcccaggtcctgcctttttgagcagggcactcgaagggtaggaccaagttcaggggatgcccctgagccctcctccagaaggacccaaagtagcctcactgtgtcagaggtgcttacccgtcggaatcgggtaggagacaccatcactgtcgcagcctggaaccactcagcaagcatggaggaagaaggggaagactgtacactcagtgtctacaggcaactgcacaactccctggatccgtctgaactgcctgggaagcaggggctgccagagtctgggcgagtacgggccgaggaacgattacggccaaccaggccctgtgctgaggagaactgagcccgctgggtgtctgttgtctgccctctgctcctgcttctcagctcttccaccgtcctgccccacgaaggatccaaggccagttaaccaggcaagacacaagccttggctggaaaactgtggtagagccgggctgtggctcaggtaatttttgccatttggccagagggaatcagagactacaagctggacagtcacccaggcccaaccttccccaatgcacgagtcctctctctctccttgtccctgtccaccaagtagttggaccattctggcccccaaacaagggaagataaagtccccagcacacagcaggagtcaaaaattcttctcggctccttggtgggttgtttctggatcctagggcagcctctgtctgtgtggttaatgttctggtttctcagtctcctcactatatccacttcactcctcatttgcccaatgggctcaagtaccccataagatttaccagccatcagctctatctagggggctttcatttctttccccttggagttcttttcttcagacttaaagcagaaaggggtctgtgctgcctctaaaggattatgagactaccctttaggttgaagtttgacctggctcctggcttaccagtctcctggaagcagagcatgcagatactcatgcggatacccattggaatgacatcatccctccccaaccccagctctctctgctcaccttccaaaggcacctggaggtgcaagcctcatgcatctcctttcctgagcaccagtaatgctgctggcatcgcctgctttctctccagtggctggagacttcaagctgacttcattgtttccaccttgggaaaatccctaggctaagctgggcctgacccagcatcctctgccttctaggaagtgcccagcaagagggaaagcagacccctttagtcactccacaagcaatagctccatgagaggcatggactgtgagactactccctcctgttcctccttctccatcccccatggaggaggcatcgcactttaccaagctgatgcattcctacagaagtgggccccggatttctgcaagtcgactatcatgatgacttcgctggaggaaaggtgatacgtacatacgcattgagggcctcagctttatatagttcaaaatgcagcaaacttttcagaaagccacgtaaataaattggttaggttccttataccagtcacatggggaagttgaaaagaattgtatattcttggcagtgctttttctttagcattctgtcaattcaaagaagggatcctctttcaaaggctacctttatgaagtagacactattgccctcagaatgagagaacattaaactaccagtctggtaagctggatttttttccccatggctttacttccttgctgtgtgaccttgggtgagtcattgtcttcttggagcctcagtttccctgtctgtaaaatgagttctttgaaatggatgatctctaagggcaccaaatctggtattctaaggttctcctgttttcaccatctataatagtatgggatgatttttgcttgtggaaggtatcatccgtgtgggttcttccctcctgccctcaattgtttttctgggccttgttttttagtttctgtatgttttaatctcatggggatgagctcagagaagctccgtgggcctgtttcccaatctgcaaagtgtgaagggattagatgggatggtctctgaggctctttgtggcatcagccttgcccagtgccacacagtatctcctggcgttctaggagtctaggtattatggaaagtacccaagtctgtgtatctcctgttcctgtgcatctcctatgaatttcctggcaagaggaagactcaagacttcctccagaggaatttgtcttctctgccttcactcagcatgggaaccagtgttcatcctgaccttgtctgtatcagatttggcagtgaggaggcttggggagcacctaccttactttcagggacaggaatctattgctcatacttctgcttcccagagttttgccaatctaaaggcattgtcatgtggcctgcctttcctgtccacatccccacctctgatgctcaagatgctatttccaagatctcttactgctgcttctcctggcttactggccagaaactagctcactcaaggctgccatccttcacttgcagcctccctgccattctccttcactggttggcaaccttgagagttcaaagaaaatcaacctctgtggtggtcaactaaaggtattaggaaactaagtctgtggctcttctctgctgatggaaacagaagggcgccaagccatgcctaaaaagatctcgccaataattcttgtctttgagtgttggagccctggattctggtgctatagctcctggtgccaaagtctggatctttccacatttcagcagcaccaacatctgctgctactcaaaatgtcctgttgaagagggacagctgtgatgcccttttgctggggctgccatcttgaaatctgagtgcaataggatttgcttgtaacagttatttcaggatattttgtttctttaatctgcacactttctagatagattttatttttaagtgtcctcagcattgcagaaaataacattgtaatagcaagtaaaggctggaggctgtttctctgggcttcaaatggctggcaaggctggctctcaaatcccaaagttgggaggcatgtttctgaaaagcaactgaggtgtgactgtttggacccaggcctcatcatcaggggtcctggaggaagcctccaagtagaggggagacctggtagttgaatagttgtttaatcaagccaaatagtcccactgcccccggtcaacaaacccacttttatgacagttttcttccgcagcttggctcttaaattttactggcaggtgtatggttgttggagggttcctagtgagttgggggacctggcaatagagctgcttggttggaggaagtgaagctggcttagtaccagcagctgatctcttccacgtgctgctgctttttttgccactctgatactaaaccagagaaagctgcaggtggataaagaagctgtggctgttttttgcttttgggtggcaatgagaaagagtcacagtgtgggttaaagggatctgcagtggggccaaggatgccaccccaccctcagctgtaggcaagcttgcacataaataacccccgtcagtggagtgttcgggatgcagggggcactatagtgttcttggacttgtcgtcctggggcagttttagttctttatatttagtgggtcagtgccaagtgctaccacttcccaataaaggaatggggacccagaggctgggtccctggctaccttgttatgaggttttgttatttctctgacaagattgctttggaaagagctgcttttagggattattttttgaataccccgagtggggagcagggttctcctcaaagcctcacaaccataggatcataggaaaggggccctattttcctgctgcttcccagctcagaacatatactgaatggaatgtatttttaagagaataaagtctatttttttgtattttaaagattgagagggctaagaaagtagccctcaaataaactgttattgcattataggcccctttgttgggggcagcctgttggtccacacctacttgctcaggcaggtgctctggtctctctcacccctgccccttagagtctaggtgcagcagctccaagcatgggaccaaggaggccagaacctgtcgctggaaaccagggcaaagcagtggctcagggctccttgggtgcatgtgtatcattggagctgcctgtctgcatgtatcctctggcgcgaatgctctctgttggctctgcagtacaatatgtaaccaataaagctccctcgtttccgtatactctgtgcgagtctgtgatgccagttttgtcaatgtcatccctgtgtatcatctgtcttctatgcgttggcgcagctctagtatatttatttatttcattgtgtaatacttaaaattgggtattttacctaaccaattactgatactgcaaggactggaaacattaactgccctgatcctggtgtgcagattctttccattactgccacgaattctaagactagggggggaaaagccttctccgttttcatcttccagtcagatcaccaatatatataatgatgtcccttaactcacagtaagaaagaataaaaccacatttaagggacattacttggatttgcagtaacagtgtttatcatctatctgtcagtcagtcaggagcccctgggaaggaaccagcatgtaacatgtttttatcatcttatatggcaaaagggactttgcagataaggatgctgggatgaggcagaacatcctagatgatccaggtgggccttaaatgtaatcacaggtagtatccttttaagagagagacaaaagatttgactacaggagaaggcaatgtgatgatggaagcagaaactggagttatgtgctctgaggatggaggaaggagccacgagccttcccacacctagaagctgaaaagagcaaggaaatgaactgatcctccctgctctgagagcctctgtaatgaatgcagccctgtgtacccattttagactttaagcttccagaactttcgaatagatttctgtttttttaagagccactaagtttgtggcaatctgttaaaccagctgttacctaagcccttgatcctatgtagtgcgcttcccaaaatgtacaccaccacctttagtagaattgggaagttttagcacatacccatggagggaatcaggaataaaggcagactggtctcccaaa

SEQ ID NO: 148284 - DNA, 3715 bp, Homo sapiens
  Payload ID: 9357
  Gene Symbol: LUZP1
  Gene Name: leucine zipper protein 1
  Uniprot ID: Q86V48
  ENST ID: ENST00000314174
  CDS Start-End: 172-3252
agctgagcggcggaacccttcgctggcgggagcgcggttcggggccgcagagattgatgatggtctccagctgtcaaagaagattgtggttgccaagagaaaggtaaccatttctcatccccttgagtggaattggatgcctctaggagcccacattggctggcagtagacatggccgaatttacaagctacaaggagacggcctccagccgccacttgcggtttaagctacagagtctaagccgccgccttgatgagttggaggaagccacaaaaaacctccagaaagcagaggatgaactcctggatctccaggacaaggtgattcaggcagaaggtagcaactccagcatgttggcggagattgaagtgctgcgccagcgggtgctgagaattgaaggcaaagacgaggaaattaagagagcagaggatctgtgtcgtctgatgaaggagaaacttgaagaggaagaaaacctcacccgggagctgaaatctgagattgagcggcttcagaaacgaatggctgaattagagaagctagaagaggccttcagcaggagtaagaatgactgtacccagctgtgtctgagcctgaatgaggagagaaatctgaccaagaaaatctcctctgagctggaaatgctcagagtcaaagtgaaagaactagaatcttctgaggaccgcctggataaaactgagcagagtttagcgtcagagttagaaaagctgaaatcattaactctgagctttgtaagtgagagaaaatacttgaatgaaaaggagaaagaaaatgagaaattgataaaagaactcactcaaaaactagagcagaacaaaaaaatgaaccgagattatacaaggaatgcttctaatctggaaagaaatgacctacggattgaggatggcatctcttccacactgccgtccaaagaatcaagaaggaagggtggtctggactacctaaagcaggtagagaatgaaacaagaaacaaatcagaaaatgaaaagaaccgcaatcaggaagacaacaaagtcaaagaccttaaccaagagattgagaaacttaagacacaaatcaaacactttgaatcgttggaagaagagcttaagaaaatgaagtccaaaaataacgaccttcaggataattacctaagtgaacaaaataaaaacaaattattagccagccaactggaggagataaagctacaaatcaagaaacagaaagagttagaaaatggagaggtagaaggggaagatgctttcctgtccagcaaaggcagacatgagaggactaagtttagaggccacggaagtgaagcttctgtgtccaagcacacagcgcgggaactgtctcctcagcataagcgggaacgactccggaacagggagtttgctctcaacaatgaaaactattctctgagcaacaggcaggtttcttctcccagtttcaccaacaggagggcagcaaaagcttctcacatgggggtgagtacagacagtgggactcaggagacaaagaaaactgaagaccggtttgtacccggctcctcccagagcgaagggaagaagtctagggagcagccctcagtgctgagtcgctaccccccggctgctcaggagcacagtaaagcgtggaaggggacttccaagccaggcaccgagagcggactgaagggaaaagtggagaagacaacacgaacgtttagtgacaccacccatggatctgttcccagtgacccattgggtagagctgacaaggcttctgacacctcctctgagactgtctttggcaagaggggacacgtgcttggcaacggaagtcaagtaactcaggctgcaaactctggctgttctaaggccattggagccctggcctcatctcgaagatcctcctcagaagggctctctaaaggcaaaaaggctgccaatggccttgaggctgataacagttgcccgaattccaaggctcctgttctatcgaagtatccttatagctgtagaagccaagagaacatccttcagggattttcaacctcacataaagaaggggttaatcaacctgcagcagttgtgatggaagacagcagtccgcatgaagccttgaggtgtcgagtcatcaaatccagtggcagagagaagccagactcagatgatgacttggacatagcatctcttgttactgccaagttggtaaatacaaccatcactccagagccagagcccaaaccacagcctaactctagagaaaaggctaaaacccgaggggcacctagaacctccctatttgagaatgataaagatgctggaatggagaatgaatctgtgaaatctgtcagagcctccaccaataccatggagctcccagataccaatggtgctggggtaaaaagccaaaggccctttagccccagagaggcgttgcggtctagagccatcatcaaacctgttattgttgataaggatgtgaaaaaaatcatgggaggatctggaacagagactacgttggagaaacagaaacccgtctccaaaccagggccaaacaaagtgacaagtagcattactatatatccatctgacagcagcagccccagagctgctccgggtgaggccctgagggagaggcacacatccactagcaatatccaggtggggctggcagagctcacatcagttagcaaccatgtcagctccccttttgagctctccattcacaaacatgacatcaccctgcagcttgcagaagcggagagaatggcagatgggcccctgaaggacaggccagaaacagtggtctctcggagcagcattataatcaagccatcggatcctgtggagaggaatagccatgcacctccagcggagacaatcaggtggaaaagccatagtgccccttcagaagtgggcttctcagatgccagacatgttactgtgcggaatgcctggaagagtaggcgagacttgaaatctttagaagaccccccaactcgaataggtaaaaacgtggaatctaccaatagcaatgcctacacccagaggtcttccacagacttctcagaactcgaacagcccaggtcctgcctttttgagcagggcactcgaagggtaggaccaagttcaggggatgcccctgagccctcctccagaaggacccaaagtagcctcactgtgtcagaggtgcttacccgtcggaatcgggtaggagacaccatcactgtcgcagcctggaaccactcagcaagcatgagcagctaaaggagctccccgtaggccctcagaacagcatgaaaagcacaagaagcagctgcagctgatggggagctctgggcaacaggaggaggcccggtgccctttctgtagggcacagtgagggggagccaggtcagcaagttctcggccgcctcagttagcagatcttcacaggctgctggcctctcagggatgaggagagccggggcttacactgggcctattttagataagcgtatacccaattccaagtgacactttcttttgccccccagacagctgtctgtctcatattatcagtctgagggcagggctggttcagtatagctcattacagctttgataaatccagaaccacctgccttatgtgagtgtgaggctcagggtgtcagaacagcatctggagaagcccctgggagtgtctttttgatgagaaacctgtgatgatgaaaaacttcttggacctgga

SEQ ID NO: 148285 - DNA, 8421 bp, Homo sapiens
  Payload ID: 9357
  Gene Symbol: LUZP1
  Gene Name: leucine zipper protein 1
  Uniprot ID: Q86V48
  ENST ID: ENST00000418342
  CDS Start-End: 319-3549
ttgtcagtcccgcggagccagaggaggcgccggtcgctggcagctgagcggcggaacccttcgctggcgggagcgcggttcggggccgcagaggtcaagagacaactgcctttgaaagagagtgagtgactgtttccaaaacagcaagcatagggagagccgccggaagtattgacggaaagcttgaattacctacatgattgatgatggtctccagctgtcaaagaagattgtggttgccaagagaaaggtaaccatttctcatccccttgagtggaattggatgcctctaggagcccacattggctggcagtagacatggccgaatttacaagctacaaggagacggcctccagccgccacttgcggtttaagctacagagtctaagccgccgccttgatgagttggaggaagccacaaaaaacctccagaaagcagaggatgaactcctggatctccaggacaaggtgattcaggcagaaggtagcaactccagcatgttggcggagattgaagtgctgcgccagcgggtgctgagaattgaaggcaaagacgaggaaattaagagagcagaggatctgtgtcgtctgatgaaggagaaacttgaagaggaagaaaacctcacccgggagctgaaatctgagattgagcggcttcagaaacgaatggctgaattagagaagctagaagaggccttcagcaggagtaagaatgactgtacccagctgtgtctgagcctgaatgaggagagaaatctgaccaagaaaatctcctctgagctggaaatgctcagagtcaaagtgaaagaactagaatcttctgaggaccgcctggataaaactgagcagagtttagcgtcagagttagaaaagctgaaatcattaactctgagctttgtaagtgagagaaaatacttgaatgaaaaggagaaagaaaatgagaaattgataaaagaactcactcaaaaactagagcagaacaaaaaaatgaaccgagattatacaaggaatgcttctaatctggaaagaaatgacctacggattgaggatggcatctcttccacactgccgtccaaagaatcaagaaggaagggtggtctggactacctaaagcaggtagagaatgaaacaagaaacaaatcagaaaatgaaaagaaccgcaatcaggaagacaacaaagtcaaagaccttaaccaagagattgagaaacttaagacacaaatcaaacactttgaatcgttggaagaagagcttaagaaaatgaagtccaaaaataacgaccttcaggataattacctaagtgaacaaaataaaaacaaattattagccagccaactggaggagataaagctacaaatcaagaaacagaaagagttagaaaatggagaggtagaaggggaagatgctttcctgtccagcaaaggcagacatgagaggactaagtttagaggccacggaagtgaagcttctgtgtccaagcacacagcgcgggaactgtctcctcagcataagcgggaacgactccggaacagggagtttgctctcaacaatgaaaactattctctgagcaacaggcaggtttcttctcccagtttcaccaacaggagggcagcaaaagcttctcacatgggggtgagtacagacagtgggactcaggagacaaagaaaactgaagaccggtttgtacccggctcctcccagagcgaagggaagaagtctagggagcagccctcagtgctgagtcgctaccccccggctgctcaggagcacagtaaagcgtggaaggggacttccaagccaggcaccgagagcggactgaagggaaaagtggagaagacaacacgaacgtttagtgacaccacccatggatctgttcccagtgacccattgggtagagctgacaaggcttctgacacctcctctgagactgtctttggcaagaggggacacgtgcttggcaacggaagtcaagtaactcaggctgcaaactctggctgttctaaggccattggagccctggcctcatctcgaagatcctcctcagaagggctctctaaaggcaaaaaggctgccaatggccttgaggctgataacagttgcccgaattccaaggctcctgttctatcgaagtatccttatagctgtagaagccaagagaacatccttcagggattttcaacctcacataaagaaggggttaatcaacctgcagcagttgtgatggaagacagcagtccgcatgaagccttgaggtgtcgagtcatcaaatccagtggcagagagaagccagactcagatgatgacttggacatagcatctcttgttactgccaagttggtaaatacaaccatcactccagagccagagcccaaaccacagcctaactctagagaaaaggctaaaacccgaggggcacctagaacctccctatttgagaatgataaagatgctggaatggagaatgaatctgtgaaatctgtcagagcctccaccaataccatggagctcccagataccaatggtgctggggtaaaaagccaaaggccctttagccccagagaggcgttgcggtctagagccatcatcaaacctgttattgttgataaggatgtgaaaaaaatcatgggaggatctggaacagagactacgttggagaaacagaaacccgtctccaaaccagggccaaacaaagtgacaagtagcattactatatatccatctgacagcagcagccccagagctgctccgggtgaggccctgagggagaggcacacatccactagcaatatccaggtggggctggcagagctcacatcagttagcaaccatgtcagctccccttttgagctctccattcacaaacatgacatcaccctgcagcttgcagaagcggagagaatggcagatgggcccctgaaggacaggccagaaacagtggtctctcggagcagcattataatcaagccatcggatcctgtggagaggaatagccatgcacctccagcggagacaatcaggtggaaaagccatagtgccccttcagaagtgggcttctcagatgccagacatgttactgtgcggaatgcctggaagagtaggcgagacttgaaatctttagaagaccccccaactcgaataggtaaaaacgtggaatctaccaatagcaatgcctacacccagaggtcttccacagacttctcagaactcgaacagcccaggtcctgcctttttgagcagggcactcgaagggtaggaccaagttcaggggatgcccctgagccctcctccagaaggacccaaagtagcctcactgtgtcagaggtgcttacccgtcggaatcgggtaggagacaccatcactgtcgcagcctggaaccactcagcaagcatggaggaagaaggggaagactgtacactcagtgtctacaggcaactgcacaactccctggatccgtctgaactgcctgggaagcaggggctgccagagtctgggcgagtacgggccgaggaacgattacggccaaccaggccctgtgctgaggagaactgagcccgctgggtgtctgttgtctgccctctgctcctgcttctcagctcttccaccgtcctgccccacgaaggatccaaggccagttaaccaggcaagacacaagccttggctggaaaactgtggtagagccgggctgtggctcaggtaatttttgccatttggccagagggaatcagagactacaagctggacagtcacccaggcccaaccttccccaatgcacgagtcctctctctctccttgtccctgtccaccaagtagttggaccattctggcccccaaacaagggaagataaagtccccagcacacagcaggagtcaaaaattcttctcggctccttggtgggttgtttctggatcctagggcagcctctgtctgtgtggttaatgttctggtttctcagtctcctcactatatccacttcactcctcatttgcccaatgggctcaagtaccccataagatttaccagccatcagctctatctagggggctttcatttctttccccttggagttcttttcttcagacttaaagcagaaaggggtctgtgctgcctctaaaggattatgagactaccctttaggttgaagtttgacctggctcctggcttaccagtctcctggaagcagagcatgcagatactcatgcggatacccattggaatgacatcatccctccccaaccccagctctctctgctcaccttccaaaggcacctggaggtgcaagcctcatgcatctcctttcctgagcaccagtaatgctgctggcatcgcctgctttctctccagtggctggagacttcaagctgacttcattgtttccaccttgggaaaatccctaggctaagctgggcctgacccagcatcctctgccttctaggaagtgcccagcaagagggaaagcagacccctttagtcactccacaagcaatagctccatgagaggcatggactgtgagactactccctcctgttcctccttctccatcccccatggaggaggcatcgcactttaccaagctgatgcattcctacagaagtgggccccggatttctgcaagtcgactatcatgatgacttcgctggaggaaaggtgatacgtacatacgcattgagggcctcagctttatatagttcaaaatgcagcaaacttttcagaaagccacgtaaataaattggttaggttccttataccagtcacatggggaagttgaaaagaattgtatattcttggcagtgctttttctttagcattctgtcaattcaaagaagggatcctctttcaaaggctacctttatgaagtagacactattgccctcagaatgagagaacattaaactaccagtctggtaagctggatttttttccccatggctttacttccttgctgtgtgaccttgggtgagtcattgtcttcttggagcctcagtttccctgtctgtaaaatgagttctttgaaatggatgatctctaagggcaccaaatctggtattctaaggttctcctgttttcaccatctataatagtatgggatgatttttgcttgtggaaggtatcatccgtgtgggttcttccctcctgccctcaattgtttttctgggccttgttttttagtttctgtatgttttaatctcatggggatgagctcagagaagctccgtgggcctgtttcccaatctgcaaagtgtgaagggattagatgggatggtctctgaggctctttgtggcatcagccttgcccagtgccacacagtatctcctggcgttctaggagtctaggtattatggaaagtacccaagtctgtgtatctcctgttcctgtgcatctcctatgaatttcctggcaagaggaagactcaagacttcctccagaggaatttgtcttctctgccttcactcagcatgggaaccagtgttcatcctgaccttgtctgtatcagatttggcagtgaggaggcttggggagcacctaccttactttcagggacaggaatctattgctcatacttctgcttcccagagttttgccaatctaaaggcattgtcatgtggcctgcctttcctgtccacatccccacctctgatgctcaagatgctatttccaagatctcttactgctgcttctcctggcttactggccagaaactagctcactcaaggctgccatccttcacttgcagcctccctgccattctccttcactggttggcaaccttgagagttcaaagaaaatcaacctctgtggtggtcaactaaaggtattaggaaactaagtctgtggctcttctctgctgatggaaacagaagggcgccaagccatgcctaaaaagatctcgccaataattcttgtctttgagtgttggagccctggattctggtgctatagctcctggtgccaaagtctggatctttccacatttcagcagcaccaacatctgctgctactcaaaatgtcctgttgaagagggacagctgtgatgcccttttgctggggctgccatcttgaaatctgagtgcaataggatttgcttgtaacagttatttcaggatattttgtttctttaatctgcacactttctagatagattttatttttaagtgtcctcagcattgcagaaaataacattgtaatagcaagtaaaggctggaggctgtttctctgggcttcaaatggctggcaaggctggctctcaaatcccaaagttgggaggcatgtttctgaaaagcaactgaggtgtgactgtttggacccaggcctcatcatcaggggtcctggaggaagcctccaagtagaggggagacctggtagttgaatagttgtttaatcaagccaaatagtcccactgcccccggtcaacaaacccacttttatgacagttttcttccgcagcttggctcttaaattttactggcaggtgtatggttgttggagggttcctagtgagttgggggacctggcaatagagctgcttggttggaggaagtgaagctggcttagtaccagcagctgatctcttccacgtgctgctgctttttttgccactctgatactaaaccagagaaagctgcaggtggataaagaagctgtggctgttttttgcttttgggtggcaatgagaaagagtcacagtgtgggttaaagggatctgcagtggggccaaggatgccaccccaccctcagctgtaggcaagcttgcacataaataacccccgtcagtggagtgttcgggatgcagggggcactatagtgttcttggacttgtcgtcctggggcagttttagttctttatatttagtgggtcagtgccaagtgctaccacttcccaataaaggaatggggacccagaggctgggtccctggctaccttgttatgaggttttgttatttctctgacaagattgctttggaaagagctgcttttagggattattttttgaataccccgagtggggagcagggttctcctcaaagcctcacaaccataggatcataggaaaggggccctattttcctgctgcttcccagctcagaacatatactgaatggaatgtatttttaagagaataaagtctatttttttgtattttaaagattgagagggctaagaaagtagccctcaaataaactgttattgcattataggcccctttgttgggggcagcctgttggtccacacctacttgctcaggcaggtgctctggtctctctcacccctgccccttagagtctaggtgcagcagctccaagcatgggaccaaggaggccagaacctgtcgctggaaaccagggcaaagcagtggctcagggctccttgggtgcatgtgtatcattggagctgcctgtctgcatgtatcctctggcgcgaatgctctctgttggctctgcagtacaatatgtaaccaataaagctccctcgtttccgtatactctgtgcgagtctgtgatgccagttttgtcaatgtcatccctgtgtatcatctgtcttctatgcgttggcgcagctctagtatatttatttatttcattgtgtaatacttaaaattgggtattttacctaaccaattactgatactgcaaggactggaaacattaactgccctgatcctggtgtgcagattctttccattactgccacgaattctaagactagggggggaaaagccttctccgttttcatcttccagtcagatcaccaatatatataatgatgtcccttaactcacagtaagaaagaataaaaccacatttaagggacattacttggatttgcagtaacagtgtttatcatctatctgtcagtcagtcaggagcccctgggaaggaaccagcatgtaacatgtttttatcatcttatatggcaaaagggactttgcagataaggatgctgggatgaggcagaacatcctagatgatccaggtgggccttaaatgtaatcacaggtagtatccttttaagagagagacaaaagatttgactacaggagaaggcaatgtgatgatggaagcagaaactggagttatgtgctctgaggatggaggaaggagccacgagccttcccacacctagaagctgaaaagagcaaggaaatgaactgatcctccctgctctgagagcctctgtaatgaatgcagccctgtgtacccattttagactttaagcttccagaactttcgaatagatttctgtttttttaagagccactaagtttgtggcaatctgttaaaccagctgttacctaagcccttgatcctatgtagtgcgcttcccaaaatgtacaccaccacctttagtagaattgggaagttttagcacatacccatggagggaatcaggaataaaggcagactggtctcccaaaggctcag

SEQ ID NO: 148286 - DNA, 1190 bp, Homo sapiens
  Payload ID: 9357
  Gene Symbol: LUZP1
  Gene Name: leucine zipper protein 1
  ENST ID: ENST00000471849
  CDS Start-End: 372-1190
ggagccagaggaggcgccggtcgctggcagctgagcggcggaacccttcgctggcgggagcgcggttcggggccgcagaggggacattgaataaacctgagtattgtgtgcctgtattttgactgcgacctatcagatgagatcaggtcaagagacaactgcctttgaaagagagtgagtgactgtttccaaaacagcaagcatagggagagccgccggaagtattgacggaaagcttgaattacctacatgattgatgatggtctccagctgtcaaagaagattgtggttgccaagagaaaggtaaccatttctcatccccttgagtggaattggatgcctctaggagcccacattggctggcagtagacatggccgaatttacaagctacaaggagacggcctccagccgccacttgcggtttaagctacagagtctaagccgccgccttgatgagttggaggaagccacaaaaaacctccagaaagcagaggatgaactcctggatctccaggacaaggtgattcaggcagaaggtagcaactccagcatgttggcggagattgaagtgctgcgccagcgggtgctgagaattgaaggcaaagacgaggaaattaagagagcagaggatctgtgtcgtctgatgaaggagaaacttgaagaggaagaaaacctcacccgggagctgaaatctgagattgagcggcttcagaaacgaatggctgaattagagaagctagaagaggccttcagcaggagtaagaatgactgtacccagctgtgtctgagcctgaatgaggagagaaatctgaccaagaaaatctcctctgagctggaaatgctcagagtcaaagtgaaagaactagaatcttctgaggaccgcctggataaaactgagcagagtttagcgtcagagttagaaaagctgaaatcattaactctgagctttgtaagtgagagaaaatacttgaatgaaaaggagaaagaaaatgagaaattgataaaagaactcactcaaaaactagagcagaacaaaaaaatgaaccgagattatacaaggaatgcttctaatctggaaagaaatgacctacggattgaggatggcatctcttccacactgccgtccaaagaatcaagaaggaagggtggtctggactacctaaagcaggtagagaatgaaacaagaaac

SEQ ID NO: 148287 - DNA, 613 bp, Homo sapiens
  Payload ID: 9357
  Gene Symbol: LUZP1
  Gene Name: leucine zipper protein 1
  ENST ID: ENST00000475164
  CDS Start-End: 507-613
gtgatcctcccgcctcagcctcccaagaagctgggatgacaagtgtgtgccaccatgcctggctaatttttgtatttttagtagaaacagggtttcaccattttggccaggctgttctcaaactcctgacttcaagtcatccactcgcctcggccttccagagtgctgggattacaggcatgagccactgcgcccagtctgtctcattgttgatggggacattgaataaacctgagtattgtgtgcctgtattttgactgcgacctatcagatgagatcaggtcaagagacaactgcctttgaaagagagtgagtgactgtttccaaaacagcaagcatagggagagccgccggaagtattgacggaaagcttgaattacctacatgattgatgatggtctccagctgtcaaagaagattgtggttgccaagagaaaggtaaccatttctcatccccttgagtggaattggatgcctctaggagcccacattggctggcagtagacatggccgaatttacaagctacaaggagacggcctccagccgccacttgcggtttaagctacagagtctaagccgccgccttgatgagttggaggaagccacaaaaaa

SEQ ID NO: 148288 - DNA, 3553 bp, Homo sapiens
  Payload ID: 9358
  Gene Symbol: LUZP2
  Gene Name: leucine zipper protein 2
  Uniprot ID: Q86TE4
  ENST ID: ENST00000336930
  CDS Start-End: 67-1107
agcgacaggatcccgaagagagagagagaaggcagcgagggaaggaggaccccggcaggcagcagcatgaaattcagcccagcgcactacctgctgcctctcctgcctgcgctggtcctcagcaccagacaggactatgaagagctagaaaagcagctgaaagaagtctttaaggagcgaagcaccattcttcgtcagctgacaaagacatcaagagaacttgatggaattaaagtcaatcttcagtccttaaaaaacgatgagcagtctgccaaaactgatgttcagaaacttctggaattaggacagaaacaaagagaagaaatgaagtctcttcaggaggccctgcaaaatcagcttaaggagacatcagagaaagcagaaaaacaccaggctactattaattttttaaagactgaagttgaaagaaagagcaaaatgatccgagacctccagaatgagaataaaagcttgaaaaacaaactcttgtcaggaaacaagctctgtggcattcacgcagaagagtcaaaaaaaatccaagcccagctgaaggagcttcgttatgggaagaaggatttattatttaaggcgcagcagcttactgatctggaacaaaaattagctgtagccaaaaatgaactggagaaagcagctcttgacagggagtcacagatgaaagcaatgaaagagactgtgcagctctgcttgacatctgttttccgtgatcagcctcctccccctttgagtttaatcacatcaaatccaactcggatgttactcccacccaggaatattgcctctaagcttccagatgcagcggccaaaagcaagcctcaacaaagtgcttctggaaacaatgagagctctcaagttgagtcaacaaaggaaggaaatccaagtaccactgcctgtgactctcaagatgagggcagaccgtgttccatgaagcacaaagaaagtcccccaagtaatgccactgcagaaaccgagcctatcccacagaaattgcaaatgcctccttgctctgaatgtgaggtgaaaaaagccccagaaaaaccattgaccagctttgaagggatggcagctagagaagaaaaaatactgtaaatactaagaaactgtgttaaaaacgtccatttgctattgtcttcatattctttttagaccacaagcttgatggaaatactgtttctaaagcatgcaactttttcacaattttatgtaactttataaagtagcctacacattttcaaagattccagaccaattatgatccttaagcaataacctcattgaattgaatacccacagtcagaaatattttgttgtcaacagtaaattgtcccatataaattggtctggtttaactcaaatgctatctaacatgtaattctcccggttcatttggatatctagtacttctatgatatagttgtcaaaatcaactggaggataataaaatattgtgggttctcagcattcttagaatccaaattacaaccatatcagtaagggtttggtccacatgagccaactgaagtcattttcctcaaggttggaatttgtgccaacctaaatacgttgtttctttgatggtgtttattgctattggtattattttgaactaataacaattattttgtctaaataatgctaagacaattctgttaagaattttgtcagctaacataattcattaagtatgtttggcatcatatggacaaaatatttggatgaatgactaaatttctgacacaattaaatattttggcattctatagacacatctcctatgtatgtctactgtaattaatccaagttaataaccaagttttctgaaatacttggcaggatttttggtatgaagttgggtagtggaatagggaatgaagagtgagttctaaaatacaaatatgaaagcaggtaatatatatcacaaaacaggggtctgatgaaagtacaatagccatgttgattcaataaacccagatgcatattttttgaaaaccaatgtgttattgaaacaaatcaatggcagtgttaatccataagagttctgattttctataggaatatcactaatcaaaaaaatgcactcatgaataattggaagatagctcacaagcaagaggaattgacccttgaataattatctgattaataggtttcatagggcattcaaagttgcagactcagttaatgactacagttaagttgtctggactgaaaagtcatttcttttgtttagaacctttttgcaaccgtagaaagcatattaaaccattggttttgcaggatggatctgtcaaaccacaatatatacatttggatcagtgtatcctaggagacagttaataaaaatgtattaaaggaaatctttaatcaataaatgaacttagattctgagatttaatggcatacctctgatcaaaatggcatatttaaagaaatttaaagatttggagaattggaaaatatcgttagctgtaaaagtaatattatgacatatttatgtagcacttctattttcagaatagttcagtgtcattcattagcacaggcaggtcccaaccacaatggttcaacttaacggttttttcatgattctgtgaaagcttcataatttctacatgctttgaattttgaattttgttattttttggagggctagtgatacatggtccatgaaatattcaacactttattataaaatagggtttgtgttagacaatttgcccaactgtaggatgaggtatatgttctgagcacgtttaagcaggtttaagttagggtgggctatgattttccatttaggtatctgaaatgcatttcagacttacaatgttttcaacctttgacttctttatctgtatgtaatcctattgttaaatcaaggagcattcatatttttcataaaaccggctacccaaggaaaaaaataattagctttatggatgatccatagagctttcagatgaagtgactaggataaaataaaagatgaaggtctgaggtttcttctgactccttcatatttctaaaaataatcatacaaactagaatactgctagtctcccaagtcctgttccttgtaattctcccactgttctcagtggccctaaccatctctataggttcctgacagggaagcagatcatttagttttaatttatgttcagtctcccacctccaccctggggcccaacttcccttgcaggccttgtgggtcctatagaaagttattcaccatgtaatctagcacagcatgttttgaagcatctttggaatgaaaaaaaagaagaatcaggctgttatttcctgaaattgttatgagagataacatgttgaaaggtaagaactcaggttgatattaatcatgtttttatcaatcttcattttaaagttgtttttgttctgtatattctaaattccttttattaattcctggcttgatcaagtgggctttggatccatatgatttttttttttttttttttttgagatgaaatctcgctcttgttgcccaggctggagtgcaatggagcgatcttgg

SEQ ID NO: 148289 - DNA, 5016 bp, Homo sapiens
  Payload ID: 9358
  Gene Symbol: LUZP2
  Gene Name: leucine zipper protein 2
  Uniprot ID: Q86TE4
  ENST ID: ENST00000533227
  CDS Start-End: 288-1070
agcgagggaaggaggaccccggcaggcagcagcatgaaattcagcccagcgcactacctgctgcctctcctgcctgcgctggtcctcagcaccaggactatgaagagctagaaaagcagctgaaagaagtctttaaggagcgaagcaccattcttcgtcagctgacaaagacatcaagagaacttgatggaattaaagtcaatcttcagtccttaaaaaacgatgagcagtctgccaaaactgatgttcagaaacttctggaattaggacagaaacaaagagaagaaatgaagtctcttcaggaggccctgcaaaatcagcttaaggagacatcagagaaagcagaaaaacaccaggctactattaattttttaaagactgaagttgaaagaaagagcaaaatgatccgagacctccagaatgagaataaaagcttgaaaaacaaactcttgtcaggaaacaagctctgtggcattcacgcagaagagtcaaaaaaaatccaagcccagctgaaggagcttcgttatgggaagaaggatttattatttaaggcgcagcagcttactgatctggaacaaaaattagctgtagccaaaaatgaactggagaaagcagctcttgacagggagtcacagatgaaagcaatgaaagagactgtgcagctctgcttgacatctgttttccgtgatcagcctcctccccctttgagtttaatcacatcaaatccaactcggatgttactcccacccaggaatattgcctctaagcttccagatgcagcggccaaaagcaagcctcaacaaagtgcttctggaaacaatgagagctctcaagttgagtcaacaaaggaaggaaatccaagtaccactgcctgtgactctcaagatgagggcagaccgtgttccatgaagcacaaagaaagtcccccaagtaatgccactgcagaaaccgagcctatcccacagaaattgcaaatgcctccttgctctgaatgtgaggtgaaaaaagccccagaaaaaccattgaccagctttgaagggatggcagctagagaagaaaaaatactgtaaatactaagaaactgtgttaaaaacgtccatttgctattgtcttcatattctttttagaccacaagcttgatggaaatactgtttctaaagcatgcaactttttcacaattttatgtaactttataaagtagcctacacattttcaaagattccagaccaattatgatccttaagcaataacctcattgaattgaatacccacagtcagaaatattttgttgtcaacagtaaattgtcccatataaattggtctggtttaactcaaatgctatctaacatgtaattctcccggttcatttggatatctagtacttctatgatatagttgtcaaaatcaactggaggataataaaatattgtgggttctcagcattcttagaatccaaattacaaccatatcagtaagggtttggtccacatgagccaactgaagtcattttcctcaaggttggaatttgtgccaacctaaatacgttgtttctttgatggtgtttattgctattggtattattttgaactaataacaattattttgtctaaataatgctaagacaattctgttaagaattttgtcagctaacataattcattaagtatgtttggcatcatatggacaaaatatttggatgaatgactaaatttctgacacaattaaatattttggcattctatagacacatctcctatgtatgtctactgtaattaatccaagttaataaccaagttttctgaaatacttggcaggatttttggtatgaagttgggtagtggaatagggaatgaagagtgagttctaaaatacaaatatgaaagcaggtaatatatatcacaaaacaggggtctgatgaaagtacaatagccatgttgattcaataaacccagatgcatattttttgaaaaccaatgtgttattgaaacaaatcaatggcagtgttaatccataagagttctgattttctataggaatatcactaatcaaaaaaatgcactcatgaataattggaagatagctcacaagcaagaggaattgacccttgaataattatctgattaataggtttcatagggcattcaaagttgcagactcagttaatgactacagttaagttgtctggactgaaaagtcatttcttttgtttagaacctttttgcaaccgtagaaagcatattaaaccattggttttgcaggatggatctgtcaaaccacaatatatacatttggatcagtgtatcctaggagacagttaataaaaatgtattaaaggaaatctttaatcaataaatgaacttagattctgagatttaatggcatacctctgatcaaaatggcatatttaaagaaatttaaagatttggagaattggaaaatatcgttagctgtaaaagtaatattatgacatatttatgtagcacttctattttcagaatagttcagtgtcattcattagcacaggcaggtcccaaccacaatggttcaacttaacggttttttcatgattctgtgaaagcttcataatttctacatgctttgaattttgaattttgttattttttggagggctagtgatacatggtccatgaaatattcaacactttattataaaatagggtttgtgttagacaatttgcccaactgtaggatgaggtatatgttctgagcacgtttaagcaggtttaagttagggtgggctatgattttccatttaggtatctgaaatgcatttcagacttacaatgttttcaacctttgacttctttatctgtatgtaatcctattgttaaatcaaggagcattcatatttttcataaaaccggctacccaaggaaaaaaataattagctttatggatgatccatagagctttcagatgaagtgactaggataaaataaaagatgaaggtctgaggtttcttctgactccttcatatttctaaaaataatcatacaaactagaatactgctagtctcccaagtcctgttccttgtaattctcccactgttctcagtggccctaaccatctctataggttcctgacagggaagcagatcatttagttttaatttatgttcagtctcccacctccaccctggggcccaacttcccttgcaggccttgtgggtcctatagaaagttattcaccatgtaatctagcacagcatgttttgaagcatctttggaatgaaaaaaaagaagaatcaggctgttatttcctgaaattgttatgagagataacatgttgaaaggtaagaactcaggttgatattaatcatgtttttatcaatcttcattttaaagttgtttttgttctgtatattctaaattccttttattaattcctggcttgatcaagtgggctttggatccatatgatttttttttttttttttttttgagatgaaatctcgctcttgttgcccaggctggagtgcaatggagcgatcttggctcactgcaactctgcttcccaggttcaagtgattctccctgcctccgcctcccaagtagctgggattacaggtacctgccaccatgcccggctaatttttatatttttaatagagacggggtttcaccatgttggccaggctggtctcgaactcctgacctcaggcgatccacctgcctcagtctcctcccaaaatgctgggattacaggtgtgagccaccgtgcctggccagtgtgtttttttcctttaaatatatatggcattatacatccagcaaagtttactgtgttatactcattgcatcatttgtttaaaaaaaaaaaagaaacttgtagcaggagacatttaaaaatatatttaggagttccttttaataactaagttagagactctctttcagtaagttctatgactgtaccttaatgaatgcattttatttatctcaatttttatttgcttcaaaatagaatcggataagtttaaaatgttcctcttacatttgtgaatgtgtctatgagagaggggccatttctcacatattttaattaacaactaaataaacagacgttgttttaaaggaattaacacttaaatcccaaccatcctcatatagaataaaatatcaacctaaatctttactatagatagtataattctattatgtacctgtaatgataagcattgaaagattatttacattttgaaaaacatggaattgattcttattaagaaaaaagatattttccaatggagtaacttgttttaatagaggtacaaccagaaccaacaattgtatttctctatagttattttaaaatagtaatcaatgctatgtatttgatgtatatgtttctaaattagaaatttcttttggctttgtgtttttttaatgtgcgttaaatatgtaaactgaacctgttcctaaaatgcattaaacttgaatgctgtgtctatccaatgccaaaatgctcagaagaaaagtgaataattcagtcattcatctggatgtagttttctgtgtaatctcaaatatctgaatattgaaaaaactaggttgctaacttttttcattccttatgcaaatgtttagcatcatagtgctgtttcagatacagatctgtttcatcaaatatcctcaattacaagtctaagacagttatatgtaaagaaaatgtattattttagatgaacaatgtggataactgaactaaaacgatatttgtgaactttgctataatgaaatcttttatttttatagctcaggtattgtaattagcactaattgcagcagagactgaaataattattgacaccgtagagtaccatagagtaggttgaactggccagacctagacaatgaagaaaacacatactgtttacttaggagacattttcttagtcgtgtgtatagtcctaaatttccccaaactatgtgttcatttggattgtgttatataataacagtcgaatgatgaagaataaaagatgctgaaagatg

SEQ ID NO: 148290 - DNA, 577 bp, Homo sapiens
  Payload ID: 9358
  Gene Symbol: LUZP2
  Gene Name: leucine zipper protein 2
  ENST ID: ENST00000529015
  CDS Start-End: 50-577
gagagagagagaaggcagcgagggaaggaggaccccggcaggcagcagcatgaaattcagcccagcgcactacctgctgcctctcctgcctgcgctggtcctcagcaccagacaggactatgaagagctagaaaagcagctgaaagaagtctttaaggagcgaagcaccattcttcgtcagctgacaaagacatcaagagaacttgatggaattaaagtcaatcttcagtccttaaaaaacgatgagcagtctgccaaaactgatgttcagaaacttctggaattaggacagaaacaaagagaagaaatgaagtctcttcaggaggccctgcaaaatcagcttaaggagacatcagagaaagcagaaaaacaccaggctactattaattttttaaagactgaagttgaaagaaagagcaaaatgatccgagacctccagaatgaggcgcagcagcttactgatctggaacaaaaattagctgtagccaaaaatgaactggagaaagcagctcttgacagggagtcacagatgaaagcaatgaaagagactgtgcagctctgcttgacatctgttttc

SEQ ID NO: 148291 - DNA, 4981 bp, Homo sapiens
  Payload ID: 9358
  Gene Symbol: LUZP2
  Gene Name: leucine zipper protein 2
  Uniprot ID: Q86TE4
  ENST ID: ENST00000620308
  CDS Start-End: 226-1008
ggctctcatgcctgttctttctgtgttagacaggactatgaagagctagaaaagcagctgaaagaagtctttaaggagcgaagcaccattcttcgtcagctgacaaagacatcaagagaacttgatggaattaaagtcaatcttcagtccttaaaaaacgatgagcagtctgccaaaactgatgttcagaaacttctggaattaggacagaaacaaagagaagaaatgaagtctcttcaggaggccctgcaaaatcagcttaaggagacatcagagaaagcagaaaaacaccaggctactattaattttttaaagactgaagttgaaagaaagagcaaaatgatccgagacctccagaatgagaataaaagcttgaaaaacaaactcttgtcaggaaacaagctctgtggcattcacgcagaagagtcaaaaaaaatccaagcccagctgaaggagcttcgttatgggaagaaggatttattatttaaggcgcagcagcttactgatctggaacaaaaattagctgtagccaaaaatgaactggagaaagcagctcttgacagggagtcacagatgaaagcaatgaaagagactgtgcagctctgcttgacatctgttttccgtgatcagcctcctccccctttgagtttaatcacatcaaatccaactcggatgttactcccacccaggaatattgcctctaagcttccagatgcagcggccaaaagcaagcctcaacaaagtgcttctggaaacaatgagagctctcaagttgagtcaacaaaggaaggaaatccaagtaccactgcctgtgactctcaagatgagggcagaccgtgttccatgaagcacaaagaaagtcccccaagtaatgccactgcagaaaccgagcctatcccacagaaattgcaaatgcctccttgctctgaatgtgaggtgaaaaaagccccagaaaaaccattgaccagctttgaagggatggcagctagagaagaaaaaatactgtaaatactaagaaactgtgttaaaaacgtccatttgctattgtcttcatattctttttagaccacaagcttgatggaaatactgtttctaaagcatgcaactttttcacaattttatgtaactttataaagtagcctacacattttcaaagattccagaccaattatgatccttaagcaataacctcattgaattgaatacccacagtcagaaatattttgttgtcaacagtaaattgtcccatataaattggtctggtttaactcaaatgctatctaacatgtaattctcccggttcatttggatatctagtacttctatgatatagttgtcaaaatcaactggaggataataaaatattgtgggttctcagcattcttagaatccaaattacaaccatatcagtaagggtttggtccacatgagccaactgaagtcattttcctcaaggttggaatttgtgccaacctaaatacgttgtttctttgatggtgtttattgctattggtattattttgaactaataacaattattttgtctaaataatgctaagacaattctgttaagaattttgtcagctaacataattcattaagtatgtttggcatcatatggacaaaatatttggatgaatgactaaatttctgacacaattaaatattttggcattctatagacacatctcctatgtatgtctactgtaattaatccaagttaataaccaagttttctgaaatacttggcaggatttttggtatgaagttgggtagtggaatagggaatgaagagtgagttctaaaatacaaatatgaaagcaggtaatatatatcacaaaacaggggtctgatgaaagtacaatagccatgttgattcaataaacccagatgcatattttttgaaaaccaatgtgttattgaaacaaatcaatggcagtgttaatccataagagttctgattttctataggaatatcactaatcaaaaaaatgcactcatgaataattggaagatagctcacaagcaagaggaattgacccttgaataattatctgattaataggtttcatagggcattcaaagttgcagactcagttaatgactacagttaagttgtctggactgaaaagtcatttcttttgtttagaacctttttgcaaccgtagaaagcatattaaaccattggttttgcaggatggatctgtcaaaccacaatatatacatttggatcagtgtatcctaggagacagttaataaaaatgtattaaaggaaatctttaatcaataaatgaacttagattctgagatttaatggcatacctctgatcaaaatggcatatttaaagaaatttaaagatttggagaattggaaaatatcgttagctgtaaaagtaatattatgacatatttatgtagcacttctattttcagaatagttcagtgtcattcattagcacaggcaggtcccaaccacaatggttcaacttaacggttttttcatgattctgtgaaagcttcataatttctacatgctttgaattttgaattttgttattttttggagggctagtgatacatggtccatgaaatattcaacactttattataaaatagggtttgtgttagacaatttgcccaactgtaggatgaggtatatgttctgagcacgtttaagcaggtttaagttagggtgggctatgattttccatttaggtatctgaaatgcatttcagacttacaatgttttcaacctttgacttctttatctgtatgtaatcctattgttaaatcaaggagcattcatatttttcataaaaccggctacccaaggaaaaaaataattagctttatggatgatccatagagctttcagatgaagtgactaggataaaataaaagatgaaggtctgaggtttcttctgactccttcatatttctaaaaataatcatacaaactagaatactgctagtctcccaagtcctgttccttgtaattctcccactgttctcagtggccctaaccatctctataggttcctgacagggaagcagatcatttagttttaatttatgttcagtctcccacctccaccctggggcccaacttcccttgcaggccttgtgggtcctatagaaagttattcaccatgtaatctagcacagcatgttttgaagcatctttggaatgaaaaaaaagaagaatcaggctgttatttcctgaaattgttatgagagataacatgttgaaaggtaagaactcaggttgatattaatcatgtttttatcaatcttcattttaaagttgtttttgttctgtatattctaaattccttttattaattcctggcttgatcaagtgggctttggatccatatgatttttttttttttttttttttgagatgaaatctcgctcttgttgcccaggctggagtgcaatggagcgatcttggctcactgcaactctgcttcccaggttcaagtgattctccctgcctccgcctcccaagtagctgggattacaggtacctgccaccatgcccggctaatttttatatttttaatagagacggggtttcaccatgttggccaggctggtctcgaactcctgacctcaggcgatccacctgcctcagtctcctcccaaaatgctgggattacaggtgtgagccaccgtgcctggccagtgtgtttttttcctttaaatatatatggcattatacatccagcaaagtttactgtgttatactcattgcatcatttgtttaaaaaaaaaaaagaaacttgtagcaggagacatttaaaaatatatttaggagttccttttaataactaagttagagactctctttcagtaagttctatgactgtaccttaatgaatgcattttatttatctcaatttttatttgcttcaaaatagaatcggataagtttaaaatgttcctcttacatttgtgaatgtgtctatgagagaggggccatttctcacatattttaattaacaactaaataaacagacgttgttttaaaggaattaacacttaaatcccaaccatcctcatatagaataaaatatcaacctaaatctttactatagatagtataattctattatgtacctgtaatgataagcattgaaagattatttacattttgaaaaacatggaattgattcttattaagaaaaaagatattttccaatggagtaacttgttttaatagaggtacaaccagaaccaacaattgtatttctctatagttattttaaaatagtaatcaatgctatgtatttgatgtatatgtttctaaattagaaatttcttttggctttgtgtttttttaatgtgcgttaaatatgtaaactgaacctgttcctaaaatgcattaaacttgaatgctgtgtctatccaatgccaaaatgctcagaagaaaagtgaataattcagtcattcatctggatgtagttttctgtgtaatctcaaatatctgaatattgaaaaaactaggttgctaacttttttcattccttatgcaaatgtttagcatcatagtgctgtttcagatacagatctgtttcatcaaatatcctcaattacaagtctaagacagttatatgtaaagaaaatgtattattttagatgaacaatgtggataactgaactaaaacgatatttgtgaactttgctataatgaaatcttttatttttatagctcaggtattgtaattagcactaattgcagcagagactgaaataattattgacaccgtagagtaccatagagtaggttgaactggccagacctagacaatgaagaaaacacatactgtttacttaggagacattttcttagtcgtgtgtatagtcctaaatttccccaaactatgtgttcatttggattgtgttatataataacagtcgaatgatgaagaataaaagatgctgaaagatggcctatttttgttcaataaagattgtt

SEQ ID NO: 148292 - DNA, 1701 bp, Homo sapiens
  Payload ID: 9359
  Gene Symbol: LUZP4
  Gene Name: leucine zipper protein 4
  Uniprot ID: Q9P127
  ENST ID: ENST00000371920
  CDS Start-End: 8-949
agggaagatggcttcgtttcggaagctaacgctttctgaaaaagtgccgccaaatcatcccagtcggaaaaaggttaacttcctagatatgtctctagacgacattataatctataaagagttagaagggacaaatgctgaagaagaaaagaataaaagacagaaccatagtaaaaaggaatcgccttcaagacagcaatcaaaagctcatagacatcgccatcggagaggctactcaagatgcagaagcaactctgaggaaggaaatcatgataaaaaaccatcccaaaaaccttctggattcaagtctggacaacaccctttaaatgggcagcctttaattgagcaggagaagtgcagtgacaattatgaggcccaagcagagaagaatcaaggccagtcagaggggaaccagcatcaatcagaaggaaatccggacaaatcagaagaatcccagggccaaccagaagaaaatcatcattctgagcgatcccgaaaccacttagagagatctctttctcagtcagacagatctcaagggcagctaaagagacatcatccccaatatgagagatctcatggccaatacaagagatctcatggtcaatctgagagatctcatggccactcagagagatctcatggtcactcagagagatctcatggtcactcagagagatctcatggtcactcaaagagatctcgtagccagggagatcttgtggacactcagagtgatctcatagccactcagagagatctcatagccactcagaaagatctcatagccactcagagagatctcatagccactcagagagatctcatagtcactcagagagatctcgtggccactgagagagatctcataaatcagtcagggagatctcatggccaatcagaaagacatcagagatactcaacaggtaaaaatacaataactacttaatcatcagaacaatgtgttgaattctgtggaaatagaaaagcatatatctatattctaatggctaaatatgtatttgttgaaacatgtatattgggacaaagacataaatattagaatggaggtaatacatacatagtatcaatattgtttcaacttgatgtcctctaagctatcatccagttacccaggatgtcccattaagttgttcccggtaggtctgctttccctggaagagccgtatgtactcagcctttcctattgggccttccccacaattagaatattttgacttagtgtcctgtcccccttggacgttccaacttgacttagtgtccagtgccccttggacattccaacctggtaggtaagctaatctaacaactaactgccaaattgataatatataatctatgataatgaatatctcttttgtgtctccttcctaagccatcctcagagagtccttagcagacaaatggtagatgtatctttgggcagctgaacttttctgctttcctcaaatcagaccatatgagaggatatattctatgcatagatgtaatgctaaccttctgaatatattttgaatacatttatatattcactgttgccttataaaactgttagggtaggtctgtctaccctagcaaaagaaacacagaaatttaaatgtactgggagttatgttgttaaaaacacaagatatgttaactgcagtttgtttggttattcaataaaagttttagttttaa

SEQ ID NO: 148293 - DNA, 1606 bp, Homo sapiens
  Payload ID: 9359
  Gene Symbol: LUZP4
  Gene Name: leucine zipper protein 4
  ENST ID: ENST00000371921
  CDS Start-End: 34-270
cctcggagtgtgtggcgccatgatgcagggaagatggcttcgtttcggaagctaacgctttctgaaaaagtgccgccaaatcatcccagtcggaaaaaggttaacttcctagatatgtctctagacgacattataatctataaagagttagaagggacaaatgctgaagaagaaaagaataaaagacagaaccatagtaaaaaggaatcgccttcaagacagcaatcaaaagctcatagacatcgccatcggagaggagaagtgcagtgacaattatgaggcccaagcagagaagaatcaaggccagtcagaggggaaccagcatcaatcagaaggaaatccggacaaatcagaagaatcccagggccaaccagaagaaaatcatcattctgagcgatcccgaaaccacttagagagatctctttctcagtcagacagatctcaagggcagctaaagagacatcatccccaatatgagagatctcatggccaatacaagagatctcatggtcaatctgagagatctcatggccactcagagagatctcatggtcactcagagagatctcatggtcactcagagagatctcatggtcactcaaagagatctcgtagccagggagatcttgtggacactcagagtgatctcatagccactcagagagatctcatagccactcagaaagatctcatagccactcagagagatctcatagccactcagagagatctcatagtcactcagagagatctcgtggccactgagagagatctcataaatcagtcagggagatctcatggccaatcagaaagacatcagagatactcaacaggtaaaaatacaataactacttaatcatcagaacaatgtgttgaattctgtggaaatagaaaagcatatatctatattctaatggctaaatatgtatttgttgaaacatgtatattgggacaaagacataaatattagaatggaggtaatacatacatagtatcaatattgtttcaacttgatgtcctctaagctatcatccagttacccaggatgtcccattaagttgttcccggtaggtctgctttccctggaagagccgtatgtactcagcctttcctattgggccttccccacaattagaatattttgacttagtgtcctgtcccccttggacgttccaacttgacttagtgtccagtgccccttggacattccaacctggtaggtaagctaatctaacaactaactgccaaattgataatatataatctatgataatgaatatctcttttgtgtctccttcctaagccatcctcagagagtccttagcagacaaatggtagatgtatctttgggcagctgaacttttctgctttcctcaaatcagaccatatgagaggatatattctatgcatagatgtaatgctaaccttctgaatatattttgaatacatttatatattcactgttgccttataaaactgttagggtaggtctgtctaccctagcaaaagaaacacagaaatttaaatgtactgggagttatgttgttaaaaacacaagatatgttaactgcagtttgtttggttattcaataaaagttttagtttt

SEQ ID NO: 148294 - DNA, 177 bp, Homo sapiens
  Payload ID: 9360
  Gene Symbol: LUZP6
  Gene Name: leucine zipper protein 6
  Uniprot ID: Q538Z0
  ENST ID: ENST00000589735
  CDS Start-End: 1-177
attaaatcagtcatttcatatgcactatatcaagtacaaacaggtagtttacctgtttatagtagtgtactaacaaagtctcccttgcagcttcagactgttatctataggcttatcgttcaaatacagcacttgaatatcccaagtagttcttctacgcatagctcacctttctaa

SEQ ID NO: 148295 - DNA, 5257 bp, Homo sapiens
  Payload ID: 9361
  Gene Symbol:
  Gene Name: Leucine zipper putative tumor suppressor 3 [Source:UniProtKB/Swiss-Prot
  Acc:O60299]
  Uniprot ID: O60299
  ENST ID: ENST00000329152
  CDS Start-End: 1399-3420
cgcttgtgggccggccttgggggagggggacgcgcacccacagaaggactcagagggcttcacggtaagctgagcagggtcaaggtccacagggagcgggagagggtagtaatccgggaagtcttcctggtggcagtgaattctttgcggggttcggcaggcgcaggatccttggggccgcgcaccctgcagcggcccctcccctcccctcccccctcccacctgtgggaaacgcaggccctgagagaggctccgtcagtgccagcagctggcgccactgcgtcccctgccccggcctcagccagccctgggacctctgcggaggactgatcccgggaagggggccctgtcttcccagggccccggtgcggccgagctgggaagaccttggggagggcaggcctgccacctactgcagccgcggcccccgtccatccgggagggacaggctgtgcccttggcggcgcccacccgcgacccagatgtgcgtcgcctacccaccctcccccagacccccgtttcctcaggcgctcgccgcctcggggcgcctggcacgcggcagccccgcaaggtaggtccttcattcctcccatttcgcagaggagaaaactgcagtccgggatggctcagtcggcccctccaaagtcgcgcagctggttcgggccgagccccgactgcgagagtgaggcacatggcccctgcagaccgggcctcggagggtcccaggcttgaggacccgtcggcccctcaaccccttggaaaggcaaggagagaagcctgcgctggtagtgagcttccacttctgccctgactgcaacacttaggttagggggctgggaaggacccccaccctcaatttttggataggggtgtatttctctccctcccctaatttctgaggttggttccctgttggattcaggtactgctctccccttccaaccccatttccccagcccatgaggttgggatattagggtcccagacccaagataaagaaccccaaaattctggggttgcagcaaagagttgagagggtcactgagcctgggaagctcatggcggaggtggggctaaggcagaagtttaggaatggaacgctgagctgagctgagctgagctgagctgagcaacgctgggggctatgtgcatggagccctgggggttgggctttatcaggtgggcaacaggcagcccccattcccaagttctctcttttatcccagccttattccttcaccttggatgcctgggaactttttgtacccattgtagggaaggggacactgaggggcagagcggtgccgggttgacttggctggggtggtgggaataggagtagggtcttacctatctctgccttcccacctgtgcccacagtgcccccctggcttagtcatggcgaagctggagacgctgcctgtgcgcgctgacccagggcgggatcctctcctggcctttgccccacggccctccgagcttggacccccggacccccgcctggccatgggcagcgtgggcagtggggtggcccatgcccaggagtttgccatgaagagcgtgggtacccgcacagggggtgggggcagccagggcagtttccctggcccccgaggcagtggcagtggggccagcagggagaggccgggccgctacccctcagaggacaagggtctcgccaactccctctacctcaatggtgagctgcggggcagtgaccacaccgatgtctgtggcaacgtggttggcagcagcggaggcagcagcagcagtggtggcagtgacaaagccccaccgcagtatcgtgagcccagccacccacccaagctcctggccacctctggcaagctagaccagtgctcagaaccactagttcggccgtcggccttcaagcctgtcgtacccaagaatttccactccatgcagaatttgtgccccccgcagaccaatgggactcctgagggacggcagggccctggtggcctcaaaggcggactggacaagtctcggaccatgactccagcgggtgggagtgggagtggcctctcagactcaggccggaactccctcacaagcctgcccacctacagctccagctacagccagcacctggcacccctcagtgcctccaccagccacattaaccgcattggcactgccagctatggtagtggtagtggcggcagcagcggtggggggtcgggctaccaggacctggggacctccgatagtggacgggcctccagcaagagtgggtcgtcgtcatctatggggcggccaggccacctgggctctggggagggcggaggtggaggcctgcctttcgcggcctgctcaccgccctcccccagtgcactcatccaggagctggaggagcggctgtgggagaaggagcaggaggtggcagctctgcggcgcagcctggagcagagcgaggcggctgtggcccaggtactggaggagcggcagaaggcgtgggagcgggagctggccgagctgcggcagggctgcagcgggaagctacagcaggtggcccgacgtgcccagcgcgcccagcagggcctacagctgcaggtgttgcggctgcagcaggacaagaagcagctgcaggaggaggcggcccggctgatgcggcagcgggaagagctggaggacaaggtggccgcctgccagaaggagcaggccgacttcctgccccggatagaggaaactaagtgggaggtgtgccagaaggctggcgagatctccctcctgaagcagcagctgaaggactcgcaggcggatgtgtcgcagaagttgagtgagatcgtgggactgcgctcgcagctgcgggagggccgggcttcgctgcgggagaaggaggagcagctgctcagcctgcgggactccttcagcagcaagcaggccagcctggagctgggcgaaggcgagctgcctgccgcctgcctcaagccggcgctgacccccgtggacccggccgagccacaggatgctctggccacctgcgagagcgacgaggctaagatgcgccgtcaggccggggtggccgctgccgcctccttggtttccgtggacggggaggcggaggctggcggggagagcgggacgcgggccctgcggcgggaggtggggcggctgcaggccgagctggcggctgagcggcgggcccgggagcgccagggtgccagcttcgccgaggagcgccgcgtgtggctggaggagaaggagaaggtgatcgagtaccagaagcagctgcagctgagctacgtggagatgtaccagcgcaaccagcagctggagcgcaggctgcgggagcgcggggccgcagggggtgcaagcacgcccactccccagcatggcgaggagaagaaggcctggaccccctcccgcctcgagcgcattgagtccacagaaatctgatcgacctgggcactcggcattttgacacatgtcctgtcaaaaggccagagtccccagtgtcccctcccctccatctctcttccccatagaccccataaccccagaccaaagaggttctctaagcagctgtgaccaggttcctccctccccacctgccctcctagctccagcactgcccccgtggcagcccacttggacccccctaaaaggagggaataggaggagggcagggtgagtgggggcaatcctaggtggtgggggagtcatgctccctttctcggcacccccttgttggagatggaggcagcagacgtgcagtgccataaggtgccccagtccttctggaggcctgggctgctactgttggccaccctgtgtctagtgatgctctctgtgctcacctcctaggccatggagcctgagggggcctgcaccaggtttgctgaaactgacagagcctgggctccagacctctctccctcctacagtgctctccctccctgggcagattggcaggacaagtgggagcagatggcctgcctttggctgagagggctacctgcccagcccctcccccaacaagatctcttggactcaggcctcagagcctggcctggttgtgagtgtgtgtccctgtgtgtgtgttgcgggaggggaggactggggctggaagtccagcacccagggaagatctgtcctcctgttcttgggaagcgttgcctgacggcttctcggctctaccctcacccttctggccaggatcccgcagggcaacagccccatctgcttggctgaccccacacccaggaccactgtccggctctaacacagctattaagtgctacctgcctctcaggcactctcctcgcccagtttctgaggtcagacgagtgtctgcgatgtcttcccgcactctattcccccagcctctttctgctttcatgctcagcacatcatcttcctaggcagtctcttccccaaagtctcaccttttcttccaatagaaaattccgcttgacctttggtgcactgcccacttcccagctccactggcccaagtctgagccggaggcccttgttttgggggcggggggagagttggatgtgattgcccttgaagaacaaggctgacctgagaggttcctggcgccctgaggtggctcagcacctgcccagggtaggcctggcatgaggggttaggtcagccaatgtcagctgcttctcttggggccctctcagagtctatctccccaagacaggaagggaaaagcaaatttctaattcaccagcaataaaaattggaggaggcttggccctcagcccttatatctctctctttttcactctcttcctcccacccccaagactgagttttggggggcaaggtggagagagctggcaactactgtgagcaagtcccctagcccctgaccagcctcctcccatgactggtgactgtttaatgagctgtgcatcccccacaaaaacatgagtgcccctctgtgtggcctctaaccctctgcacagcccttctgggtggtcctcaccaggtctctgagctgggtgggaggccatcctggcgaccactgcccattccattcacccctcactgtacctgccctagaacctgggcctaggccacaggggcagggagaagagaaggcattagtaagaaaaaaatagaaaaaaatatgaacagactcagctttgggacgtccaaccacaaaagaaattatatataaatatatataaatatatatctctaccatatgtgatggaaagactttttgttttcctttcccaaagaaataaaacggaaaaagcctcttgagtggta

SEQ ID NO: 148296 - DNA, 4238 bp, Homo sapiens
  Payload ID: 9361
  Gene Symbol:
  Gene Name: Leucine zipper putative tumor suppressor 3 [Source:UniProtKB/Swiss-Prot
  Acc:O60299]
  Uniprot ID: O60299
  ENST ID: ENST00000337576
  CDS Start-End: 381-2402
tcgggcggggagcaggaggggcgcggagcggagccgggcccgcgcagcgcgccccgccgggcgtgcttcgggctgcgccagcaagcggggccggtggcgcccgtgtcggagaccccgcgccggaccctgaggcagcgaaggagaaaactgcagtccgggatggctcagtcggcccctccaaagtcgcgcagctggttcgggccgagccccgactgcgagagtgaggcacatggcccctgcagaccgggcctcggagggtcccaggcttgaggacccgtcggcccctcaaccccttggaaaggcaaggagagaagcctgcgctggtagtgagcttccacttctgccctgactgcaacacttagtgcccccctggcttagtcatggcgaagctggagacgctgcctgtgcgcgctgacccagggcgggatcctctcctggcctttgccccacggccctccgagcttggacccccggacccccgcctggccatgggcagcgtgggcagtggggtggcccatgcccaggagtttgccatgaagagcgtgggtacccgcacagggggtgggggcagccagggcagtttccctggcccccgaggcagtggcagtggggccagcagggagaggccgggccgctacccctcagaggacaagggtctcgccaactccctctacctcaatggtgagctgcggggcagtgaccacaccgatgtctgtggcaacgtggttggcagcagcggaggcagcagcagcagtggtggcagtgacaaagccccaccgcagtatcgtgagcccagccacccacccaagctcctggccacctctggcaagctagaccagtgctcagaaccactagttcggccgtcggccttcaagcctgtcgtacccaagaatttccactccatgcagaatttgtgccccccgcagaccaatgggactcctgagggacggcagggccctggtggcctcaaaggcggactggacaagtctcggaccatgactccagcgggtgggagtgggagtggcctctcagactcaggccggaactccctcacaagcctgcccacctacagctccagctacagccagcacctggcacccctcagtgcctccaccagccacattaaccgcattggcactgccagctatggtagtggtagtggcggcagcagcggtggggggtcgggctaccaggacctggggacctccgatagtggacgggcctccagcaagagtgggtcgtcgtcatctatggggcggccaggccacctgggctctggggagggcggaggtggaggcctgcctttcgcggcctgctcaccgccctcccccagtgcactcatccaggagctggaggagcggctgtgggagaaggagcaggaggtggcagctctgcggcgcagcctggagcagagcgaggcggctgtggcccaggtactggaggagcggcagaaggcgtgggagcgggagctggccgagctgcggcagggctgcagcgggaagctacagcaggtggcccgacgtgcccagcgcgcccagcagggcctacagctgcaggtgttgcggctgcagcaggacaagaagcagctgcaggaggaggcggcccggctgatgcggcagcgggaagagctggaggacaaggtggccgcctgccagaaggagcaggccgacttcctgccccggatagaggaaactaagtgggaggtgtgccagaaggctggcgagatctccctcctgaagcagcagctgaaggactcgcaggcggatgtgtcgcagaagttgagtgagatcgtgggactgcgctcgcagctgcgggagggccgggcttcgctgcgggagaaggaggagcagctgctcagcctgcgggactccttcagcagcaagcaggccagcctggagctgggcgaaggcgagctgcctgccgcctgcctcaagccggcgctgacccccgtggacccggccgagccacaggatgctctggccacctgcgagagcgacgaggctaagatgcgccgtcaggccggggtggccgctgccgcctccttggtttccgtggacggggaggcggaggctggcggggagagcgggacgcgggccctgcggcgggaggtggggcggctgcaggccgagctggcggctgagcggcgggcccgggagcgccagggtgccagcttcgccgaggagcgccgcgtgtggctggaggagaaggagaaggtgatcgagtaccagaagcagctgcagctgagctacgtggagatgtaccagcgcaaccagcagctggagcgcaggctgcgggagcgcggggccgcagggggtgcaagcacgcccactccccagcatggcgaggagaagaaggcctggaccccctcccgcctcgagcgcattgagtccacagaaatctgatcgacctgggcactcggcattttgacacatgtcctgtcaaaaggccagagtccccagtgtcccctcccctccatctctcttccccatagaccccataaccccagaccaaagaggttctctaagcagctgtgaccaggttcctccctccccacctgccctcctagctccagcactgcccccgtggcagcccacttggacccccctaaaaggagggaataggaggagggcagggtgagtgggggcaatcctaggtggtgggggagtcatgctccctttctcggcacccccttgttggagatggaggcagcagacgtgcagtgccataaggtgccccagtccttctggaggcctgggctgctactgttggccaccctgtgtctagtgatgctctctgtgctcacctcctaggccatggagcctgagggggcctgcaccaggtttgctgaaactgacagagcctgggctccagacctctctccctcctacagtgctctccctccctgggcagattggcaggacaagtgggagcagatggcctgcctttggctgagagggctacctgcccagcccctcccccaacaagatctcttggactcaggcctcagagcctggcctggttgtgagtgtgtgtccctgtgtgtgtgttgcgggaggggaggactggggctggaagtccagcacccagggaagatctgtcctcctgttcttgggaagcgttgcctgacggcttctcggctctaccctcacccttctggccaggatcccgcagggcaacagccccatctgcttggctgaccccacacccaggaccactgtccggctctaacacagctattaagtgctacctgcctctcaggcactctcctcgcccagtttctgaggtcagacgagtgtctgcgatgtcttcccgcactctattcccccagcctctttctgctttcatgctcagcacatcatcttcctaggcagtctcttccccaaagtctcaccttttcttccaatagaaaattccgcttgacctttggtgcactgcccacttcccagctccactggcccaagtctgagccggaggcccttgttttgggggcggggggagagttggatgtgattgcccttgaagaacaaggctgacctgagaggttcctggcgccctgaggtggctcagcacctgcccagggtaggcctggcatgaggggttaggtcagccaatgtcagctgcttctcttggggccctctcagagtctatctccccaagacaggaagggaaaagcaaatttctaattcaccagcaataaaaattggaggaggcttggccctcagcccttatatctctctctttttcactctcttcctcccacccccaagactgagttttggggggcaaggtggagagagctggcaactactgtgagcaagtcccctagcccctgaccagcctcctcccatgactggtgactgtttaatgagctgtgcatcccccacaaaaacatgagtgcccctctgtgtggcctctaaccctctgcacagcccttctgggtggtcctcaccaggtctctgagctgggtgggaggccatcctggcgaccactgcccattccattcacccctcactgtacctgccctagaacctgggcctaggccacaggggcagggagaagagaaggcattagtaagaaaaaaatagaaaaaaatatgaacagactcagctttgggacgtccaaccacaaaagaaattatatataaatatatataaatatatatctctaccatatgtgatggaaagactttttgttttcctttcccaaagaaataaaacggaaaaagcctcttgagtggt

SEQ ID NO: 148297 - DNA, 4055 bp, Homo sapiens
  Payload ID: 9361
  Gene Symbol:
  Gene Name: Leucine zipper putative tumor suppressor 3 [Source:UniProtKB/Swiss-Prot
  Acc:O60299]
  ENST ID: ENST00000360342
  CDS Start-End: 335-2218
gcgcgccccgccgggcgtgcttcgggctgcgccagcaagcggggccggtggcgcccgtgtcggagaccccgcgccggaccctgaggcagcgaaggagaaaactgcagtccgggatggctcagtcggcccctccaaagtcgcgcagctggttcgggccgagccccgactgcgagagtgaggcacatggcccctgcagaccgggcctcggagggtcccaggcttgaggacccgtcggcccctcaaccccttggaaaggcaaggagagaagcctgcgctggtagtgagcttccacttctgccctgactgcaacacttagtgcccccctggcttagtcatggcgaagctggagacgctgcctgtgcgcgctgacccagggcgggatcctctcctggcctttgccccacggccctccgagcttggacccccggacccccgcctggccatgggcagcgtgggcagtggggtggcccatgcccaggagtttgccatgaagagcgtgggtacccgcacagggggtgggggcagccagggcagtttccctggcccccgaggcagtggcagtggggccagcagggagaggccgggccgctacccctcagaggacaagggtctcgccaactccctctacctcaatggtgagctgcggggcagtgaccacaccgatgtctgtggcaacgtggttggcagcagcggaggcagcagcagcagtggtggcagtgacaaagccccaccgcagtatcgtgagcccagccacccacccaagctcctggccacctctggcaagctagaccagtgctcagaaccactagttcggccgtcggccttcaagcctgtcgtacccaagaatttccactccatgcagaatttgtgccccccgcagaccaatgggactcctgagggacggcagggccctggtggcctcaaaggcggactggacaagtctcggaccatgactccagcgggtgggagtgggagtggcctctcagactcaggccggaactccctcacaagcctgcccacctacagctccagctacagccagcacctggcacccctcagtgcctccaccagccacattaaccgcattggcactgccagctatggtagtggtagtggcggcagcagcggtggggggtcgggctaccaggacctggggacctccgatagtggacgggcctccagcaagagtgggtcgtcgtcatctatggggcggccaggccacctgggctctggggagggcggaggtggaggcctgcctttcgcggcctgctcaccgccctcccccagtgcactcatccaggagctggaggagcggctgtgggagaaggagcaggaggtggcagctctgcggcgcagcctggagcagagcgaggcggctgtggcccagcaggacaagaagcagctgcaggaggaggcggcccggctgatgcggcagcgggaagagctggaggacaaggtggccgcctgccagaaggagcaggccgacttcctgccccggatagaggaaactaagtgggaggtgtgccagaaggctggcgagatctccctcctgaagcagcagctgaaggactcgcaggcggatgtgtcgcagaagttgagtgagatcgtgggactgcgctcgcagctgcgggagggccgggcttcgctgcgggagaaggaggagcagctgctcagcctgcgggactccttcagcagcaagcaggccagcctggagctgggcgaaggcgagctgcctgccgcctgcctcaagccggcgctgacccccgtggacccggccgagccacaggatgctctggccacctgcgagagcgacgaggctaagatgcgccgtcaggccggggtggccgctgccgcctccttggtttccgtggacggggaggcggaggctggcggggagagcgggacgcgggccctgcggcgggaggtggggcggctgcaggccgagctggcggctgagcggcgggcccgggagcgccagggtgccagcttcgccgaggagcgccgcgtgtggctggaggagaaggagaaggtgatcgagtaccagaagcagctgcagctgagctacgtggagatgtaccagcgcaaccagcagctggagcgcaggctgcgggagcgcggggccgcagggggtgcaagcacgcccactccccagcatggcgaggagaagaaggcctggaccccctcccgcctcgagcgcattgagtccacagaaatctgatcgacctgggcactcggcattttgacacatgtcctgtcaaaaggccagagtccccagtgtcccctcccctccatctctcttccccatagaccccataaccccagaccaaagaggttctctaagcagctgtgaccaggttcctccctccccacctgccctcctagctccagcactgcccccgtggcagcccacttggacccccctaaaaggagggaataggaggagggcagggtgagtgggggcaatcctaggtggtgggggagtcatgctccctttctcggcacccccttgttggagatggaggcagcagacgtgcagtgccataaggtgccccagtccttctggaggcctgggctgctactgttggccaccctgtgtctagtgatgctctctgtgctcacctcctaggccatggagcctgagggggcctgcaccaggtttgctgaaactgacagagcctgggctccagacctctctccctcctacagtgctctccctccctgggcagattggcaggacaagtgggagcagatggcctgcctttggctgagagggctacctgcccagcccctcccccaacaagatctcttggactcaggcctcagagcctggcctggttgtgagtgtgtgtccctgtgtgtgtgttgcgggaggggaggactggggctggaagtccagcacccagggaagatctgtcctcctgttcttgggaagcgttgcctgacggcttctcggctctaccctcacccttctggccaggatcccgcagggcaacagccccatctgcttggctgaccccacacccaggaccactgtccggctctaacacagctattaagtgctacctgcctctcaggcactctcctcgcccagtttctgaggtcagacgagtgtctgcgatgtcttcccgcactctattcccccagcctctttctgctttcatgctcagcacatcatcttcctaggcagtctcttccccaaagtctcaccttttcttccaatagaaaattccgcttgacctttggtgcactgcccacttcccagctccactggcccaagtctgagccggaggcccttgttttgggggcggggggagagttggatgtgattgcccttgaagaacaaggctgacctgagaggttcctggcgccctgaggtggctcagcacctgcccagggtaggcctggcatgaggggttaggtcagccaatgtcagctgcttctcttggggccctctcagagtctatctccccaagacaggaagggaaaagcaaatttctaattcaccagcaataaaaattggaggaggcttggccctcagcccttatatctctctctttttcactctcttcctcccacccccaagactgagttttggggggcaaggtggagagagctggcaactactgtgagcaagtcccctagcccctgaccagcctcctcccatgactggtgactgtttaatgagctgtgcatcccccacaaaaacatgagtgcccctctgtgtggcctctaaccctctgcacagcccttctgggtggtcctcaccaggtctctgagctgggtgggaggccatcctggcgaccactgcccattccattcacccctcactgtacctgccctagaacctgggcctaggccacaggggcagggagaagagaaggcattagtaagaaaaaaatagaaaaaaatatgaacagactcagctttgggacgtccaaccacaaaagaaattatatataaatatatataaatatatatctctaccatatgtgatggaaagactttttgttttcctttcccaaagaaataaaacggaaaaagcctcttgagtggta

SEQ ID NO: 148298 - DNA, 4073 bp, Homo sapiens
  Payload ID: 9362
  Gene Symbol: LZTFL1
  Gene Name: leucine zipper transcription factor-like 1
  Uniprot ID: Q9NQ48
  ENST ID: ENST00000296135
  CDS Start-End: 176-1075
gaaaatgcataattgcagtccacgtgcctcggtttccgttagcaaccagaggcttctaaacaacctaccctccttccccattttctgtggtccaactaccctcggcgatcccaggcttggcggggcaccgcctggcctctcccgttcctttaggctgccgccgctgcctgccgccatggcagagttgggcctaaatgagcaccatcaaaatgaagttattaattatatgcgttttgctcgttcaaagagaggcttgagactcaaaactgtagattcctgcttccaagacctcaaggagagcaggctggtggaggacaccttcaccatagatgaagtctctgaagtcctcaatggattacaagctgtggttcatagtgaggtggaatctgagctcatcaacactgcctataccaatgtgttacttctgcgacagctgtttgcacaagctgagaagtggtatcttaagctacagacagacatctctgaacttgaaaaccgagaattattagaacaagttgcagaatttgaaaaagcagagattacatcttcaaacaaaaagcccatcttagatgtcacaaagccaaaacttgctccacttaatgaaggtggaacagcagaactcctaaacaaggaaattttaagacttcaagaagagaatgagaaattgaagtcaaggttgaagaccattgaaatacaggctacaaatgcactggatgaaaagtcaaaactagaaaaagcactgcaagatttacagcttgatcaaggaaatcaaaaggattttataaaggcccaagacttaagtaacttagaaaacactgtcgctgccttaaagagtgagtttcagaagacacttaatgacaagacagaaaaccagaagtcactggaggagaatctggcgacagccaagcacgatctactcagggttcaggagcagctgcacatggctgaaaaggaattagaaaagaaatttcagcaaacagcagcttatcgaaacatgaaagagattcttaccaagaagaatgaccaaatcaaagatctgaggaaaagactggcacaatatgaacctgaagattaaaactgaagatttcctctggaagctaccacatgcaaacatacaagcagtctcacctcaggcatgtattttgaaaagcattttgtcatatcccctctccttatttttctaatatttagactttgaatatttagaactagagttcctattttcagctagttgaaaacagagaaaacctagtgattctgtctggtcatcccacacacctctctactgagtgctccagagtcttagctcacatgcactgagaattctttacagcaaagaagagatttttagagtgggaagaagaggcttatccttctgcattagtataaagagtctgtatttttaataaatgttaaataagctaacaatgtttgtacttatgcattccccatgggtaaaaataaataatagcattgttaaagatagttattaccaaaaaaagagagttattacaaataaatatgtctctttatttttaaaaatgaaatcttaattcatttactctatttgatgataaactataaattcattgaaaatgtgaattctattatgggtagcctttttaccaattataaggaaaatttacagcagtgaacatgaacattcacttagcttcctcagtctctccatcttaaagatcatttatcagaggaggttcagcattttttgcagcataacttttcatgagtctgtattactaatggataagtcaaatccatcctgcacttctacagtttagaaagtatctggactcagaataaatgtaatatttatacttgtttccagaatgttattttacattttatgttcaataagaacactttttaaaagacgtatattcaacataaaatcagctatcagacttcagattagactttatttatgtgggtctataataattgtattttcaagaggttttcactatatttgtattggcctggttttctcagacgattttggacaaatcattagaaactgggcatcatatccacagttatgtaaggcagtgatatactataaggataaacaaagtcaagtccataaagcaataatccctcagaaggaaagtccttacttttcacatattaatatttagtaatttttcctgcttctaaaagtgagagtatcacaccctaaatgaacactgtctactaagagacatcattccatttccacaaatgaagattttattccaagaaacgagtttactgattggagcatagggcttgttgttatttttattcaagcttttagtaatagccttgaatttattatttttcttataggctttttgttaaaatagtgaaggaacaaatgttaaagggtaagataatttccctgcaaaaggacacagaaggcagtcttaagaagatgaatggatgagagaagggagagaataaaatgcaataacgagccagcatttactatgtattttctcctcacctgtctctccatatttaggtcacttaccagtttctgtgcccttttggagcttttgttgagggcttcattctcaccctgtatttctttagccctaaattgacactctctccaaaaatccattccattgtctgtggaccaagatgttctatgtaattcagaagcagaactcttggctaaagggctagtgtggccttcagaaaccattcaattattttctccctacacctttgtcagtttgaaaccagtgaggaaaaaaggtatgttgataagaaacctatattgctaggtagaatttgtacttgttttcttggtagcagttttgaaatattctgtacagtacgttcctattgtttaataataaattcaaaaatatttctaaaaccttaaaaccaactatgccaagcattaagataaacaaatatgatgttctttgacgtaaatcaacgtgatgattctttcacatgtaaacacattttagtgtttctggtttgtcatttttgttgttgttgttgttgttgttatttactctataccctttagcaaaatacagttttaaatttttattgtttttagtagtttcccaactttaagacttatctaatttaactgagaaagaaagcctttttcatatatatatatattggatttctaaggatggtggtttgagccttgattagacttttgatgtgctaagccagacaggcagtctgtacattgatggccatcacaatgcagctttggtttaatttaattcaggcctgctgctgagttatgcacagactttttgttgaccaaaataaaatataaagggttttcttctgtttgacatttgtgttcattttttctctttatgtattacattttaacctatattaaataaatgtttaaatgataatttgcttatgtcttataaaactcagcataagaaaaatactgccctaccttgactgtgtaatcttatttgataaagcctttgctattcattatttccattctgattaactgaaagagatttatagagatgctcaaattttaagcccttggtgcttttagatatatattggttgcaaaagtttggcattaatgatttccctctgcttatgtgtaaatgcctatgttccaaagctttgccactagatattcaaatcataaattgtcatgtaagccagtcttccagaaagaaaagctatttcagcaaaatgatatttcacatttagacaaaacagtagtatttagacaataatattttgacaaaaccattttcaaaactgcttaggaaaaaggggaaatattatacttaaaggtaatgacctctgtcttgaatagaggtgagtgggttggtgacaactggtttggaggcttttgtgggggactgtggtgtcttttggattgtgtcatcagctccttcatcaagtaagcgtgtagctgttattgcctattgtaaaacatgaattgatgtgaacagtactcaatctcttacattatatgaagtataacttcctctcttttttgcctataatacatcctttaacttttacagattaaaaaaccactgttagacaaagcaaaa

SEQ ID NO: 148299 - DNA, 986 bp, Homo sapiens
  Payload ID: 9362
  Gene Symbol: LZTFL1
  Gene Name: leucine zipper transcription factor-like 1
  ENST ID: ENST00000411866
  CDS Start-End: 168-347
gttagcaaccagaggcttctaaacaacctaccctccttccccattttctgtggtccaactaccctcggcgatcccaggcttggcggggcaccgcctggcctctcccgttcctttaggctgccgccgctgcctgccgccatggctggtggaggacaccttcaccatagatgaagtctctgaagtcctcaatggattacaagctgtggttcatagtgaggtggaatctgagctcatcaacactgcctataccaatgtgttacttctgcgacagctgtttgcacaagctgagaagtggtatcttaagctacagacagacatctctgaacttgaaaaccgagaattattagaacaagttgcagaatttgaaaaagcagagattacatcttcaaacaaaaagcccatcttagatgtcacaaagccaaaacttgctccacttaatgaaggtggaacagcagaactcctaaacaaggaaattttaagacttcaagaagagaatgagaaattgaagtcaaggttgaagaccattgaaatacaggctacaaatgcactggatgaaaagtcaaaactagaaaaagcactgcaagatttacagcttgatcaaggaaatcaaaaggattttataaaggcccaagacttaagtaacttagaaaacactgtcgctgccttaaagagtgagtttcagaagacacttaatgacaagacagaaaaccagaagtcactggaggagaatctggcgacagccaagcacgatctactcagggttcaggagcagctgcacatggctgaaaaggaattagaaaagaaatttcagcaaacagcagcttatcgaaacatgaaagagattcttaccaagaagaatgaccaaatcaaagatctgaggaaaagactggcacaatatgaacctgaagattaaaactgaagatttcctctggaagctaccacatgcaaacatacaagcagtctcacctcaggcatgtattttgaaa

SEQ ID NO: 148300 - DNA, 1376 bp, Homo sapiens
  Payload ID: 9362
  Gene Symbol: LZTFL1
  Gene Name: leucine zipper transcription factor-like 1
  ENST ID: ENST00000448111
  CDS Start-End: 107-433
acacctcccaccatgctggcactgaggttatctaagagttgacagccccatctaaagccttgaatgaattaagtcttttttagctaaaaaatgaacaaaacctgagatgcatgagtgtccttaccaaaaggaagtccttgtttctaggacaggtctgtcttcgggcctgtgggtccatagaatcatcacagaaaaaatgatttcaggaggtctcccccgctttctgctcccaaggccgactctgactgagcctcggaggagagaaggaagccatttctgggaggccaaaacgtccgtcttccaggctcttgctgtaagtcagcccacttttacagatgaggaaccaagacccagggaagatgggaaggcagagaaaatccatcaagttgtaccctacccaccctttggtgacttttccaagaagctgggctaagttccaggagaaagctctgctggtggaggacaccttcaccatagatgaagtctctgaagtcctcaatggattacaagctgtggttcatagtgaggtggaatctgagctcatcaacactgcctataccaatgtgttacttctgcgacagctgtttgcacaagctgagaagtggtatcttaagctacagacagacatctctgaacttgaaaaccgagaattattagaacaagttgcagaatttgaaaaagcagagattacatcttcaaacaaaaagcccatcttagatgtcacaaagccaaaacttgctccacttaatgaaggtggaacagcagaactcctaaacaaggaaattttaagacttcaagaagagaatgagaaattgaagtcaaggttgaagaccattgaaatacaggctacaaatgcactggatgaaaagtcaaaactagaaaaagcactgcaagatttacagcttgatcaaggaaatcaaaaggattttataaaggcccaagacttaagtaacttagaaaacactgtcgctgccttaaagagtgagtttcagaagacacttaatgacaagacagaaaaccagaagtcactggaggagaatctggcgacagccaagcacgatctactcagggttcaggagcagctgcacatggctgaaaagatatgaacctgaagattaaaactgaagatttcctctggaagctaccacatgcaaacatacaagcagtctcacctcaggcatgtattttgaaaagcattttgtcatatcccctctccttatttttctaatatttagactttgaatatttagaactagagttcctattttcagctagttgaaaacagagaaaacctagtgattctgtctggtcatcccacacacctctctactgagtgctccagagtcttagctcacatgcactgagaattctttaca

SEQ ID NO: 148301 - DNA, 444 bp, Homo sapiens
  Payload ID: 9362
  Gene Symbol: LZTFL1
  Gene Name: leucine zipper transcription factor-like 1
  ENST ID: ENST00000445698
  CDS Start-End: 173-444
ggcttctaaacaacctaccctccttccccattttctgtggtccaactaccctcggcgatcccaggcttggcggggcaccgcctggcctctcccgttcctttaggctgccgccgctgcctgccgccatgagttgggcctaaatgagcaccatcaaaatgaagttattaattatatgcgttttgctcgttcaaagagaggcttgagactcaaaactgtagattcctgcttccaagacctcaaggagagcaggctggtggaggacaccttcaccatagatgaagtctctgaagtcctcaatggattacaagctgtggttcatagtgaggtggaatctgagctcatcaacactgcctataccaatgtgttacttctgcgacagctgtttgcacaagctgagaagtggtatcttaagctacagacagacatctctgaacttgaaaaccg

SEQ ID NO: 148302 - DNA, 718 bp, Homo sapiens
  Payload ID: 9362
  Gene Symbol: LZTFL1
  Gene Name: leucine zipper transcription factor-like 1
  ENST ID: ENST00000440576
  CDS Start-End: 1-706
gctggtggaggacaccttcaccatagatgaagtctctgaagtcctcaatggattacaagctgtggttcatagtgaggtggaatctgagctcatcaacactgcctataccaatgtgttacttctgcgacagctgtttgcacaagctgagaagtggtatcttaagctacagacagacatctctgaacttgaaaaccgagaattattagaacaagttgcagaatttgaaaaagcagagattacatcttcaaacaaaaagcccatcttagatgtcacaaagccaaaacttgctccacttaatgaaggtggaacagcagaactcctaaacaaggctacaaatgcactggatgaaaagtcaaaactagaaaaagcactgcaagatttacagcttgatcaaggaaatcaaaaggattttataaaggcccaagacttaagtaacttagaaaacactgtcgctgccttaaagagtgagtttcagaagacacttaatgacaagacagaaaaccagaagtcactggaggagaatctggcgacagccaagcacgatctactcagggttcaggagcagctgcacatggctgaaaaggaattagaaaagaaatttcagcaaacagcagcttatcgaaacatgaaagagattcttaccaagaagaatgaccaaatcaaagatctgaggaaaagactggcacaatatgaacctgaagattaaaactgaagattt

SEQ ID NO: 148303 - DNA, 2014 bp, Homo sapiens
  Payload ID: 9362
  Gene Symbol: LZTFL1
  Gene Name: leucine zipper transcription factor-like 1
  ENST ID: ENST00000418700
  CDS Start-End: 425-751
acacacatctgaagagcaaacagatggtgaaaccagtagcccaagatgagaaaacggactttttttgagacagcagttgaagctgaagcctcaaaagccgggcggggggaaagcatagcaattatgaaagacattcaaagtgggttaggggtgagggaaaggtcagccttttacttttcccacacccgctgttttctgaagaaggatggtaatgcgagcagaagggtgatggccaacctctgggctttgatgtgtgtcccctcctcccgcccccatcctgcaagctctggggaggtcggagactagtgtggtttcctcacacctcccaccatgctggcactgaggttatctaagagttgacagccccatctaaagccttgaatgaattaagtcttttttagctaaaaaatgaacaaaacctgagatgcatgagtgtccttaccaaaaggaagtccttgtttctaggacaggtctgtcttcgggcctgtgggtccatagaatcatcacagaaaaaatgatttcaggaggtctcccccgctttctgctcccaaggccgactctgactgagcctcggaggagagaaggaagccatttctgggaggccaaaacgtccgtcttccaggctcttgctgtaagtcagcccacttttacagatgaggaaccaagacccagggaagatgggaaggcagagaaaatccatcaagttgtaccctacccaccctttggtgacttttccaagaagctgggctaagttccaggagaaagctctgcagagttgggcctaaatgagcaccatcaaaatgaagttattaattatatgcgttttgctcgttcaaagagaggcttgagactcaaaactgtagattcctgcttccaagacctcaaggagagcaggctggtggaggacaccttcaccatagatgaagtctctgaagtcctcaatggattacaagctgtggttcatagtgaggtggaatctgagctcatcaacactgcctataccaatgtgttacttctgcgacagctgtttgcacaagctgagaagtggtatcttaagctacagacagacatctctgaacttgaaaaccgagaattattagaacaagttgcagaatttgaaaaagcagagattacatcttcaaacaaaaagcccatcttagatgtcacaaagccaaaacttgctccacttaatgaaggtggaacagcagaactcctaaacaaggaaattttaagacttcaagaagagaatgagaaattgaagtcaaggttgaagaccattgaaatacaggctacaaatgcactggatgaaaagtcaaaactagaaaaagcactgcaagatttacagcttgatcaaggaaatcaaaaggattttataaaggcccaagacttaagtaacttagaaaacactgtcgctgccttaaagagtgagtttcagaagacacttaatgacaagacagaaaaccagaagtcactggaggagaatctggcgacagccaagcacgatctactcagggttcaggagcagctgcacatggctgaaaaggaattagaaaagaaatttcagcaaacagcagcttatcgaaacatgaaagagattcttaccaagaagaatgaccaaatcaaagatctgaggaaaagactggcacaatatgaacctgaagattaaaactgaagatttcctctggaagctaccacatgcaaacatacaagcagtctcacctcaggcatgtattttgaaaagcattttgtcatatcccctctccttatttttctaatatttagactttgaatatttagaactagagttcctattttcagctagttgaaaacagagaaaacctagtgattctgtctggtcatcccacacacctctctactgagtgctccagagtcttagctcacatgcactgagaattctttacagcaaagaagagatttttagagtgggaagaagaggcttatccttctgcattagtataaagagtctgtatttttaataaatgttaaataagct

SEQ ID NO: 148304 - DNA, 4342 bp, Homo sapiens
  Payload ID: 9362
  Gene Symbol: LZTFL1
  Gene Name: leucine zipper transcription factor-like 1
  Uniprot ID: Q9NQ48
  ENST ID: ENST00000536047
  CDS Start-End: 500-1348
acacctcccaccatgctggcactgaggttatctaagagttgacagccccatctaaagccttgaatgaattaagtcttttttagctaaaaaatgaacaaaacctgagatgcatgagtgtccttaccaaaaggaagtccttgtttctaggacaggtctgtcttcgggcctgtgggtccatagaatcatcacagaaaaaatgatttcaggaggtctcccccgctttctgctcccaaggccgactctgactgagcctcggaggagagaaggaagccatttctgggaggccaaaacgtccgtcttccaggctcttgctgtaagtcagcccacttttacagatgaggaaccaagacccagggaagatgggaaggcagagaaaatccatcaagttgtaccctacccaccctttggtgacttttccaagaagctgggctaagttccaggagaaagctctgcagagttgggcctaaatgagcaccatcaaaatgaagttattaattatatgcgttttgctcgttcaaagagaggcttgagactcaaaactgtagattcctgcttccaagacctcaaggagagcaggctggtggaggacaccttcaccatagatgaagtctctgaagtcctcaatggattacaagctgtggttcatagtgaggtggaatctgagctcatcaacactgcctataccaatgtgttacttctgcgacagctgtttgcacaagctgagaagtggtatcttaagctacagacagacatctctgaacttgaaaaccgagaattattagaacaagttgcagaatttgaaaaagcagagattacatcttcaaacaaaaagcccatcttagatgtcacaaagccaaaacttgctccacttaatgaaggtggaacagcagaactcctaaacaaggaaattttaagacttcaagaagagaatgagaaattgaagtcaaggttgaagaccattgaaatacaggctacaaatgcactggatgaaaagtcaaaactagaaaaagcactgcaagatttacagcttgatcaaggaaatcaaaaggattttataaaggcccaagacttaagtaacttagaaaacactgtcgctgccttaaagagtgagtttcagaagacacttaatgacaagacagaaaaccagaagtcactggaggagaatctggcgacagccaagcacgatctactcagggttcaggagcagctgcacatggctgaaaaggaattagaaaagaaatttcagcaaacagcagcttatcgaaacatgaaagagattcttaccaagaagaatgaccaaatcaaagatctgaggaaaagactggcacaatatgaacctgaagattaaaactgaagatttcctctggaagctaccacatgcaaacatacaagcagtctcacctcaggcatgtattttgaaaagcattttgtcatatcccctctccttatttttctaatatttagactttgaatatttagaactagagttcctattttcagctagttgaaaacagagaaaacctagtgattctgtctggtcatcccacacacctctctactgagtgctccagagtcttagctcacatgcactgagaattctttacagcaaagaagagatttttagagtgggaagaagaggcttatccttctgcattagtataaagagtctgtatttttaataaatgttaaataagctaacaatgtttgtacttatgcattccccatgggtaaaaataaataatagcattgttaaagatagttattaccaaaaaaagagagttattacaaataaatatgtctctttatttttaaaaatgaaatcttaattcatttactctatttgatgataaactataaattcattgaaaatgtgaattctattatgggtagcctttttaccaattataaggaaaatttacagcagtgaacatgaacattcacttagcttcctcagtctctccatcttaaagatcatttatcagaggaggttcagcattttttgcagcataacttttcatgagtctgtattactaatggataagtcaaatccatcctgcacttctacagtttagaaagtatctggactcagaataaatgtaatatttatacttgtttccagaatgttattttacattttatgttcaataagaacactttttaaaagacgtatattcaacataaaatcagctatcagacttcagattagactttatttatgtgggtctataataattgtattttcaagaggttttcactatatttgtattggcctggttttctcagacgattttggacaaatcattagaaactgggcatcatatccacagttatgtaaggcagtgatatactataaggataaacaaagtcaagtccataaagcaataatccctcagaaggaaagtccttacttttcacatattaatatttagtaatttttcctgcttctaaaagtgagagtatcacaccctaaatgaacactgtctactaagagacatcattccatttccacaaatgaagattttattccaagaaacgagtttactgattggagcatagggcttgttgttatttttattcaagcttttagtaatagccttgaatttattatttttcttataggctttttgttaaaatagtgaaggaacaaatgttaaagggtaagataatttccctgcaaaaggacacagaaggcagtcttaagaagatgaatggatgagagaagggagagaataaaatgcaataacgagccagcatttactatgtattttctcctcacctgtctctccatatttaggtcacttaccagtttctgtgcccttttggagcttttgttgagggcttcattctcaccctgtatttctttagccctaaattgacactctctccaaaaatccattccattgtctgtggaccaagatgttctatgtaattcagaagcagaactcttggctaaagggctagtgtggccttcagaaaccattcaattattttctccctacacctttgtcagtttgaaaccagtgaggaaaaaaggtatgttgataagaaacctatattgctaggtagaatttgtacttgttttcttggtagcagttttgaaatattctgtacagtacgttcctattgtttaataataaattcaaaaatatttctaaaaccttaaaaccaactatgccaagcattaagataaacaaatatgatgttctttgacgtaaatcaacgtgatgattctttcacatgtaaacacattttagtgtttctggtttgtcatttttgttgttgttgttgttgttgttatttactctataccctttagcaaaatacagttttaaatttttattgtttttagtagtttcccaactttaagacttatctaatttaactgagaaagaaagcctttttcatatatatatatattggatttctaaggatggtggtttgagccttgattagacttttgatgtgctaagccagacaggcagtctgtacattgatggccatcacaatgcagctttggtttaatttaattcaggcctgctgctgagttatgcacagactttttgttgaccaaaataaaatataaagggttttcttctgtttgacatttgtgttcattttttctctttatgtattacattttaacctatattaaataaatgtttaaatgataatttgcttatgtcttataaaactcagcataagaaaaatactgccctaccttgactgtgtaatcttatttgataaagcctttgctattcattatttccattctgattaactgaaagagatttatagagatgctcaaattttaagcccttggtgcttttagatatatattggttgcaaaagtttggcattaatgatttccctctgcttatgtgtaaatgcctatgttccaaagctttgccactagatattcaaatcataaattgtcatgtaagccagtcttccagaaagaaaagctatttcagcaaaatgatatttcacatttagacaaaacagtagtatttagacaataatattttgacaaaaccattttcaaaactgcttaggaaaaaggggaaatattatacttaaaggtaatgacctctgtcttgaatagaggtgagtgggttggtgacaactggtttggaggcttttgtgggggactgtggtgtcttttggattgtgtcatcagctccttcatcaagtaagcgtgtagctgttattgcctattgtaaaacatgaattgatgtgaacagtactcaatctcttacattatatgaagtataacttcctctcttttttgcctataatacatcctttaacttttacagattaaaaaaccactgttagacaaagc

SEQ ID NO: 148305 - DNA, 4113 bp, Homo sapiens
  Payload ID: 9362
  Gene Symbol: LZTFL1
  Gene Name: leucine zipper transcription factor-like 1
  Uniprot ID: Q9NQ48
  ENST ID: ENST00000539217
  CDS Start-End: 336-1106
acacctcccaccatgctggcactgaggttatctaagagttgacagccccatctaaagccttgaatgaattaagtcttttttagctaaaaaatgaacaaaacctgagatgcatgagtgtccttaccaaaaggaagtccttgtttctaggacaggtctgtcttcgggcctgtgggtccatagaatcatcacagaaaaaatgatttcaggaggtctcccccgctttctgctcccaaggccgactctgactgagcctcggaggagagaaggaagccatttctgggaggccaaaacgtccgtcttccaggctcttgctgtaagtcagcccacttttacagatgaggaaccaagacccagggaagatgggaaggcagagaaaatccatcaagttgtaccctacccaccctttggtgacttttccaagaagctgggctaagttccaggagaaagctctgctggtggaggacaccttcaccatagatgaagtctctgaagtcctcaatggattacaagctgtggttcatagtgaggtggaatctgagctcatcaacactgcctataccaatgtgttacttctgcgacagctgtttgcacaagctgagaagtggtatcttaagctacagacagacatctctgaacttgaaaaccgagaattattagaacaagttgcagaatttgaaaaagcagagattacatcttcaaacaaaaagcccatcttagatgtcacaaagccaaaacttgctccacttaatgaaggtggaacagcagaactcctaaacaaggaaattttaagacttcaagaagagaatgagaaattgaagtcaaggttgaagaccattgaaatacaggctacaaatgcactggatgaaaagtcaaaactagaaaaagcactgcaagatttacagcttgatcaaggaaatcaaaaggattttataaaggcccaagacttaagtaacttagaaaacactgtcgctgccttaaagagtgagtttcagaagacacttaatgacaagacagaaaaccagaagtcactggaggagaatctggcgacagccaagcacgatctactcagggttcaggagcagctgcacatggctgaaaagatatgaacctgaagattaaaactgaagatttcctctggaagctaccacatgcaaacatacaagcagtctcacctcaggcatgtattttgaaaagcattttgtcatatcccctctccttatttttctaatatttagactttgaatatttagaactagagttcctattttcagctagttgaaaacagagaaaacctagtgattctgtctggtcatcccacacacctctctactgagtgctccagagtcttagctcacatgcactgagaattctttacagcaaagaagagatttttagagtgggaagaagaggcttatccttctgcattagtataaagagtctgtatttttaataaatgttaaataagctaacaatgtttgtacttatgcattccccatgggtaaaaataaataatagcattgttaaagatagttattaccaaaaaaagagagttattacaaataaatatgtctctttatttttaaaaatgaaatcttaattcatttactctatttgatgataaactataaattcattgaaaatgtgaattctattatgggtagcctttttaccaattataaggaaaatttacagcagtgaacatgaacattcacttagcttcctcagtctctccatcttaaagatcatttatcagaggaggttcagcattttttgcagcataacttttcatgagtctgtattactaatggataagtcaaatccatcctgcacttctacagtttagaaagtatctggactcagaataaatgtaatatttatacttgtttccagaatgttattttacattttatgttcaataagaacactttttaaaagacgtatattcaacataaaatcagctatcagacttcagattagactttatttatgtgggtctataataattgtattttcaagaggttttcactatatttgtattggcctggttttctcagacgattttggacaaatcattagaaactgggcatcatatccacagttatgtaaggcagtgatatactataaggataaacaaagtcaagtccataaagcaataatccctcagaaggaaagtccttacttttcacatattaatatttagtaatttttcctgcttctaaaagtgagagtatcacaccctaaatgaacactgtctactaagagacatcattccatttccacaaatgaagattttattccaagaaacgagtttactgattggagcatagggcttgttgttatttttattcaagcttttagtaatagccttgaatttattatttttcttataggctttttgttaaaatagtgaaggaacaaatgttaaagggtaagataatttccctgcaaaaggacacagaaggcagtcttaagaagatgaatggatgagagaagggagagaataaaatgcaataacgagccagcatttactatgtattttctcctcacctgtctctccatatttaggtcacttaccagtttctgtgcccttttggagcttttgttgagggcttcattctcaccctgtatttctttagccctaaattgacactctctccaaaaatccattccattgtctgtggaccaagatgttctatgtaattcagaagcagaactcttggctaaagggctagtgtggccttcagaaaccattcaattattttctccctacacctttgtcagtttgaaaccagtgaggaaaaaaggtatgttgataagaaacctatattgctaggtagaatttgtacttgttttcttggtagcagttttgaaatattctgtacagtacgttcctattgtttaataataaattcaaaaatatttctaaaaccttaaaaccaactatgccaagcattaagataaacaaatatgatgttctttgacgtaaatcaacgtgatgattctttcacatgtaaacacattttagtgtttctggtttgtcatttttgttgttgttgttgttgttgttatttactctataccctttagcaaaatacagttttaaatttttattgtttttagtagtttcccaactttaagacttatctaatttaactgagaaagaaagcctttttcatatatatatatattggatttctaaggatggtggtttgagccttgattagacttttgatgtgctaagccagacaggcagtctgtacattgatggccatcacaatgcagctttggtttaatttaattcaggcctgctgctgagttatgcacagactttttgttgaccaaaataaaatataaagggttttcttctgtttgacatttgtgttcattttttctctttatgtattacattttaacctatattaaataaatgtttaaatgataatttgcttatgtcttataaaactcagcataagaaaaatactgccctaccttgactgtgtaatcttatttgataaagcctttgctattcattatttccattctgattaactgaaagagatttatagagatgctcaaattttaagcccttggtgcttttagatatatattggttgcaaaagtttggcattaatgatttccctctgcttatgtgtaaatgcctatgttccaaagctttgccactagatattcaaatcataaattgtcatgtaagccagtcttccagaaagaaaagctatttcagcaaaatgatatttcacatttagacaaaacagtagtatttagacaataatattttgacaaaaccattttcaaaactgcttaggaaaaaggggaaatattatacttaaaggtaatgacctctgtcttgaatagaggtgagtgggttggtgacaactggtttggaggcttttgtgggggactgtggtgtcttttggattgtgtcatcagctccttcatcaagtaagcgtgtagctgttattgcctattgtaaaacatgaattgatgtgaacagtactcaatctcttacattatatgaagtataacttcctctcttttttgcctataatacatcctttaacttttacagattaaaaaaccactgttagacaaagc

SEQ ID NO: 148306 - DNA, 1381 bp, Homo sapiens
  Payload ID: 9363
  Gene Symbol: LDOC1
  Gene Name: leucine zipper, down-regulated in cancer 1
  Uniprot ID: O95751
  ENST ID: ENST00000370526
  CDS Start-End: 105-545
ctggccaccaagcgcctccgtggacacgcacttcctgcgagggctccgtgcgcaccttggccgagccgaaccgagccgagtcctgtccttccaggccgttcgcaatggtggatgagttggtgctgctgctgcacgcgctcctgatgcggcaccgcgccctgagcatcgagaacagccagctcatggaacagctgcggctgctggtgtgcgagagggccagcctgctgcgccaggtacgtccgccgagctgcccggtgcccttccccgaaacgtttaatggcgagagctcccggctccccgagtttatcgtgcagacggcgtcttacatgctcgtgaacgagaaccgattctgcaacgacgccatgaaggtggcattcctaatcagcctcctcaccggggaagccgaggagtgggtggtgccctacatcgagatggatagccccatcctaggtgattaccgggccttcctcgatgagatgaaacagtgctttggctgggatgacgacgaagacgacgacgacgaagaagaggaggatgattattaggccctcgaccctcgggcctcgggggggagggccctgcacgccgccaccccctccccgcagccctcaccccgccaggagccactgctctcccccttgccctccggtccccttacctacccgcgcccgtctgctctctctcttcatttctccgtagtgcttgtctttgttccaggaatagcgctccagttacctgctgctggggtcggggctggagcctcactcactcggaagtgcttggaagtgtcatctaccctggccatccccgggatccctcccctgctaatctgaactgtgtcctgaaccccagctattggccaggcccctgttacaaactgcgcagaccacccgtagccctgctgctgccacctgccctgctgccaggcttacatcttcccagagaactatgctgccacttcacatccactcaccacatcccacctacagactaccacctttcgagatcaggaccaacctggaaaatgccagagttggctatgccttttcagacattgatttggacagctcaccaacccctgaaggggccgttcagcctggttagttttctacctactccgagtgtcctcccctgccccaccagattgctgcaggggcgcggtgtgcctggcagccaaattgttgacacttcttttttcctatgcactggttttacacagctgtcatttttctttcaaaattgcagcagtcccacagatgtgtgcatttggacaaatagtacttaaaaacaaaacaaacaagcactcagcccagctcctcaatactacctggaaaaagcattggcattattttcaataaatatcaagcactaaaaaaagaaa

SEQ ID NO: 148307 - DNA, 5495 bp, Homo sapiens
  Payload ID: 9364
  Gene Symbol: LDOC1L
  Gene Name: leucine zipper, down-regulated in cancer 1-like
  Uniprot ID: Q6ICC9
  ENST ID: ENST00000341255
  CDS Start-End: 511-1230
acaaaggccgcgcggtgacccgccctctgccgcgaccccggccccgcccctgccccggccccggcctggcccggtccctgcacctgccggaggccgcccgccgccatcgccagcgccgtcgcttggctgcgctgaccgggaagcagttctcggcggtccgcgcggtgattcatcggcctggccgcgtcccccgcgcgggccatcttggtcacggccggcggcggacagagccgcggaggaaccgcgagaccccagggcccagagcaggtccagccacccgtctggctccgtagtccgcgaagtctgcagtaaaggagccgcgtgggaccggggccgaagtccctagggcctggcaccgcgtgcccctctctcgggccctcggcttgggggtctcgcagcgccctgccgtcgtgcaccccacactgcccccatttctacaggggcccacctggtcaccacaccctcttggtccacccgcggatctcagcgtgtggctgacctctggccagcatggtgcagccgcagacgtccaaagctgaaagcccagccttggcagcgtctccgaatgcccagatggatgacgttattgacaccctgacctccctgcgcctcaccaactcggcgctgaggcgggaggcttccaccctgcgggcggagaaggccaatctcaccaacatgctggagagcgtgatggcagagctgaccttgttacgcaccagggcgcggatcccgggggctctgcagatcaccccgcccatctcctcaattacttcaaacgggactcgacccatgaccacacctccaacctctctgcccgagcccttttccggggacccaggccggttggcggggttcctgatgcagatggacagattcatgatcttccaggcctcccgcttcccgggtgaggccgagcgtgtggccttccttgtgtctcgactgactggggaggcggagaagtgggctatcccccacatgcaacctgacagccccttgcgcaacaactatcaggggttcctggcagagttgcggagaacctacaagtctccgctccggcatgcgcggcgcgcccaaatcaggaagacttctgcctctaatagggctgtgcgagagaggcagatgctctgccgccagctggcctctgcgggcacggggccttgcccagtgcatccagcttccaacgggactagtccagcgccagccctgcctgcccgagcacggaatctttaagaatccgccagcacttggtagcgtctgcagccacccaggtagcatacgctctttgctgtgtagaagaaatgcccatacgacagctttgcccctgtttgaagacctcccttcttgcctctccagacgtgttccccgaggagatcttccttccgtccttcctggcgccctggttgcccaccttgccgtgcttcctcttacgtgctagctttgtacctatcgctcactgcatgctcgcctccctcttgctggcatcccggcctgtttcaatgactaccgctctgctacttaggcacagggactccgccgcacgctgacggaccacgagggctgaccccttccagcctgacttggttcatggaggctcctactctgccctctccaagctcccctggcggctccccacctggttgcccagttcctattgatgagctctggacagaaagatgcccgtttggccaggctggtggcttgatgggtgtacctggagagggggtctggcttcctgcccaagatgcctcccagccctgccagggcccggtgcagcgggcagggcctcatctgtgctgtagtggtcgagtggttgctgcaaggagcgtagttctgccatgtctgggggccaggttccactctgcacatgaatatgcagtctgggaggccccactgctctcactgggaaggaccaatgttgcacctctgttaatgcctgacttcagctgctggtgttctgatggagccagaggcttggggaatctggaacttgcctgctaaataaggtcgtggtggactctcagccattgggcaggtctatcaggctgcaggttcctacacacccacgcctgagggtcatagcaggctaagggtggataccagcgactccctttgctgcccaggatctccatgggcagtgccacagcggctgatgctcagtcactcctgcttctaccccctgtcactgatggcgagccttgcccagcttgagacctgttcccatctctattcaggtgccatgtggccttcactgcagccctgcagccacccacgcaccatctgtgggtctccaaaggcaccttgtagcatgtactccccgtgcctgggcaatcagatgggctgcctttgtccaagggaaaacagactcccttcgggaaacatccttaagcacttaaggccggggggggtgtctgcctctggcaacccagccagggtcttggtggcatttgtaaaagcaaagagctgtggactgccgtggtcctagtgtggtgacaatgcagcactggcatgcatgtcctccttctgaaggacctcatccttcctcacagggggatgaccaagaaatcattttgtggctgagtttggccacgccctttggactgtgctgttccgccatatttcaatgccaaatgaaccacattgacatgacctggaccatagggcttcctatcctgggctcagctgcccctgtctgaagggtcttggcttgattgcagaaggacaacctccgcacccacctaaagacatgtatatgtcttgggatcccagagattgggtccttgggcctggcttcttaagagttttgatgatgctgggaaaagtgactgcgattctgaagaaccgctgccttgcaaggtcaaggacattcagtggttgctggggtccgcagactactgccacccactcaccatcaactctgttagcccaattgccctgctgaacaactgcctgaatacaggctttaggttcccctggactccagccaaggctgttcaggtgggaccatggtgctctttaagcgtgatcggagggaagacacacagcagggccaccattccatgaatgggaggtgtacagatcactttctctttgtgctcagttctgttctgtctccagcagctatattggtaagactagtacctgccagggagaggtgcccccaagtgaaggggtacagtggcacctgggaaaaggcacctggaaggtttccatgtggcccagcccagcatggaagcagggtgggaactctgctgtgtcgccagcgctcactctactcgagtggctttttgaaagccctaccatgtctgtgtcaggcctgtgctgcttcacatcctacagctgcctaggaaaggccggccacgctccctgtccacacactccctgtccacacactccctgtccacacactccctgtccacaactgcagccgggccctctgcctatgggcacccaatccaagcagctgctccacctttgtttggcatggtgatttgtgttttttctcttggtgcttatgtgtgtgggcttgggacgagtgctggtatgcacttaggaccttcttgatagctccctgcactttggaacacggagcagatgagagagggtcggggcttgccctccaccttggacttggaagaagcccacattggagaggtgaggaccccatggtggctctagtggaagatacgttagtctccagctaaggaggatgaggcgcagccccagagggagacctcagtgataggggatcaggctaagaaagtgggggaagggagatgctttgtacatattttggggttataatttctctaaattttaggagaacgggtattgattgataaaagggacaggcagtagtgttcaacagtgcatgtgaaggaaagttctgttttccatggttttgacattctttggactgtattgtgactgctgtctggtccacatggtacccctttggtaagtaggcttcagtgcataccagggtatcactggagatgggagttagtgaaggggtgactccctggcctagtatagtgtgaccctgggactaacttaatgtcctaaagcattttggtgacttctagggaatagcaaagacctatttcattgtccccaggtaagtatgtgatgagcaatgaggaggagtggaaaacaaaacccagaaagtgcggcaggaccagcctgacgcacacgctcctgttgtcatggcagacagccgccttgggtgggcaccaccctggcagttccagcctgtaggggagtgaagggacatggctgagctgggcatgtgctgaggttgacttagggaacaagccctgggattggacaaaagggcccatgctgcagccactgactgggggcagagctctgggtggaagagggaagagatcctaatggaggcgcctccatctgcaaccacagttgtaaggctcatggcacctctgcttggaaagcactggtttagggacttagagaggtaggcacaaggtgggtctcctgggtaagggaagcaagagcagactgttgggccaacaggagaagctccccagagtaggggagaaggttggggtgtagggccttccacgtggaacagacagcccctgtgtctctgtctcttggggacctgagtttgggtggggtggcagttggcacagcgcagatgcggtagagatgggaggaaacccagctcctcacttccgtgtgcctcatgcctttgcatacacaagcaccaaacctactaggtcttctcattacccatgtaaaccacatgttagataaatttttgcaagtagaggaaagaaggaaataaaacatcacattttggtgtctctcaggctttcccccccaactatggtttctttgctttttgttttaacatagttttgttgctgtcttctgtaatgatacagttttgtgcagctgttttcacttagcatatcgtgggcatctccccttatgattactaaatattttattttggagtggctgtgtactctcccattgactagatggaccattgtgccagttgccaatcactaatgctgttactaacttttcagttataaattgatgaatatctttgtgcacaggctgtttcccaatgtcaagttattagggtagactccaggaggtgggattcttcaactaaagaatatgaaaacctttgaggcttttactacatattgacaaaatggtttccggaaatatttgtatccccttacactgccaccagcaaggataaacatgtccatcttgcccgtattgggaattatcatctggctaaatatttgctaatttgataatgaaaaaatagcatcgtgtttcagttggcatttcactgacttctagcacggttgaacatctttcatgtggagcgattgtatttcctcctttgtggattgtcagtgtcctttgctctatcttctggggtcagataaatttgtatgagctcggtatatattaaagatattaacctggtgtgtgtcatatttgctaca

SEQ ID NO: 148308 - DNA, 5459 bp, Homo sapiens
  Payload ID: 9365
  Gene Symbol: LZTS1
  Gene Name: leucine zipper, putative tumor suppressor 1
  Uniprot ID: Q9Y250
  ENST ID: ENST00000265801
  CDS Start-End: 112-1902
tgagggctttgctatgacctcagtcccctcacggagccacgactgccccttgctgccacagcctttccaagaccctgcccggccctgccccatcctcagccccgagtcaccatgggcagcgtcagtagcctcatctccggccacagcttccacagcaagcactgccgggcttcgcagtacaagctgcgcaagtcctcccacctcaagaagctcaaccggtattccgacgggctgctgaggtttggcttctcccaggactccggtcacggcaagtccagctccaaaatgggcaagagcgaagacttcttctacatcaaggtcagccagaaagcccggggctcccatcacccagattacacggcactgtccagcggggatttagggggccaggctggggtggactttgacccgtccacaccccccaagctcatgcccttctccaatcagctagaaatgggctccgagaagggtgcagtgaggcccacagccttcaagcctgtgctgccacggtcaggagccatcctgcactcctccccggagagtgccagccaccagctgcaccccgcccctccagacaagcccaaggagcaggagctgaagcctggcctgtgctctggggcgctgtcagactccggccggaactccatgtccagcctgcccacacacagcaccagcagcagctaccagctggacccgctggtcacacccgtgggacccacaagccgttttgggggctccgcccacaacatcacccagggcatcgtcctccaggacagcaacatgatgagcctgaaggctctgtccttctccgacggaggtagcaagctgggccactcgaacaaggcagacaagggcccctcgtgtgtccgctcccccatctccacggacgagtgcagcatccaggagctggagcagaagctgttggagagggagggcgccctccagaagctgcagcgcagctttgaggagaaggagcttgcctccagcctggcctacgaggagcggccgcggcgctgcagggacgagctggagggcccggagcccaaaggcggcaacaagctcaagcaggcctcgcagaagagccagcgcgcgcagcaggtcctgcacctgcaggtactgcagcttcagcaggagaagcggcagctccggcaggagctcgagagcctcatgaaggagcaggacctgctggagaccaagctcaggtcctacgagagggagaagaccagcttcggccccgcgctggaggagacccagtgggaggtgtgccagaagtcaggcgagatctccctcctgaagcagcagctgaaggagtcccagacggaggtgaacgccaaggctagcgagatcctgggtctcaaggcacagctgaaggacacgcggggcaagctggagggcctggagctgaggacccaggacctggagggcgccctgcgcaccaagggcctggagctggaggtctgtgagaatgagctgcagcgcaagaagaacgaggcggagctgctgcgggagaaggtgaacctgctggagcaggagctgcaggagctgcgggcccaggccgccctggcccgcgacatggggccgcccaccttccccgaggacgtccctgccctgcagcgggagctggagcggctgcgggccgagctgcgggaggagcggcaaggccatgaccagatgtcctcgggcttccagcatgagcggctcgtgtggaaggaggagaaggagaaggtgattcagtaccagaaacagctgcagcagagctacgtggccatgtaccagcggaaccagcgcctggagaaggccctgcagcagctggcacgtggggacagcgccggggagcccttggaggttgacctggaaggggctgacatcccctacgaggacatcatagccactgagatctgaggggctgcctgggaaggcgagtctggggacctggcactgggaggcagggctctcccgtgcatcccccctgctcagcaattcagacccctctgagagacgccactccctgggacacagacccaggacccccgaggggagggcaggatggcctttccttccctctctgatgtcccagtgctcaccagccctgcagcccaccagacgtcaggccctgactcctctggctttcccaggagatgggtccaggggtctgtctgctttggttaagggctccctaaactttggcctttgttcgaaatagatatcctctccccctcctccagggaaggtggccacagcaagtacagcggctcccctctgcttctcatcccaacctctttttcctcctggacacattggaatgccttggaaatagaaagaagccatatatgaccagaagccttggaaccagccccatcagaacctgagctattttcctctggccgcagaggtgtaggggtggaatgagccgcggggaagctggctttgaaacctcagggctgtcccagccccggcaagccacaggaaggaggggagagacaggcagcccagcagtgtggagaccctgccacagccagaggagggcagagggagaatccaagggttgagagccagtggcgggtgatggccagcccctggggcccagcccctgtttactggttcttgcaaatgggagctgagcagcctctggacagccagtgacctttgacctcggtgaccactcttctttaagccatagaccctgaggccctgggctgggtgctgggaagggagggttgaaaccaccgtgaaccagagggtgtggctttccaggcaccctcagggagcctccccatctgtccagctggggccagaggctgggagtccctacctgcttcacgttggccggcggctactctggaatgtttttccctccccagaatcaagcttttgcttgatccagaagagcccatatcactaagatggcatatatgtgatctgggcattttcctcctctgcctacagccaggtttagcggcaaacctttcccccttagcaccttcagggctgagttctgggtttctagaggtcaggacggctcctcagagcgccaggaagccagagccccaagcaggacgaaaaagaggcatacacacagcagtgtgaatagcctggccaccagccatcctccctccacctcaagacccccatttgtcccagactaaaggatccagagagcagctccctttctcaggagcttgggcagtgccccagggagtccagggtttctctgcagatgtgcggagcgggaggcggtggtagagagagataaaaggtggagtttctctgttgtttggttcagggattttatttttaattttatgagacagggtcttgctctgtcccccaggctggagtgcagtggcatgatcatagctcactgcagcctcatactcctgggctcaagcaatcctcctgcctcagccttccaactagctgggactacaggtgcgcgccaccgtgcctggctaacttttcattttttttgtagggacggggtctcgttttgttgccaaagctggtctcaaacttgtggcctcaagcaatccacctgccttggcctcccaaagtgctgagattgcagatgtgagccaccgtgcctggccagatttttcttttattcttctttctttttcttttttgctttcttgtcttttcagaagcaagccagacctagcaggctgttccatgttctatttttgactgtagccacagctgctgttctcaggacagcatcccttcccacatgcctgcgcctgctgcctgctgagatgaggaggggagcgtctgggaacttgcgagtccaaggccagtccccatttctgcctcgctcaccgctggcccttagagaccccgaggtaggggtggggagatgcttctctccttgccccccgccctcatgggtcctagcccttccctgagtgcgggctgaggccagagtcaccttttctgtggctggctctaccttcctgtccctgaggttaaacggtgcccatcctgccatcctcaaacgacagaggagcttttctggaatttcaaaccattgctcttagtcccaagctaggcttaaacctggaatctacaagccaaaagtccctccctgcctgagggcagtaccctccattgggcacagtccagacccaagtcaaagatgccccattccttgcgcctcagccctcagttccttcatttccaccaggccgtgccttgtttgagtttttcctcccagtgagactgccccacggagacagaggaaagggctggctccccctccccaggctggagacccccccccaactccaggaaagagcagtcagagtccagtgctctgcctcagacgttgcctgagaagaagtggctgccacacccaggggaaggccctgaggcggaggctgtgctccgccatggtgtcccggtaccttccatacacagaggagtgcagccttctccatatctccatggccctgtcccaggccggcccagatgtgtcccccccaggccttgtcctacgtccaaggtggcagatgtcttccctgggctgccaccagcccccgccccagagtggcccaccgtggcactagaatgcaagtatcctgcgaccttgcaacctcaccttcctgtgggtgttctttcctgccctgtccaaaagcgccctcactattcttggaccatgccagattctgcctctctggaaagaggctctggacagcagaagcctccaagcacagagcctggccccaggccccagacagggtgggcttcctgcccttccctctgggcacgcctgctggccgacccactgacccactcggatggaccaacctgctctgtccccaaaggacgcctgcaggagagagcagcactccgcatcacctcaccaaggatcggactctgcccctggacctgggaacgactggactgtcacggggttccctcctagctctcccagtgaactcctgccaggcacacacagcccctatagcactgagctcacatgggactgggatatgggggcatctcttccccagagaggcactcagtgagcctcctgtgcctggccccagcctgggccatctcttaggtgagacagttgcccgaaactaagccaggcctggctggaggagcagcagcttggggagagggatttccctgcagacctcaagccatcatgcggtgggtgctgccatgacagaggctgcacccctgggccagcggggctgctcacccacctcttgtgcaaggtggcctttgtgctgcgcctgcaggcagagctggagcccccagcagaggcaggctgggacggaccagcatctggaagatgtacatagttatttttctctttgtggtttcttgtttggtttggtttgcttttgacagcttcattttatttttgacgtcactttttggccatgtaaactatttgtggcaattttatgtttttatttatgaataaagaatgccatttctcacgccctcta

SEQ ID NO: 148309 - DNA, 5706 bp, Homo sapiens
  Payload ID: 9365
  Gene Symbol: LZTS1
  Gene Name: leucine zipper, putative tumor suppressor 1
  Uniprot ID: Q9Y250
  ENST ID: ENST00000381569
  CDS Start-End: 359-2149
gcagaggccggcgcgcctggagctggcgggttggcagcggccgggcggggaggccgaaagtttctctgcccgcctcggccagtgagtgggagccgggagctgcatcccgcgcagtgggaccggcccggcccgctcagcagctctggaaaaagagagacgggaacacaccgggaaacactgggaaaaaaaaaaagtctcaagtgcgcccgaggcgcagggggcaggtctacggctctcgcaggctctgtgagggctttgctatgacctcagtcccctcacggagccacgactgccccttgctgccacagcctttccaagaccctgcccggccctgccccatcctcagccccgagtcaccatgggcagcgtcagtagcctcatctccggccacagcttccacagcaagcactgccgggcttcgcagtacaagctgcgcaagtcctcccacctcaagaagctcaaccggtattccgacgggctgctgaggtttggcttctcccaggactccggtcacggcaagtccagctccaaaatgggcaagagcgaagacttcttctacatcaaggtcagccagaaagcccggggctcccatcacccagattacacggcactgtccagcggggatttagggggccaggctggggtggactttgacccgtccacaccccccaagctcatgcccttctccaatcagctagaaatgggctccgagaagggtgcagtgaggcccacagccttcaagcctgtgctgccacggtcaggagccatcctgcactcctccccggagagtgccagccaccagctgcaccccgcccctccagacaagcccaaggagcaggagctgaagcctggcctgtgctctggggcgctgtcagactccggccggaactccatgtccagcctgcccacacacagcaccagcagcagctaccagctggacccgctggtcacacccgtgggacccacaagccgttttgggggctccgcccacaacatcacccagggcatcgtcctccaggacagcaacatgatgagcctgaaggctctgtccttctccgacggaggtagcaagctgggccactcgaacaaggcagacaagggcccctcgtgtgtccgctcccccatctccacggacgagtgcagcatccaggagctggagcagaagctgttggagagggagggcgccctccagaagctgcagcgcagctttgaggagaaggagcttgcctccagcctggcctacgaggagcggccgcggcgctgcagggacgagctggagggcccggagcccaaaggcggcaacaagctcaagcaggcctcgcagaagagccagcgcgcgcagcaggtcctgcacctgcaggtactgcagcttcagcaggagaagcggcagctccggcaggagctcgagagcctcatgaaggagcaggacctgctggagaccaagctcaggtcctacgagagggagaagaccagcttcggccccgcgctggaggagacccagtgggaggtgtgccagaagtcaggcgagatctccctcctgaagcagcagctgaaggagtcccagacggaggtgaacgccaaggctagcgagatcctgggtctcaaggcacagctgaaggacacgcggggcaagctggagggcctggagctgaggacccaggacctggagggcgccctgcgcaccaagggcctggagctggaggtctgtgagaatgagctgcagcgcaagaagaacgaggcggagctgctgcgggagaaggtgaacctgctggagcaggagctgcaggagctgcgggcccaggccgccctggcccgcgacatggggccgcccaccttccccgaggacgtccctgccctgcagcgggagctggagcggctgcgggccgagctgcgggaggagcggcaaggccatgaccagatgtcctcgggcttccagcatgagcggctcgtgtggaaggaggagaaggagaaggtgattcagtaccagaaacagctgcagcagagctacgtggccatgtaccagcggaaccagcgcctggagaaggccctgcagcagctggcacgtggggacagcgccggggagcccttggaggttgacctggaaggggctgacatcccctacgaggacatcatagccactgagatctgaggggctgcctgggaaggcgagtctggggacctggcactgggaggcagggctctcccgtgcatcccccctgctcagcaattcagacccctctgagagacgccactccctgggacacagacccaggacccccgaggggagggcaggatggcctttccttccctctctgatgtcccagtgctcaccagccctgcagcccaccagacgtcaggccctgactcctctggctttcccaggagatgggtccaggggtctgtctgctttggttaagggctccctaaactttggcctttgttcgaaatagatatcctctccccctcctccagggaaggtggccacagcaagtacagcggctcccctctgcttctcatcccaacctctttttcctcctggacacattggaatgccttggaaatagaaagaagccatatatgaccagaagccttggaaccagccccatcagaacctgagctattttcctctggccgcagaggtgtaggggtggaatgagccgcggggaagctggctttgaaacctcagggctgtcccagccccggcaagccacaggaaggaggggagagacaggcagcccagcagtgtggagaccctgccacagccagaggagggcagagggagaatccaagggttgagagccagtggcgggtgatggccagcccctggggcccagcccctgtttactggttcttgcaaatgggagctgagcagcctctggacagccagtgacctttgacctcggtgaccactcttctttaagccatagaccctgaggccctgggctgggtgctgggaagggagggttgaaaccaccgtgaaccagagggtgtggctttccaggcaccctcagggagcctccccatctgtccagctggggccagaggctgggagtccctacctgcttcacgttggccggcggctactctggaatgtttttccctccccagaatcaagcttttgcttgatccagaagagcccatatcactaagatggcatatatgtgatctgggcattttcctcctctgcctacagccaggtttagcggcaaacctttcccccttagcaccttcagggctgagttctgggtttctagaggtcaggacggctcctcagagcgccaggaagccagagccccaagcaggacgaaaaagaggcatacacacagcagtgtgaatagcctggccaccagccatcctccctccacctcaagacccccatttgtcccagactaaaggatccagagagcagctccctttctcaggagcttgggcagtgccccagggagtccagggtttctctgcagatgtgcggagcgggaggcggtggtagagagagataaaaggtggagtttctctgttgtttggttcagggattttatttttaattttatgagacagggtcttgctctgtcccccaggctggagtgcagtggcatgatcatagctcactgcagcctcatactcctgggctcaagcaatcctcctgcctcagccttccaactagctgggactacaggtgcgcgccaccgtgcctggctaacttttcattttttttgtagggacggggtctcgttttgttgccaaagctggtctcaaacttgtggcctcaagcaatccacctgccttggcctcccaaagtgctgagattgcagatgtgagccaccgtgcctggccagatttttcttttattcttctttctttttcttttttgctttcttgtcttttcagaagcaagccagacctagcaggctgttccatgttctatttttgactgtagccacagctgctgttctcaggacagcatcccttcccacatgcctgcgcctgctgcctgctgagatgaggaggggagcgtctgggaacttgcgagtccaaggccagtccccatttctgcctcgctcaccgctggcccttagagaccccgaggtaggggtggggagatgcttctctccttgccccccgccctcatgggtcctagcccttccctgagtgcgggctgaggccagagtcaccttttctgtggctggctctaccttcctgtccctgaggttaaacggtgcccatcctgccatcctcaaacgacagaggagcttttctggaatttcaaaccattgctcttagtcccaagctaggcttaaacctggaatctacaagccaaaagtccctccctgcctgagggcagtaccctccattgggcacagtccagacccaagtcaaagatgccccattccttgcgcctcagccctcagttccttcatttccaccaggccgtgccttgtttgagtttttcctcccagtgagactgccccacggagacagaggaaagggctggctccccctccccaggctggagacccccccccaactccaggaaagagcagtcagagtccagtgctctgcctcagacgttgcctgagaagaagtggctgccacacccaggggaaggccctgaggcggaggctgtgctccgccatggtgtcccggtaccttccatacacagaggagtgcagccttctccatatctccatggccctgtcccaggccggcccagatgtgtcccccccaggccttgtcctacgtccaaggtggcagatgtcttccctgggctgccaccagcccccgccccagagtggcccaccgtggcactagaatgcaagtatcctgcgaccttgcaacctcaccttcctgtgggtgttctttcctgccctgtccaaaagcgccctcactattcttggaccatgccagattctgcctctctggaaagaggctctggacagcagaagcctccaagcacagagcctggccccaggccccagacagggtgggcttcctgcccttccctctgggcacgcctgctggccgacccactgacccactcggatggaccaacctgctctgtccccaaaggacgcctgcaggagagagcagcactccgcatcacctcaccaaggatcggactctgcccctggacctgggaacgactggactgtcacggggttccctcctagctctcccagtgaactcctgccaggcacacacagcccctatagcactgagctcacatgggactgggatatgggggcatctcttccccagagaggcactcagtgagcctcctgtgcctggccccagcctgggccatctcttaggtgagacagttgcccgaaactaagccaggcctggctggaggagcagcagcttggggagagggatttccctgcagacctcaagccatcatgcggtgggtgctgccatgacagaggctgcacccctgggccagcggggctgctcacccacctcttgtgcaaggtggcctttgtgctgcgcctgcaggcagagctggagcccccagcagaggcaggctgggacggaccagcatctggaagatgtacatagttatttttctctttgtggtttcttgtttggtttggtttgcttttgacagcttcattttatttttgacgtcactttttggccatgtaaactatttgtggcaattttatgtttttatttatgaataaagaatgccatttctcacgccctcta

SEQ ID NO: 148310 - DNA, 1614 bp, Homo sapiens
  Payload ID: 9365
  Gene Symbol: LZTS1
  Gene Name: leucine zipper, putative tumor suppressor 1
  Uniprot ID: Q9Y250
  ENST ID: ENST00000522290
  CDS Start-End: 1-1614
atgggcagcgtcagtagcctcatctccggccacagcttccacagcaagcactgccgggcttcgcagtacaagctgcgcaagtcctcccacctcaagaagctcaaccggtattccgacgggctgctgaggtttggcttctcccaggactccggtcacggcaagtccagctccaaaatgggcaagagcgaagacttcttctacatcaaggtcagccagaaagcccggggctcccatcacccagattacacggcactgtccagcggggatttagggggccaggctggggtggactttgacccgtccacaccccccaagctcatgcccttctccaatcagctagaaatgggctccgagaagggtgcagtgaggcccacagccttcaagcctgtgctgccacggtcaggagccatcctgcactcctccccggagagtgccagccaccagctgcaccccgcccctccagacaagcccaaggagcaggagctgaagcctggcctgtgctctggggcgctgtcagactccggccggaactccatgtccagcctgcccacacacagcaccagcagcagctaccagctggacccgctggtcacacccgtgggacccacaagccgttttgggggctccgcccacaacatcacccagggcatcgtcctccaggacagcaacatgatgagcctgaaggctctgtccttctccgacggaggtagcaagctgggccactcgaacaaggcagacaagggcccctcgtgtgtccgctcccccatctccacggacgagtgcagcatccaggagctggagcagaagctgttggagagggagggcgccctccagaagctgcagcgcagctttgaggagaaggagcttgcctccagcctggcctacgaggagcggccgcggcgctgcagggacgagctggagggcccggagcccaaaggcggcaacaagctcaagcaggcctcgcagaagagccagcgcgcgcagcaggtcctgcacctgcaggtactgcagcttcagcaggagaagcggcagctccggcaggagctcgagagcctcatgaaggagcaggacctgctggagaccaagctcaggtcctacgagagggagaagaccagcttcggccccgcgctggaggagacccagtgggaggtgtgccagaagtcaggcgagatctccctcctgaagcagcagctgaaggagtcccagacggaggtgaacgccaaggctagcgagatcctgggtctcaaggcacagctgaaggacacgcggggcaagctggagggcctggagctgaggacccaggacctggagggcgccctgcgcaccaagggcctggagctggaggtctgtgagaatgagctgcagcgcaagaagaacgaggcggagctgctgcgggagaagcatgagcggctcgtgtggaaggaggagaaggagaaggtgattcagtaccagaaacagctgcagcagagctacgtggccatgtaccagcggaaccagcgcctggagaaggccctgcagcagctggcacgtggggacagcgccggggagcccttggaggttgacctggaaggggctgacatcccctacgaggacatcatagccactgagatctga

SEQ ID NO: 148311 - DNA, 231 bp, Homo sapiens
  Payload ID: 9365
  Gene Symbol: LZTS1
  Gene Name: leucine zipper, putative tumor suppressor 1
  Uniprot ID: Q9Y250
  ENST ID: ENST00000616228
  CDS Start-End: 1-231
atgggcagcgtcagtagcctcatctccggccacagcttccacagcaagcactgccgggcttcgcagtacaagctgcgcaagtcctcccacctcaagaagctcaaccggtattccgacgggctgctgaggtttggcttctcccaggactccggtcacggcaaggccatgaccagatgtcctcgggcttccagcatgagcggctcgtgtggaaggaggagaaggagaaggtga

SEQ ID NO: 148312 - DNA, 5741 bp, Homo sapiens
  Payload ID: 9366
  Gene Symbol: LZTS2
  Gene Name: leucine zipper, putative tumor suppressor 2
  Uniprot ID: Q9BRK4
  ENST ID: ENST00000370220
  CDS Start-End: 3064-5073
gcggccgccgccgcgccgtggccctttgtgctggaacaatgaccagctgccgctggccccggggccccggctggggttgagggtgaccaccgccgccgccgcgtcgagccgaaccgagcccccagacacgcagtcacagggcgtcggagggagggctcccgactgccgccgagcagcccctacgtgcgccccggcggattcgcgtgacgcgggtgcttgcgcgtgtccgcgccccggggcggagacgcccctcggaccctcccctgcgcggtgccgcccactcgcaccgggcgggggctggccagggccgggggcgccgcggaggcggaggcggggctgggccgggcagctccgagtggcggcgcgcgggccagggccggggccggggccggggccggagccggagccggggccgggcggcgcgcctgtggagcgctgggggcggcctggggctgagcatggagcagcgcggcggaggtgaggggggccgggtctgggaggcggcctggggagcccccaacttatgcgcggtggaatccagccggggggacggcgttccccagtcgcccccactttctggaaggggggctggactctggagaatgggtcaggggctcctggcttcccgccgcagaatgggaactcgtgatcgcagacttgaccccgcttgactggtccttggagtttgggtgggagggagactttccccaactcttcagatccgtctccggccctgaaccagctccagccctctgctctcctcagcccactaaaaggggggtgctcctgggccagagtgattgctcagggagtgctggggagaatgaggggttcccatctcccacagccacaaacgcatttctcaaaatggagcctccacttgcccctccttctctttcgggctccaagagcgggagccggcctggctgggcctggctttccagactcctggctctggctccctggatgtgtggctctcagggcccggctctgtggcactttggacttatgggccctcggctccgtggggttggggggccctggctcactgggtcccgctggctgtccccttgtcggcctgaccctcgggcctctccgagtctttgtctcttttgggtccctgtctttctctgagcctgtctccttccttcaattttcactttctccgtgctcgctgaagtggggaaatgcaacagaggtgccagcccccttggccccctaagaagtcccttccccactgttcactccacaccctggagtgggcccagagaggggaggggagggggttctctatctgctctgctgggggctggggtgtgtggggtggtctgagccccagccctacagaggggcctgtggtcactccctgctcctggcctacccctcccccagctccccgcagctcctgccccagcgtggacacctcttcctggttcgcagtgtcttttgacttgggtgggaaggagggcggtggatttaatggagggcatgcgagaaagaaggggaacagatcaggcaaaggagttagataatgtcccacctctccccacacgccgaagagagaaggaaacaggctccccccaccaatgggccctcaagccacccaggctcccaccactctcatacctgcgtgcccacgttcacaggctccactgcaccactcaccttcctagtcacacacaaacacaggagctcacacataaactcatgaacttactgacaagtctgtccaggcaccgtctctcccacacaccacaaattcacttgttagatccacatttataactttcacaggctttctaatgacccctgatccacatactcttctaagatatacacatgtgaattcacacatgaactcatatgtatgtgaatgaactgatatatcaaacatgcatagactcacatgatgttttcacacacattttcatacacacgtgttcattttcatgctcctgtgcatgtagtcacacaacaaataactaaatgcacacactcctactcccagtgcaattctctgtccacttcttggccccgctctgcatgatgacttcagcagatgcctaagtcctggtcatcagcggcctcgggactgggactagggagggggttccgggtggaggcttgcagctgcttccaggaaggagcagagcctggggaggtggagccctcttgcctgggctctgtggaagtgaggttttggagcagcctccagaggtgaaggcagggcatctaccttcctcccctcagggttagtttggggaccttctgaagctgtagggtttcagagaggttggcagtggggcagagcctgtggaggctccttcaggccttcaggcctcaccgattgggtgtgcagaggctaggagttgtcatggaaactggtatgagcctgcatccacctctgggaggcaggagaccccaaaggacacctgtggactccctaagagccgcgggtttcttatttagccagatcgacagagaggcagtttagccgcctttctgtctgagagaaactgaggcccagcagagggaggcagggcactgcctggccttggctctttgttccctaattaccatctgaggtgctgattgcacccctgaggtacctctgcccaaactgccctgtaatgaggccacctggctgagaggaccagggacctgtgcttcaagctggtagagaaggcccctccctcacctgagtcctggcctctgtggaggatgcaggattgggcttgggcctgggtctttgctgccaggtggccctgcggtaatcatccaggcctcccatgcctctcagcatctctgctgagtgaattcactcctcagccctgttcagaccagcattgggcagtgtggtttggggcccagggggaattgagattcattccagcacttgaagggggagtcttggtggggatcagggcttgttactgatgtcaaggaggtgtttggtcaggatcagtgggtcaggaggggtctcaaggtggagggactctgacaccactgccctgcttacaggtcgcctgcgaggccgctggccaggcctgagcctctgccaccatggccattgtgcagactctgccagtgccactggagcctgctcctgaagctgccactgccccacaagctccagtcatgggtagtgtgagcagccttatctcaggccggccctgtcccggggggccagctcctccccgccaccacggccctcctgggcccaccttcttccgccagcaggatggcctgctacggggtggctatgaggcacaggagccgctgtgcccagctgtgccccctaggaaggctgtccctgtcaccagcttcacctacatcaatgaggacttccggacagagtcaccccccagcccaagcagtgatgttgaggatgcccgagagcagcgggcacacaatgcccacctccgcggcccaccaccaaagctcatccctgtctctggaaagctggagaagaacatggagaagatcctgatccgcccaacagccttcaagccagtgctgcccaaacctcgaggggctccgtccctgcctagcttcatgggtcctcgggccaccgggctgtctgggagccagggcagcctgacgcagctgtttgggggccctgcctcctcctcctcctcttcctcctcctcttcagctgctgacaaacccctggcatttagtggctgggccagtggctgcccatcagggacgctatccgactctggccgaaactcactgtccagcctgcccacctacagcaccggaggtgccgagccaaccaccagctccccaggcgggcacctgccttcccatggctctgggcgaggggcactgcctgggccagcccgaggggtccctactgggccctcccactcagacagtggccggtcctcctccagcaagagcacaggctccctagggggccgtgtggctggggggcttttgggcagtggtactcgggcctcccctgacagcagctcctgtggggagcgctcaccaccacccccgcctccacctccttcggatgaggccctgctgcactgtgtcctggaaggaaagctccgagaccgggaggcagagcttcagcagctgcgggacagtctggacgagaatgaggctaccatgtgccaggcatacgaggagcggcagcggcactggcagcgagagcgtgaggccctgcgagaggactgtgcggcccaggcacagcgggcacagcgggcccaacagctgctgcagctgcaggtgttccagctgcagcaggagaagcggcaattgcaggacgacttcgcacagctgctgcaggagcgcgaacagctggagcggcgctgcgccaccttggagcgggagcagcgggagctcgggccgaggcttgaggagaccaagtgggaggtgtgccagaaatcaggcgagatctccctgctgaagcagcagctgaaagagtctcaggcagagctggtgcagaagggcagcgagctggtggctctgcgggtggcgctgcgggaggcccgtgctacgctgcgggtcagtgagggccgtgcgcggggtctacaggaggccgcccgagctcgggagctggagctggaagcctgttcccaggagctgcagcgacaccgccaggaagctgagcagctgcgggagaaagctgggcagttggatgctgaggcggccggactccgggagccccctgtgccacctgccaccgctgacccattcctcctggcagagagtgatgaggccaaagtgcagcgggcagcagccggggttgggggcagcttgcgggcccaggtggagcgattgcgggtggagctgcagcgggagcggcggcggggtgaggagcagcgggacagctttgagggggagcggctggcctggcaggcagagaaggagcaggtgatccgctaccagaagcagctgcagcacaactacatccagatgtaccggcgcaaccggcagctagagcaggagctgcagcagctcagcctggagctggaggcccgggagctcgctgacctgggcctggccgagcaggccccctgcatctgcctggaggagatcactgctactgagatctagggccctcagcaaccagctctgtagggagctctgccagaggggcagcagctgcagatccacttaggccccagggtccacggatggccccaaaggctgagggccccaaagccacttgtctcctaggatccaggcctctgggcttctgccaagaactcagggtggccctatgacttggaggagcaagatcagaccgctcaaaggtccccgtgttcactgttacccagaggctcttgttactacccacttcattccccaccgctgccagtgccactgccaaccctgttcacaggcgcttccagcccactccagccaggggagcagggaagaagaaggggctccctcctcttcacattccccccgaccccaaagccagagaaagccagatggcaccagctgctccggatgtgcctgcccacattgggggacagggccgggcctgggctcggttcccaggtttgagctctgcagcctctctcctggagtgagggggctgaagtcagaccaaaggaagaactcagaaatgtcttgtttatttgtgtttgtgaccaagcagcctctcccttcacccaggtttatggcctcgttttcacttgtatatttttcacactgtaaatttcttgtacaaacccaaagaaaaaattaaaaaaaatttttttgtttaaaaataa

SEQ ID NO: 148313 - DNA, 2883 bp, Homo sapiens
  Payload ID: 9366
  Gene Symbol: LZTS2
  Gene Name: leucine zipper, putative tumor suppressor 2
  Uniprot ID: Q9BRK4
  ENST ID: ENST00000370223
  CDS Start-End: 206-2215
ccaggtcgggccaggcgggcgccgggagctgggagccgggagcccagagttcggaacctagagttcggagccggctagggagccggcgttgtcgcggcgaggaggtgggcgcgctggagcaggagcggggccggaactggagccgaggcgcaggtggcgctgggtcgcctgcgaggccgctggccaggcctgagcctctgccaccatggccattgtgcagactctgccagtgccactggagcctgctcctgaagctgccactgccccacaagctccagtcatgggtagtgtgagcagccttatctcaggccggccctgtcccggggggccagctcctccccgccaccacggccctcctgggcccaccttcttccgccagcaggatggcctgctacggggtggctatgaggcacaggagccgctgtgcccagctgtgccccctaggaaggctgtccctgtcaccagcttcacctacatcaatgaggacttccggacagagtcaccccccagcccaagcagtgatgttgaggatgcccgagagcagcgggcacacaatgcccacctccgcggcccaccaccaaagctcatccctgtctctggaaagctggagaagaacatggagaagatcctgatccgcccaacagccttcaagccagtgctgcccaaacctcgaggggctccgtccctgcctagcttcatgggtcctcgggccaccgggctgtctgggagccagggcagcctgacgcagctgtttgggggccctgcctcctcctcctcctcttcctcctcctcttcagctgctgacaaacccctggcatttagtggctgggccagtggctgcccatcagggacgctatccgactctggccgaaactcactgtccagcctgcccacctacagcaccggaggtgccgagccaaccaccagctccccaggcgggcacctgccttcccatggctctgggcgaggggcactgcctgggccagcccgaggggtccctactgggccctcccactcagacagtggccggtcctcctccagcaagagcacaggctccctagggggccgtgtggctggggggcttttgggcagtggtactcgggcctcccctgacagcagctcctgtggggagcgctcaccaccacccccgcctccacctccttcggatgaggccctgctgcactgtgtcctggaaggaaagctccgagaccgggaggcagagcttcagcagctgcgggacagtctggacgagaatgaggctaccatgtgccaggcatacgaggagcggcagcggcactggcagcgagagcgtgaggccctgcgagaggactgtgcggcccaggcacagcgggcacagcgggcccaacagctgctgcagctgcaggtgttccagctgcagcaggagaagcggcaattgcaggacgacttcgcacagctgctgcaggagcgcgaacagctggagcggcgctgcgccaccttggagcgggagcagcgggagctcgggccgaggcttgaggagaccaagtgggaggtgtgccagaaatcaggcgagatctccctgctgaagcagcagctgaaagagtctcaggcagagctggtgcagaagggcagcgagctggtggctctgcgggtggcgctgcgggaggcccgtgctacgctgcgggtcagtgagggccgtgcgcggggtctacaggaggccgcccgagctcgggagctggagctggaagcctgttcccaggagctgcagcgacaccgccaggaagctgagcagctgcgggagaaagctgggcagttggatgctgaggcggccggactccgggagccccctgtgccacctgccaccgctgacccattcctcctggcagagagtgatgaggccaaagtgcagcgggcagcagccggggttgggggcagcttgcgggcccaggtggagcgattgcgggtggagctgcagcgggagcggcggcggggtgaggagcagcgggacagctttgagggggagcggctggcctggcaggcagagaaggagcaggtgatccgctaccagaagcagctgcagcacaactacatccagatgtaccggcgcaaccggcagctagagcaggagctgcagcagctcagcctggagctggaggcccgggagctcgctgacctgggcctggccgagcaggccccctgcatctgcctggaggagatcactgctactgagatctagggccctcagcaaccagctctgtagggagctctgccagaggggcagcagctgcagatccacttaggccccagggtccacggatggccccaaaggctgagggccccaaagccacttgtctcctaggatccaggcctctgggcttctgccaagaactcagggtggccctatgacttggaggagcaagatcagaccgctcaaaggtccccgtgttcactgttacccagaggctcttgttactacccacttcattccccaccgctgccagtgccactgccaaccctgttcacaggcgcttccagcccactccagccaggggagcagggaagaagaaggggctccctcctcttcacattccccccgaccccaaagccagagaaagccagatggcaccagctgctccggatgtgcctgcccacattgggggacagggccgggcctgggctcggttcccaggtttgagctctgcagcctctctcctggagtgagggggctgaagtcagaccaaaggaagaactcagaaatgtcttgtttatttgtgtttgtgaccaagcagcctctcccttcacccaggtttatggcctcgttttcacttgtatatttttcacactgtaaatttcttgtacaaacccaaagaaaaaattaaaaaaaatttttttgtttaaaaataa

SEQ ID NO: 148314 - DNA, 701 bp, Homo sapiens
  Payload ID: 9366
  Gene Symbol: LZTS2
  Gene Name: leucine zipper, putative tumor suppressor 2
  ENST ID: ENST00000429732
  CDS Start-End: 106-701
cagaggagggggctctgctggggagaggggctcagtctgttcttgtgaggctgagggtctggggtcgcctgcgaggccgctggccaggcctgagcctctgccaccatggccattgtgcagactctgccagtgccactggagcctgctcctgaagctgccactgccccacaagctccagtcatgggtagtgtgagcagccttatctcaggccggccctgtcccggggggccagctcctccccgccaccacggccctcctgggcccaccttcttccgccagcaggatggcctgctacggggtggctatgaggcacaggagccgctgtgcccagctgtgccccctaggaaggctgtccctgtcaccagcttcacctacatcaatgaggacttccggacagagtcaccccccagcccaagcagtgatgttgaggatgcccgagagcagcgggcacacaatgcccacctccgcggcccaccaccaaagctcatccctgtctctggaaagctggagaagaacatggagaagatcctgatccgcccaacagccttcaagccagtgctgcccaaacctcgaggggctccgtccctgcctagcttcatgggtcctcgggccaccgggctgtctgggagccagggcagcctgacgcagctgtttgggggccctgcctcctcctcctcctcttcctcctcctcttcagctgc

SEQ ID NO: 148315 - DNA, 816 bp, Homo sapiens
  Payload ID: 9366
  Gene Symbol: LZTS2
  Gene Name: leucine zipper, putative tumor suppressor 2
  ENST ID: ENST00000426584
  CDS Start-End: 97-816
acctactctagggagggggctgtgctggttctgcctgggcagccccacgctgaggtcgcctgcgaggccgctggccaggcctgagcctctgccaccatggccattgtgcagactctgccagtgccactggagcctgctcctgaagctgccactgccccacaagctccagtcatgggtagtgtgagcagccttatctcaggccggccctgtcccggggggccagctcctccccgccaccacggccctcctgggcccaccttcttccgccagcaggatggcctgctacggggtggctatgaggcacaggagccgctgtgcccagctgtgccccctaggaaggctgtccctgtcaccagcttcacctacatcaatgaggacttccggacagagtcaccccccagcccaagcagtgatgttgaggatgcccgagagcagcgggcacacaatgcccacctccgcggcccaccaccaaagctcatccctgtctctggaaagctggagaagaacatggagaagatcctgatccgcccaacagccttcaagccagtgctgcccaaacctcgaggggctccgtccctgcctagcttcatgggtcctcgggccaccgggctgtctgggagccagggcagcctgacgcagctgtttgggggccctgcctcctcctcctcctcttcctcctcctcttcagctgctgacaaacccctggcatttagtggctgggccagtggctgcccatcagggacgctatccgactctggccgaaactcactgtccagcctgcccacctacagcaccggaggtgccgagccaaccacc

SEQ ID NO: 148316 - DNA, 804 bp, Homo sapiens
  Payload ID: 9366
  Gene Symbol: LZTS2
  Gene Name: leucine zipper, putative tumor suppressor 2
  ENST ID: ENST00000454422
  CDS Start-End: 143-804
cggggccggggccggggccggagccggagccggggccgggcggcgcgcctgtggagcgctgggggcggcctggggctgagcatggagcagcgcggcggaggtcgcctgcgaggccgctggccaggcctgagcctctgccaccatggccattgtgcagactctgccagtgccactggagcctgctcctgaagctgccactgccccacaagctccagtcatgggtagtgtgagcagccttatctcaggccggccctgtcccggggggccagctcctccccgccaccacggccctcctgggcccaccttcttccgccagcaggatggcctgctacggggtggctatgaggcacaggagccgctgtgcccagctgtgccccctaggaaggctgtccctgtcaccagcttcacctacatcaatgaggacttccggacagagtcaccccccagcccaagcagtgatgttgaggatgcccgagagcagcgggcacacaatgcccacctccgcggcccaccaccaaagctcatccctgtctctggaaagctggagaagaacatggagaagatcctgatccgcccaacagccttcaagccagtgctgcccaaacctcgaggggctccgtccctgcctagcttcatgggtcctcgggccaccgggctgtctgggagccagggcagcctgacgcagctgtttgggggccctgcctcctcctcctcctcttcctcctcctcttcagctgctgacaaacccctggcatttagtggctgggccagtggctgcccatcagggacgctatccgactctgg

SEQ ID NO: 148317 - DNA, 745 bp, Homo sapiens
  Payload ID: 9366
  Gene Symbol: LZTS2
  Gene Name: leucine zipper, putative tumor suppressor 2
  ENST ID: ENST00000481129
  CDS Start-End: 338-745
tatttgtgaagcacggcgtgtaagaagttgtctgtgtgagtgactgtgaatagaggctgtcaatgcgtgaaagatggttaggagactaagtgcacttgagactgtgactgggtgcgaaggactgcggattgttgtggaagcctgtgcccaacaggcctgtgacaccgtgtctgtgtgtgaggtggactggaagattatggaaagaaggaacgcggacccacgtgacggctgagactgcggctgcatgtgggaaaggtcttgtgggtgttagggagactgtattgtgtgcgagaaggtcgcctgcgaggccgctggccaggcctgagcctctgccaccatggccattgtgcagactctgccagtgccactggagcctgctcctgaagctgccactgccccacaagctccagtcatgggtagtgtgagcagccttatctcaggccggccctgtcccggggggccagctcctccccgccaccacggccctcctgggcccaccttcttccgccagcaggatggcctgctacggggtggctatgaggcacaggagccgctgtgcccagctgtgccccctaggaaggctgtccctgtcaccagcttcacctacatcaatgaggacttccggacagagtcaccccccagcccaagcagtgatgttgaggatgcccgagagcagcgggcacacaatgcccacctccgcggcccaccaccaaagctcatccctgtctctggaaagctggagaag

SEQ ID NO: 148318 - DNA, 5462 bp, Homo sapiens
  Payload ID: 9367
  Gene Symbol: LETM1
  Gene Name: leucine zipper-EF-hand containing transmembrane protein 1
  Uniprot ID: O95202
  ENST ID: ENST00000302787
  CDS Start-End: 298-2517
gaaccggtagtccgcggtggcgcggtccgcccctcacctggccagcggcgggcgctgaggggcccaatgggagccgcggcctggccgccccgccccgcgcctccggacgtctgtgccgggacaaggccgccgctggtgccgggtccttgaggagagcgcctcccgtccgaggccagccgcctctgtcagccgtccgcgcgggccgggtctgaagcgccgccgggacggcgaagagccgcggccgccgcggagaaggaggcagcgcaggaggccggagcggccgccgcgcccgagcacatggcgtccatcttactgaggagctgccgcggccgggcgcccgcccgcctcccgccgccgcctcggtacaccgtcccgcggggtagtccaggggatcctgctcatctcagctgtgccagcaccctggggttgaggaactgcctgaatgttccatttggctgctgcactcccatccaccctgtgtacacatcctccagaggcgatcacctcggctgttgggctctgaggcccgagtgccttcgcatagtgtcgagagcgccatggacctctacctctgtgggttttgtggctgtgggacctcagtgccttcctgtgcgtggctggcactcttcgcgccctgttcgcgatgactcggtagtagagaagtccctcaagtccttgaaggacaagaacaagaagctggaggaaggcggcccggtgtacagcccccccgcagaggtggtggtgaagaagtccctggggcagcgggtgctggacgagctgaagcactactaccatggcttccgcctgctatggatcgacaccaagatcgcggcacgcatgctctggcgcatcctcaacggccacagcctgacccgccgggagcgcaggcagtttctccggatctgcgctgacctcttccgcctggtgccgttccttgtgttcgtggtggtgccgttcatggagtttctgctgcctgttgctgtgaagctcttccccaacatgttgccatccacatttgagactcagtcactcaaggaggagaggctgaagaaggagcttcgggtcaagctggagctggccaagttcctccaggacaccatcgaggagatggccttgaagaacaaggcagccaagggcagcgccaccaaagacttctctgtgtttttccagaagatccgggaaacaggggagaggcccagcaatgaggaaatcatgcgtttttccaaattatttgaggatgagctgaccctggacaacctgacacggccgcagctggtggccctgtgcaagctgctggagctacagtccatcggcaccaacaacttcctgcgcttccagcttaccatgcggctgcgctccataaaggcagacgacaagctgattgctgaggaaggggtggacagcctgaatgtcaaggagctgcaggcagcgtgtcgggcacgaggcatgcgggccctgggcgtcacggaagaccgcctgaggggtcagctgaagcagtggctggacctgcacctgcatcaggagatccccacatcgctgctcatcctgtcccgggccatgtacctcccggacaccctctctccagccgaccagctcaagtccacactgcagaccctcccagagattgtggcaaaggaagcacaggtgaaagtggccgaggtggagggcgagcaggtggacaacaaggccaagctggaggccacgctgcaggaggaggcggccatccagcaggagcaccgtgagaaggagctgcagaagcgctcggaggtggcgaaggattttgagcccgaacgtgtggtagctgctccccaaaggccggggaccgagccacagccagaaatgcctgacacagtcctgcagtcagagaccttgaaggacactgccccggtgctggagggcttgaaggaggaagagatcacgaaggaggaaatcgacatcctcagcgatgcctgctctaagctgcaggagcagaagaagtcactcaccaaggagaaggaggagctggagctgctgaaggaggatgtgcaggactacagcgaggacttgcaggagatcaagaaggaactttcaaagactggtgaagaaaagtacgtggaagaatctaaagccagcaagagattgacaaaaagggtgcagcaaatgatcgggcagatcgatggcttgatctcgcagctggagatggaccagcaggctggcaagctggccccggccaacggcatgcccacgggggagaacgtcatcagtgtcgctgagctcatcaacgccatgaagcaagtcaagcacattcccgaaagcaagctcaccagcctggccgcagcactggatgaaaacaaggatggcaaggtcaacatcgacgacctcgtcaaggtgattgagctggtggacaaagaagatgttcacatctccaccagccaggtggctgagattgtagcaacactggaaaaagaggagaaggtggaggagaaggagaaggccaaagagaaggcagagaaggaggtcgcagaggtgaagagctagaaccactggcctgggcacctgtcctcctgctgtgccgtcaccctggcaagggccgtgagggcgattgctttgtggtgattctcagtggctcatctaatattttggctggaataaatcagagacttccataatcaagtaaattttaattttcatcattccacggagattcagtctgtctggaatcccggaacccctccacagaatcgtgtctggatccacactgtggtgtggctgccacggcctcctggctccagaggcagctgggctgggccaaggcaggaaggcgcccccatgtgtgtggcctcagtctcagcatctgactgtgctgccctgtccccagggaagagaatgaggaccacgtggactccgcccacacagagctggctgctgtgcccaccctcaggggcgtcaggagacacagcctggcctcctcagggctgaagatgcctccattcgcctgtggaccttgatttctagatttcagtgtcaatagacctgtcttcctgcacactttcagttggatgtgggtcattgtggagacagaggtgtctgccatctctgtggcctctggagagtgacgtctccctgctgggagtgctggttctcacgtgcggtttcccttgtgtatcggagctctttctcggctttctatttcccccagttctttaagcagtcaattggcacagagtttcccacgggggctgcagtggattcactgtgtcagggatgagcctggcttgggggttggtggggctctgaagcgcatttggggttctttgtagcttctaatgtgaggtttgagtccagtgcgcccacagcagcatgcccttctcaccccttgcagtgttgcaggctcaggcccctgggctccttcagcaagcaggctagtcaatgaggcatgaggatccggcacagggcatcccctggggcttcaagggcaatacccccgtgcttagggtttgccctgtgccctctgggtggggtggcctccccgcactcggcagcatggccaggctggccagggcgtgggcaggtggtgtcctgtggcacctccatcctcctgcccagccggctgtgtcacactcatctttttaaggtcaggttggttcctggcaaaaatgtacctccaggggcctccaagcataggatttggaagacaggaacggcacaggcgtccaggaaagcagctgcactcagacaatgccttctccattacttgaagcttctttctgttcagccattaaagaaacttgacaaaataggaacaggagatatttctcaattgtaaacctttgtgcagggacagttggcttccagaggctttcagctttcagttatttgagaagtttgttttagatccttaactaatatttatgaattctctcaccctgtgtaagtagcctggtgttcgtttgtccaagtgtacttacccttgagaacaagtcttgcagttgccaggtgtgtgcagacgcctctcctgtgagcggcatcgcgggcccagtcagctgccccggctctcatcctcgtcctcactgccttggctgagcactgttgacgtgaacagccactgcaacaggcagcccatcccactgtcccctctgccctggactccgcatggcctccaaaagccagcttgccctccgggtgctgcaggggctttgcaggtggggaaggctctggtgggtgcctttggtggcttccgtgacatcagccgtgctctgatgcaggcttgctccctcgtcattctccctcgtcattctccctcatcgttctgtgtgcatttttctctatgtcctgacctttcttcttgcacctaaaagtggtgtctgggtgcaaatgtaagcagtggtggatccagaaatatgagctttgtgtaataagcttcttaaaacagtcctttcttacacctgcccagggccagaccctcggtcttggcctttttcaggagctaggatatctgcgcctggtgaaaatgaaacgaattcctgatttaggaattcagtgtttcctcctcactccagctaagcactcacttttttttttttttttttttttttttgatacagagtctcgctctgtcacccaggctggagtgcagtggtgcgatctcggctcactgcaagctccacctcccgggttcaagcgattcttctgcctcagcctcctgagtaattgggattacaggcatgcgccaccatgcccagctaatttttttttttttttttgagacagagtcttgctctgtctcccaggctggagtgcaatggcgtgatctcggctcactgccagctccgcttcctgggttcacgccattctcctgcctcagcctcccgagtagccaggactacaagcacccgccaccacacctggctaatttttttgtatttttattagagacagtgttttaccgtgttagccaggatggtctcgatctcctgacttcgtgatctactcacctcggcctcccaaagtgctgggattacgggcaagtttttattagagatggggtttcatcatgttggtcaggctggtcttcaactcctgacctcaggtgatccacccgcctcagcctcccaaagtgctgggattacaggcatgagccaccgcgcccggcctgaactctcagttctaacgcagggattcaggaattgggctttcagactccttctgcagtgtcacagtccagactttttttaaatgaaggacaccccgcagtggctcacagtgggtcccagggctagcaggagcgtgctggggagccggctctgtctttgttcgcagtgggtcccggtgctggcaggagtgtgctggtgagccggctctgtctttgtaaatccttcaggggtcctacggctgactccaccggacagcccgtcctgggccgtgttaagcaccttttgtagaaatcgtatttttattaaaacatcaaatctgtgttcctgtaa

SEQ ID NO: 148319 - DNA, 1693 bp, Homo sapiens
  Payload ID: 9368
  Gene Symbol: LETM2
  Gene Name: leucine zipper-EF-hand containing transmembrane protein 2
  Uniprot ID: Q2VYF4
  ENST ID: ENST00000297720
  CDS Start-End: 233-1423
agagtgacgtcaggggcgaggaaagaggcggaaccgtagagacttggcttcgggcccttctagcttgggggtcccgggaaggagctgggaggacctaggcggccgttccgcggagcccggccgaggaggtccctatgttaactacttgagacaaaaataaatatggccttctacagttataattcagttctggctattgctcgaacaagattcccatttaaataagacatgtatgaagaactatgagagcaagaagtactcggatcctagtcagccaggcaatacagtacttcacccaggaactagactaatacaaaagctacacacatccacttgctggctgcaagaagttcctggcaaacctcagctggagcaagccacaaaacatccacaggtgacaagccctcaggccacaaaagaaactggcatggagattaaagaaggcaaacaatcttatagacaaaaaatcatggatgaactaaaatattattacaatggattctacttactttggattgacgccaaagttgctgccagaatggtttggaggctgttgcatggacaggtcctgaccagacgagagagacgaagggaagaaaaacagaaaaagaaaatggctgtaaagttggaactagcaaaatttcttcaagaaaccatgacagaaatggcaaggaggaacagagccaagatgggcgatgcctctacacagctctcatcctacgtgaagcaggtccagacaggccacaagcccagcacaaaggagatagttcgcttctccaaactatttgaggaccagctggccctggaacacttagatcgccctcagctggttgccctttgcaaactgctggaattgcagacatttggaaccaacaacctgctccgctttcagctcctgatgaaactgaagtctataaaagcagatgatgaaataattgccaaggaaggggtgacagcattgagtgtatcagaactacaggctgcctgtagggcccgagggatgagatcactgggtctcacggaggaacaactgcgacaacagctcacggagtggcaggacctccacctgaaggagaacgtccctccttcccttttgctcctgtcccgcaccttctacctgatagatgtgaagcccaagccgattgagataccactcagtggggaggctccaaagactgatattcttgtggaattacctactttcactgaatctaaagagaacatggtggatcttgcacctcaactgaagggaactaaggatgaagactttatacagccgccaccagttacatcatcacccataacaccatcaacacctatttcattacctaaaggacccatcacttcttctgaagaacctacactccaggccaaatcacaaatgacggcccagaacagcaaggctagttcaaaaggagcataaaggactacttgaggatggagctcactctcttcagcttccggccctcaacagtggcatctgtaaaggacctcccagataagactgtctggcttcagagagcggatcagctgtttagcccgtggggcagtcctttgaggcctggtaaccattccaggtgatgtgggtagtgagaccaagttcagaccacttagaaaaatataattgcaaagtcccatttcctctgtaccattgtcaccccactcaactttgtataaagcccaccccccatca

SEQ ID NO: 148320 - DNA, 1873 bp, Homo sapiens
  Payload ID: 9368
  Gene Symbol: LETM2
  Gene Name: leucine zipper-EF-hand containing transmembrane protein 2
  Uniprot ID: Q2VYF4
  ENST ID: ENST00000379957
  CDS Start-End: 128-1603
gtagagacttggcttcgggcccttctagcttgggggtcccgggaaggagctgggaggacctaggcggccgttccgcggagcccggccgaggaggtccctatgttaactacttgagacaaaaataaatatggccttctacagttataattcagttctggctattgctcgaacaagattccctagccattttgtccatcctacctgctcttcttattccccatcatgtgcatttcttcacttgccagattcccatttaaataagacatgtatgaagaactatgagagcaagaagtactcggatcctagtcagccaggcaatacagtacttcacccaggaactagactaatacaaaagctacacacatccacttgctggctgcaagaagttcctggcaaacctcagctggagcaagccacaaaacatccacaggtgacaagccctcaggccacaaaagaaactggcatggagattaaagaaggcaaacaatcttatagacaaaaaatcatggatgaactaaaatattattacaatggattctacttactttggattgacgccaaagttgctgccagaatggtttggaggctgttgcatggacaggtcctgaccagacgagagagacgaaggctgttgagaacttgtgttgatttcttccgcctggttccatttatggtgttcttaattgtacccttcatggaattcttattaccagtgtttctgaaactcttcccagagatgttgccatcaacttttgaaagtgaatccaaaaaggaagaaaaacagaaaaagaaaatggctgtaaagttggaactagcaaaatttcttcaagaaaccatgacagaaatggcaaggaggaacagagccaagatgggcgatgcctctacacagctctcatcctacgtgaagcaggtccagacaggccacaagcccagcacaaaggagatagttcgcttctccaaactatttgaggaccagctggccctggaacacttagatcgccctcagctggttgccctttgcaaactgctggaattgcagacatttggaaccaacaacctgctccgctttcagctcctgatgaaactgaagtctataaaagcagatgatgaaataattgccaaggaaggggtgacagcattgagtgtatcagaactacaggctgcctgtagggcccgagggatgagatcactgggtctcacggaggaacaactgcgacaacagctcacggagtggcaggacctccacctgaaggagaacgtccctccttcccttttgctcctgtcccgcaccttctacctgatagatgtgaagcccaagccgattgagataccactcagtggggaggctccaaagactgatattcttgtggaattacctactttcactgaatctaaagagaacatggtggatcttgcacctcaactgaagggaactaaggatgaagactttatacagccgccaccagttacatcatcacccataacaccatcaacacctatttcattacctaaaggacccatcacttcttctgaagaacctacactccaggccaaatcacaaatgacggcccagaacagcaaggctagttcaaaaggagcataaaggactacttgaggatggagctcactctcttcagcttccggccctcaacagtggcatctgtaaaggacctcccagataagactgtctggcttcagagagcggatcagctgtttagcccgtggggcagtcctttgaggcctggtaaccattccaggtgatgtgggtagtgagaccaagttcagaccacttagaaaaatataattgcaaagtcccatttcctctgtaccattgtcaccccactcaactttgtataaagcccaccccccatca

SEQ ID NO: 148321 - DNA, 1776 bp, Homo sapiens
  Payload ID: 9368
  Gene Symbol: LETM2
  Gene Name: leucine zipper-EF-hand containing transmembrane protein 2
  Uniprot ID: Q2VYF4
  ENST ID: ENST00000523983
  CDS Start-End: 173-1507
tagcttgggggtcccgggaaggagctgggaggacctaggcggccgttccgcggagcccggccgaggaggtccctatgttaactacttgagacaaaaataaatatggccttctacagttataattcagttctggctattgctcgaacaagattcccatttaaataagacatgtatgaagaactatgagagcaagaagtactcggatcctagtcagccaggcaatacagtacttcacccaggaactagactaatacaaaagctacacacatccacttgctggctgcaagaagttcctggcaaacctcagctggagcaagccacaaaacatccacaggtgacaagccctcaggccacaaaagaaactggcatggagattaaagaaggcaaacaatcttatagacaaaaaatcatggatgaactaaaatattattacaatggattctacttactttggattgacgccaaagttgctgccagaatggtttggaggctgttgcatggacaggtcctgaccagacgagagagacgaaggctgttgagaacttgtgttgatttcttccgcctggttccatttatggtgttcttaattgtacccttcatggaattcttattaccagtgtttctgaaactcttcccagagatgttgccatcaacttttgaaagtgaatccaaaaaggaagaaaaacagaaaaagaaaatggctgtaaagttggaactagcaaaatttcttcaagaaaccatgacagaaatggcaaggaggaacagagccaagatgggcgatgcctctacacagctctcatcctacgtgaagcaggtccagacaggccacaagcccagcacaaaggagatagttcgcttctccaaactatttgaggaccagctggccctggaacacttagatcgccctcagctggttgccctttgcaaactgctggaattgcagacatttggaaccaacaacctgctccgctttcagctcctgatgaaactgaagtctataaaagcagatgatgaaataattgccaaggaaggggtgacagcattgagtgtatcagaactacaggctgcctgtagggcccgagggatgagatcactgggtctcacggaggaacaactgcgacaacagctcacggagtggcaggacctccacctgaaggagaacgtccctccttcccttttgctcctgtcccgcaccttctacctgatagatgtgaagcccaagccgattgagataccactcagtggggaggctccaaagactgatattcttgtggaattacctactttcactgaatctaaagagaacatggtggatcttgcacctcaactgaagggaactaaggatgaagactttatacagccgccaccagttacatcatcacccataacaccatcaacacctatttcattacctaaaggacccatcacttcttctgaagaacctacactccaggccaaatcacaaatgacggcccagaacagcaaggctagttcaaaaggagcataaaggactacttgaggatggagctcactctcttcagcttccggccctcaacagtggcatctgtaaaggacctcccagataagactgtctggcttcagagagcggatcagctgtttagcccgtggggcagtcctttgaggcctggtaaccattccaggtgatgtgggtagtgagaccaagttcagaccacttagaaaaatataattgcaaagtcccatttcctctgtaccattgtcaccccactcaactttgtataaagcccaccccccatc

SEQ ID NO: 148322 - DNA, 2745 bp, Homo sapiens
  Payload ID: 9368
  Gene Symbol: LETM2
  Gene Name: leucine zipper-EF-hand containing transmembrane protein 2
  ENST ID: ENST00000523268
  CDS Start-End: 102-611
agcttgggggtcccgggaaggagctgggaggacctaggcggccgttccgcggagcccggccgaggaggtccctatgttaactacttgagacaaaaataaatatggccttctacagttataattcagttctggctattgctcgaacaagattccctagccattttgtccatcctacctgctcttcttattccccatcatgtgcatttcttcacttgccagattcccatttaaataagacatgtatgaagaactatgagagcaagaagtactcggatcctagtcagccaggcaatacagtacttcacccaggaactagactaatacaaaagctacacacatccacttgctggctgcaagaagttcctggcaaacctcagctggagcaagccacaaaacatccacaggtgacaagccctcaggccacaaaagaaactggcatggagattaaagaaggcaaacaatcttatagacaaaaaatcatggatgaactaaaatattattacaatggattctacttactttggattgacgccaaagttgctgccagaatggtttggaggctgttgcatggacaggtcctgaccagacgagagagacgaaggtgtttctgaaactcttcccagagatgttgccatcaacttttgaaagtgaatccaaaaaggaagaaaaacagaaaaagaaaatggctgtaaagttggaactagcaaaatttcttcaagaaaccatgacagaaatggcaaggaggaacagagccaagatgggcgatgcctctacacagctctcatcctacgtgaagcaggtccagacaggccacaagcccagcacaaaggagatagttcgcttctccaaactatttgaggaccagctggccctggaacacttagatcgccctcagctggttgccctttgcaaactgctggaattgcagacatttggaaccaacaacctgctccgctttcagctcctgatgaaactgaagtctataaaagcagatgatgaaataattgccaaggaaggggtgacagcattgagtgtatcagaactacaggctgcctgtagggcccgagggatgagatcactgggtctcacggaggaacaactgcgacaacagctcacggagtggcaggacctccacctgaaggagaacgtccctccttcccttttgctcctgtcccgcaccttctacctgatagatgtgaagcccaagccgattgagataccactcagtggggaggctccaaagactgatattcttgtggaattacctactttcactgaatctaaagagaacatggtggatcttgcacctcaactgaagggaactaaggatgaagactttatacagccgccaccagttacatcatcacccataacaccatcaacacctatttcattacctaaaggacccatcacttcttctgaagaacctacactccaggccaaatcacaaatgacggcccagaacagcaaggctagttcaaaaggagcataaaggactacttgaggatggagctcactctcttcagcttccggccctcaacagtggcatctgtaaaggacctcccagataagactgtctggcttcagagagcggatcagctgtttagcccgtggggcagtcctttgaggcctggtaaccattccaggtgatgtgggtagtgagaccaagttcagaccacttagaaaaatataattgcaaagtcccatttcctctgtaccattgtcaccccactcaactttgtataaagcccaccccccatcatgttgtttttttagtttcatgtgtacgtcccttcagagaggaaattttttgcacaatggaatcagcttggcaccttagatacctgtctcctatggcttggaattctgagtaagaacttggaagttccaaaaaccattttaggagcacctgattaactttctgaatgatccaccagtaggatcagcaccctggaaacaaagtaccttatgagatgggatggatatactccccagtaagatctttctggatataatgaagcttcctggagaaacagactggcaatcagaaagatttggctgcttccgacacctccatcttgggcctgcagaggctgcagcaatctgtgaggcagccgcaatctgcgaggcagccactcttctagcacatatggctttcattagccaccattttgctaggaagcataattaagggtttaagccttaaccatgtttgtgttgggtgtgtgtgtttctggccagtttgtctttcacaaataagactattagtcatagggattgtgaaagtctgatataatccctgtgctacccagcaacaagtattacattaggatatttatgcttggtgttttcagtattaataatatgaaataatagatagactgccatgcagctgaccaagggctttcttcccctggggagtggttagaaggccaaaggtatttcagcctgtaggtgataaaattagatttctttacttgctgtggttagacagcagtcagttaaaacaagtaaaactccactgtcctgtctgggatcacctaaatgaggaatgtcaccagcacttcacagcaagaatatgcattctacaatgctttctaaatttgtgctccatcagagaagccccaccatgtcccactaatgaagcccagttctttgggaatgatgaatccctactgtgcacatacagcaatcatggatcctgcctatcgaggtgattcacaatacactttcccatttcaaaaa

SEQ ID NO: 148323 - DNA, 2250 bp, Homo sapiens
  Payload ID: 9368
  Gene Symbol: LETM2
  Gene Name: leucine zipper-EF-hand containing transmembrane protein 2
  ENST ID: ENST00000518883
  CDS Start-End: 787-1155
tagcttgggggtcccgggaaggagctgggaggacctaggcggccgttccgcggagcccggccgaggaggtaggggtgggcaggcccagccctcaggccgcgacctggtgggccgcgctgcctttttttcctccggatcccgctcggtccgcatcctgctcctctcatcagagcatgatccaggcttctgacagcttccagttcccaccgcgctctcctccacccacgacctcatccccgccagttccccagcacagcgcgaactctgaagctcggcctctcctcccccttccccgcacagcgcgctccgtccttttttccgtcccaggccctgcttctttctcctcggcttcatttccaacaaccccgatcatccacgagggtcgtcgttcccgtgcctgtcccacctccgcaccagaaaaccaaagcatatcccccagaccccgccgcatgcaggccgcgcacacatcaggcgcgccgaagccgccgggcgaggaagccgagggcgcgttttgctcccgtgtggtgatgggcaaagccgagggagcccgggagcagcgggcgtggggcggcgccaatgcgagtgcgagtggtgtccgccgcccgggagcgcccgggcccgagcggattaaccgccgcctcaggtgtcgtctcctgcccgcgaaacaccacccaccgttagtgtccctatgttaactacttgagacaaaaataaatatggccttctacagttataattcagttctggctattgctcgaacaagattcccatttaaataagacatgtatgaagaactatgagagcaagaagtactcggatcctagtcagccaggcaatacagtacttcacccaggaactagactaatacaaaagctacacacatccacttgctggctgcaagaagttcctggcaaacctcagctggagcaagccacaaaacatccacaggtgacaagccctcaggccacaaaagaaactggcatggagattaaagaaggcaaacaatcttatagacaaaaaatcatggatgaactaaaatattattacaatggattctacttactttggattgacgccaaagttgctgccagaatggtttggaggctgttgcatggacaggtcctgaccagacgagagagacgaaggtgtttctgaaactcttcccagagatgttgccatcaacttttgaaagtgaatccaaaaaggaagaaaaacagaaaaagaaaatggctgtaaagttggaactagcaaaatttcttcaagaaaccatgacagaaatggcaaggaggaacagagccaagatgggcgatgcctctacacagctctcatcctacgtgaagcaggtccagacaggccacaagcccagcacaaaggagatagttcgcttctccaaactatttgaggaccagctggccctggaacacttagatcgccctcagctggttgccctttgcaaactgctggaattgcagacatttggaaccaacaacctgctccgctttcagctcctgatgaaactgaagtctataaaagcagatgatgaaataattgccaaggaaggggtgacagcattgagtgtatcagaactacaggctgcctgtagggcccgagggatgagatcactgggtctcacggaggaacaactgcgacaacagctcacggagtggcaggacctccacctgaaggagaacgtccctccttcccttttgctcctgtcccgcaccttctacctgatagatgtgaagcccaagccgattgagataccactcagtggggaggctccaaagactgatattcttgtggaattacctactttcactgaatctaaagagaacatggtggatcttgcacctcaactgaagggaactaaggatgaagactttatacagccgccaccagttacatcatcacccataacaccatcaacacctatttcattacctaaaggacccatcacttcttctgaagaacctacactccaggccaaatcacaaatgacggcccagaacagcaaggctagttcaaaaggagcataaaggactacttgaggatggagctcactctcttcagcttccggccctcaacagtggcatctgtaaaggacctcccagataagactgtctggcttcagagagcggatcagctgtttagcccgtggggcagtcctttgaggcctggtaaccattccaggtgatgtgggtagtgagaccaagttcagaccacttagaaaaatataattgcaaagtccca

SEQ ID NO: 148324 - DNA, 2240 bp, Homo sapiens
  Payload ID: 9368
  Gene Symbol: LETM2
  Gene Name: leucine zipper-EF-hand containing transmembrane protein 2
  ENST ID: ENST00000519476
  CDS Start-End: 301-822
acgcgccttaaaccaagccccacaaagaagtcacttcggcgatgtaaacgcgactttgcggcttcctgggctgctaaggtgaaggacgcccgccctccccagaacttgagagcttattggttggcgatgtcgtcactcagagtgacgtcaggggcgaggaaagaggcggaaccgtagagacttggcttcgggcccttctagcttgggggtcccgggaaggagctgggaggacctaggcggccgttccgcggagcccggccgaggaggtccctatgttaactacttgagacaaaaataaatatggccttctacagttataattcagttctggctattgctcgaacaagattccctagccattttgtccatcctacctgctcttcttattccccatcatgtgcatttcttcacttgccagattcccatttaaataagacatgtatgaagaactatgagagcaagaagtactcggatcctagtcagccaggcaatacagtacttcacccaggaactagactaatacaaaagctacacacatccacttgctggctgcaagaagttcctggcaaacctcagctggagcaagccacaaaacatccacaggtgacaagccctcaggccacaaaagaaactggcatggagattaaagaaggcaaacaatcttatagacaaaaaatcatggatgaactaaaatattattacaatggattctacttactttggattgacgccaaagttgctgccagaatggtttggaggctgttgcatggacaggtcctgaccagacgagagagacgaagggtaggcaagaatcatatttgagaaagaaaatgtgaaattaaaatgaactatttgggaactcaactatttaaattcaacgtaaacttcatcttaaaaatcccagagtaggaataataactgctggtgagaaccagtttcttgtctgcaaccgacttactgtacaactttagtcagtattctgaaatttgttatatattttcctgtataacggtttttaaaaaaaacttttattttaggttcaggggtacatgtgcatgtttgtagaatagttataattgtgttttttaatctttccaagaagttgaggggcttcatgtttcaactgttgttaatatattaagcatatgcatttttaaaacccaattttggctgggcacgatggcttatgcctgtaatcccagcactttgggaggctgaggcgggcggatcacttgaggtcaggagttcaagaccagactggccagcacgatgaaacccttgtctactaaaaaaaatacaaaaattagccgggcatggtggcacgtgcctgtagtcccagctacccaggaggctgaggcaggagaatggcttgaacttgggaggcggaggttgcagcgagccgagatcgtgccactgcactccagcctggagtgagatgccatctcaaaaaaacaaacaaacaaaaaaacaattttaagtaatacaatgctattaaagtatggaccctctaacatagatgaagtctaggagatgccaataatatttttattgtcatagatttccttcaagatagcccctaaaagttacttcagagctatggtaaacaggaaaaccctgcctcttcattttataaacagctgcagaaaacctgtcttgggtttttaacactttaagaaccaagctgagcatggcacatatgcctgtaatcccagctccttgggaggctgaggtggaaggattgcgtgagcccaggagtttgaggccagactgggcaacatagtgagacactatctcttgaaagaaagaaaatgaaacaagacagggtttttttggttttgtttttcatttttgtttttggcatgccctaaaataatgaatattgcatatgcatttaattctatagctgttgagaacttgtgttgatttcttccgcctggttccatttatggtgttcttaattgtacccttcatggaattcttattaccagtgtttctgaaactcttcccagagatgttgccatcaacttttgaaagtgaatccaaaaaggtatgattttttaactttaataaaatttaataaaccttattagaggagtttttaggtttacagaaaacttgggcagaaagtactacttctccccacccaaccccatcccaatttctcctgtaattaatatcttgcattagtgtgctatatttgtaatgattaaaaaaaccaatattgacatgttattattaaa

SEQ ID NO: 148325 - DNA, 1459 bp, Homo sapiens
  Payload ID: 9368
  Gene Symbol: LETM2
  Gene Name: leucine zipper-EF-hand containing transmembrane protein 2
  ENST ID: ENST00000524874
  CDS Start-End: 128-1459
gtagagacttggcttcgggcccttctagcttgggggtcccgggaaggagctgggaggacctaggcggccgttccgcggagcccggccgaggaggtccctatgttaactacttgagacaaaaataaatatggccttctacagttataattcagttctggctattgctcgaacaagattccctagccattttgtccatcctacctgctcttcttattccccatcatgtgcatttcttcacttgccagattcccatttaaataagacatgtatgaagaactatgagagcaagaagtactcggatcctagtcagccaggcaatacagtacttcacccaggaactagactaatacaaaagctacacacatccacttgctggctgcaagaagttcctggcaaacctcagctggagcaagccacaaaacatccacaggtgacaagccctcaggccacaaaagaaactggcatggagattaaagaaggcaaacaatcttatagacaaaaaatcatggatgaactaaaatattattacaatggattctacttactttggattgacgccaaagttgctgccagaatggtttggaggctgttgcatggacaggtcctgaccagacgagagagacgaagggaagaaaaacagaaaaagaaaatggctgtaaagttggaactagcaaaatttcttcaagaaaccatgacagaaatggcaaggaggaacagagccaagatgggcgatgcctctacacagctctcatcctacgtgaagcaggtccagacaggccacaagcccagcacaaaggagatagttcgcttctccaaactatttgaggaccagctggccctggaacacttagatcgccctcagctggttgccctttgcaaactgctggaattgcagacatttggaaccaacaacctgctccgctttcagctcctgatgaaactgaagtctataaaagcagatgatgaaataattgccaaggaaggggtgacagcattgagtgtatcagaactacaggctgcctgtagggcccgagggatgagatcactgggtctcacggaggaacaactgcgacaacagctcacggagtggcaggacctccacctgaaggagaacgtccctccttcccttttgctcctgtcccgcaccttctacctgatagatgtgaagcccaagccgattgagataccactcagtggggaggctccaaagactgatattcttgtggaattacctactttcactgaatctaaagagaacatggtggatcttgcacctcaactgaagggaactaaggatgaagactttatacagccgccaccagttacatcatcacccataacaccatcaacacctatttcattacctaaaggacccatcacttcttctgaagaacctacactccaggccaaatcacaaatgacggcccagaacagcaaggctagttcaaaaggagcataa

SEQ ID NO: 148326 - DNA, 557 bp, Homo sapiens
  Payload ID: 9368
  Gene Symbol: LETM2
  Gene Name: leucine zipper-EF-hand containing transmembrane protein 2
  ENST ID: ENST00000527334
  CDS Start-End: 209-557
aatccagtcttcaatcacgggtttcctcgggcgttagccactgcctgcggagtgtggactggcagaaaaacgtcaccttcgggccccccagcaccaacgcgccttaaaccaagccccacaaagaagtcacttcggcgatgtaaacgcgactttgcggcttcctgggctgctaaggtccctatgttaactacttgagacaaaaataaatatggccttctacagttataattcagttctggctattgctcgaacaagattccctagccattttgtccatcctacctgctcttcttattccccatcatgtgcatttcttcacttgccagattcccatttaaataagacatgtatgaagaactatgagagcaagaagtactcggatcctagtcagccaggcaatacagtacttcacccaggaactagactaatacaaaagctacacacatccacttgctggctgcaagaagttcctggcaaacctcagctggagcaagccacaaaacatccacaggtgacaagccctcaggccacaaaagaaactggcatggagattaaag

SEQ ID NO: 148327 - DNA, 529 bp, Homo sapiens
  Payload ID: 9368
  Gene Symbol: LETM2
  Gene Name: leucine zipper-EF-hand containing transmembrane protein 2
  ENST ID: ENST00000527175
  CDS Start-End: 1-259
ggagaacgtccctccttcccttttgctcctgtcccgcaccttctacctgatagatgtgaagcccaagccgattgagataccactcagtggggaggatgaagactttatacagccgccaccagttacatcatcacccataacaccatcaacacctatttcattacctaaaggacccatcacttcttctgaagaacctacactccaggccaaatcacaaatgacggcccagaacagcaaggctagttcaaaaggagcataaaggactacttgaggatggagctcactctcttcagcttccggccctcaacagtggcatctgtaaaggacctcccagataagactgtctggcttcagagagcggatcagctgtttagcccgtggggcagtcctttgaggcctggtaaccattccaggtgatgtgggtagtgagaccaagttcagaccacttagaaaaatataattgcaaagtcccatttcctctgtaccattgtcaccccactcaactttgtataaagcccaccccccatca

SEQ ID NO: 148328 - DNA, 554 bp, Homo sapiens
  Payload ID: 9368
  Gene Symbol: LETM2
  Gene Name: leucine zipper-EF-hand containing transmembrane protein 2
  ENST ID: ENST00000526356
  CDS Start-End: 128-554
aggtgtcgtctcctgcccgcgaaacaccacccaccgttagtgtgggtccacaggtttcgagcccctgttgaaaatgtcagctctgtggctaaggtccctatgttaactacttgagacaaaaataaatatggccttctacagttataattcagttctggctattgctcgaacaagattccctagccattttgtccatcctacctgctcttcttattccccatcatgtgcatttcttcacttgccagattcccatttaaataagacatgtatgaagaactatgagagcaagaagtactcggatcctagtcagccaggcaatacagtacttcacccaggaactagactaatacaaaagctacacacatccacttgctggctgcaagaagttcctggcaaacctcagctggagcaagccacaaaacatccacaggtgacaagccctcaggccacaaaagaaactggcatggagattaaagaaggcaaacaatcttatagacaaaaaatcatggatgaactaaaatattattacaatggattctacttactttggattg

SEQ ID NO: 148329 - DNA, 1261 bp, Homo sapiens
  Payload ID: 9368
  Gene Symbol: LETM2
  Gene Name: leucine zipper-EF-hand containing transmembrane protein 2
  Uniprot ID: Q2VYF4
  ENST ID: ENST00000527710
  CDS Start-End: 158-991
agtaggtatgatttagtcagcccaacagacagttcagcagcccctgagaagagggagccttcactgagtgtggcagtcactgtgccggtgagaaaacagaggcagctccttccttctccccgttctgtgccactctactagacagcgttgacagcatatggaagaaaaacagaaaaagaaaatggctgtaaagttggaactagcaaaatttcttcaagaaaccatgacagaaatggcaaggaggaacagagccaagatgggcgatgcctctacacagctctcatcctacgtgaagcaggtccagacaggccacaagcccagcacaaaggagatagttcgcttctccaaactatttgaggaccagctggccctggaacacttagatcgccctcagctggttgccctttgcaaactgctggaattgcagacatttggaaccaacaacctgctccgctttcagctcctgatgaaactgaagtctataaaagcagatgatgaaataattgccaaggaaggggtgacagcattgagtgtatcagaactacaggctgcctgtagggcccgagggatgagatcactgggtctcacggaggaacaactgcgacaacagctcacggagtggcaggacctccacctgaaggagaacgtccctccttcccttttgctcctgtcccgcaccttctacctgatagatgtgaagcccaagccgattgagataccactcagtggggaggctccaaagactgatattcttgtggaattacctactttcactgaatctaaagagaacatggtggatcttgcacctcaactgaagggaactaaggatgaagactttatacagccgccaccagttacatcatcacccataacaccatcaacacctatttcattacctaaaggacccatcacttcttctgaagaacctacactccaggccaaatcacaaatgacggcccagaacagcaaggctagttcaaaaggagcataaaggactacttgaggatggagctcactctcttcagcttccggccctcaacagtggcatctgtaaaggacctcccagataagactgtctggcttcagagagcggatcagctgtttagcccgtggggcagtcctttgaggcctggtaaccattccaggtgatgtgggtagtgagaccaagttcagaccacttagaaaaatataattgcaaagtcccatttcctctgtaccattgtcaccccactcaactttgtataaagcccaccccccatca

SEQ ID NO: 148330 - DNA, 2572 bp, Homo sapiens
  Payload ID: 9369
  Gene Symbol: LEKR1
  Gene Name: leucine, glutamate and lysine rich 1
  ENST ID: ENST00000356539
  CDS Start-End: 115-2193
agccgactggcggcgcggtcgcccgggagaccgggaaagccgtttcacacccgtcctagtcgaagtcgagatttcctttggcttcaaagctctctcaccatattttgggaagttatggatcatcacattcccatgcatgcgttgcctgaagaaatccaaaagatgttgcctgaagaaaaagtttgtaagtactgtggagtcagctatctaattcttcatgaatttaaggctatggaagaaaaagtgaaagcaatggaaaaagagatgaaattttatcaaggaagtgtagatcgtgaaaagagacttcaagaaaagctgcattctcttagccaagaacttgaacagtacaaaattgacaacaaatccaaaacagaaagaatttacgatgtaggcatgcagttaaaaagtcaacaaaatgaatttcagaaagtaaagaaacaactgagtcatttgcaagatgagctaaaaattaaatatagacaatcatacatcttcagtcaaagattgtcagagtacaaatatttctggaataagactctttcattacttacttttactaaaagggaactaaccagtattaaaaatgaagtatatgataattaccaaaactggacttcattgaaaggagcagtttttctacaaattaaatctataagtgaaacagccttgacagaaatagacatactgaataaaagtttgacagtatcccagagaaataaagtatgccttgaaaaggaaatgaaaaatctgaaattgttgtcagatgcagccatattgagatctcagcagattcggacatctagacaacaggaagtaaacttgcaaaccagatgctatgatttgcaaaaagaagtactagatttacaatgtctagtagaggcacttggattaaaacttcagaaggcggtgacagagatggacaactataaagaaatgcttatgaataaatctaatgaagctgatgactgtcaaagagaacttaaaaaactgaagtttgaatccattatttctgagtcacagcatactatgctgcttaaggaaaaagaagactctttaatgacttgtcaacagatatataaagcattacaggaagagctgactgtgaaagaaaagcaagaagaagacataaagagaagaattaaccttgcagaaaatgaactggagataaccaaaactcttctgaatcagacaagggaagaggttttaacactgaaaaatgaaagggaattgatgctgatttcacatcagaaaagcatcgagcagctgcaagaaacccttagacagaagctgctgagtgatgataactggaaggagaagattgaagcagaacttgccaaggaaagggcccaacacttggttgaatttgaagagcaagctcttctctttaaggaagaaacaaaattgcaacttgatattgaaaaagaaaaacaccaagatgtaatccaaaagtataagaaagaacaagaggaactacaaatgaagatatctgacttaatcacaggcgctacaagagatctaaggcaggaagtgaccactcttaaagaaaaacttcacaaatcccatattcggtacactgaagaatctaattcaaaggaaaaagaaattgaaaatcttaaaaatttggttgcagaatttgaatctcgcttgaagaaggaaattgacagtaatgattcagtttcagaaaacttgaggaaggaaatggaacagaagtcggatgaactgaaaagagtaatgctggctcaaacacaactgatagagcaatttaaccagtcccaggaagagaatacttttcttcaggagacagtgcgtagagaatgtgaagaacgctttgaactgacagaggctttgagtcaagccagagaacagctcctggagctcagtaagcttcgtggaagtttaccattctcaccgtgttccctcagcaagggcagcctaacctcccctgctgcagcagtcagtaatcatggagagagaagccttgcaagactgaactctgaaaaaggaatccaaattcccaacctgcgcggggtgtcaaaacccaccactttcccaacctcagataagccgaagagggttagatcaggcgtgcccattctcccccagccacatcctcccaggggtggagcatcttcagcaaatgagactagacagagactggctgccattcttaggagaaggcggagtcagcaatgatccaaaatgaggagcaggaagctccctacagcgtgcacgctctttcagagagtgccaggaattcactgtaactgagaatgacaatgataaaattattttcacagatcaggaaggcatacctatagatgtatttaacaaaagactgtaaaaagctggaaaattgtgaagccttatttttcaagagggttttgatagagtaacagatcattaagttgttggtattccagaggtccgatttctatgtttatgttggaatgtgctctatgaatatagccttttagagatcacaggtaaaatttttcacccataacatcttttcaatttcttgcgccactacaagcagatatatttccacaaaaaaatagattgtttgagattt

SEQ ID NO: 148331 - DNA, 2881 bp, Homo sapiens
  Payload ID: 9369
  Gene Symbol: LEKR1
  Gene Name: leucine, glutamate and lysine rich 1
  Uniprot ID: Q6ZMV7
  ENST ID: ENST00000470811
  CDS Start-End: 1336-2502
agccgactggcggcgcggtcgcccgggagaccgggaaagccgtttcacacccgtcctagtcgaagtcgagatttcctttggcttcaaagctctctcaccatattttgggaagttatggatcatcacattcccatgcatgcgttgcctgaagaaatccaaaagatgttgcctgaagaaaaagtttgtaagtactgtggagtcagctatctaattcttcatgaatttaaggctatggaagaaaaagtgaaagcaatggaaaaagagatgaaattttatcaaggaagtgtagatcgtgaaaagagacttcaagaaaagctgcattctcttagccaagaacttgaacagtacaaaattgacaacaaatccaaaacagaaagaatttacgatgtaggcatgcagttaaaaagtcaacaaaatgaatttcagaaagtaaagaaacaactgagtcatttgcaagatgagctaaaaattaaatatagacaatcatacatcttcagtcaaagattgtcagagtacaaatatttctggaataagactctttcattacttacttttactaaaagggaactaaccagtattaaaaatgaagtatatgataattaccaaaactggacttcattgaaaggagcagtttttctacaaattaaatctataagtgaaacagccttgacagaaatagacatactgaataaaagtttgacagtatcccagagaaataaagtatgccttgaaaaggaaatgaaaaatctgaaattgttgtcagatgcagccatattgagatctcagcagattcggacatctagacaacaggaagtaaacttgcaaaccagatgctatgatttgcaaaaagaagtactagatttacaatgtctagtagaggcacttggattaaaacttcagaaggcggtgacagagatggacaactataaagaaatgcttatgtaagatggagaatattaaacaacttataacagtgctctgtagatgtgttacaaaatggcaagaattaggaagaaatgacaagaattataaagaccctgcctgggcaacacggagaaactttgtctccacaaaaaaatacaaaaattatccatgcgtgttggcacactcctgtagtcccagctactcgggaggctgaactgggaagatcacctaagcctagaaagttgaagctacagtgaaccatgatcatgccactacactccagcctgggcgacagagtgagaccctgtctcaaaatgaataaataagaataaatctaatgaagctgatgactgtcaaagagaacttaaaaaactgaagtttgaatccattatttctgagtcacagcatactatgctgcttaaggaaaaagaagactctttaatgacttgtcaacagatatataaagcattacaggaagagctgactgtgaaagaaaagcaagaagaagacataaagagaagaattaaccttgcagaaaatgaactggagataaccaaaactcttctgaatcagacaagggaagaggttttaacactgaaaaatgaaagggaattgatgctgatttcacatcagaaaagcatcgagcagctgcaagaaacccttagacagaagctgctgagtgatgataactggaaggagaagattgaagcagaacttgccaaggaaagggcccaacacttggttgaatttgaagagcaagctcttctctttaaggaagaaacaaaattgcaacttgatattgaaaaagaaaaacaccaagatgtaatccaaaagtataagaaagaacaagaggaactacaaatgaagatatctgacttaatcacaggcgctacaagagatctaaggcaggaagtgaccactcttaaagaaaaacttcacaaatcccatattcggtacactgaagaatctaattcaaaggaaaaagaaattgaaaatcttaaaaatttggttgcagaatttgaatctcgcttgaagaaggaaattgacagtaatgattcagtttcagaaaacttgaggaaggaaatggaacagaagtcggatgaactgaaaagagtaatgctggctcaaacacaactgatagagcaatttaaccagtcccaggaagagaatacttttcttcaggagacagtgcgtagagaatgtgaagaacgctttgaactgacagaggctttgagtcaagccagagaacagctcctggagctcagtaagcttcgtggaagtttaccattctcaccgtgttccctcagcaagggcagcctaacctcccctgctgcagcagtcagtaatcatggagagagaagccttgcaagactgaactctgaaaaaggaatccaaattcccaacctgcgcggggtgtcaaaacccaccactttcccaacctcagataagccgaagagggttagatcaggcgtgcccattctcccccagccacatcctcccaggggtggagcatcttcagcaaatgagactagacagagactggctgccattcttaggagaaggcggagtcagcaatgatccaaaatgaggagcaggaagctccctacagcgtgcacgctctttcagagagtgccaggaattcactgtaactgagaatgacaatgataaaattattttcacagatcaggaaggcatacctatagatgtatttaacaaaagactgtaaaaagctggaaaattgtgaagccttatttttcaagagggttttgatagagtaacagatcattaagttgttggtattccagaggtccgatttctatgtttatgttggaatgtgctctatgaatatagccttttagagatcacaggtaaaatttttcacccataacatcttttcaatttcttgcgccactacaagcagatatatttccacaaaaaaatagattgtttgagattt

SEQ ID NO: 148332 - DNA, 546 bp, Homo sapiens
  Payload ID: 9369
  Gene Symbol: LEKR1
  Gene Name: leucine, glutamate and lysine rich 1
  ENST ID: ENST00000483177
  CDS Start-End: 111-482
gactggcggcgcggtcgcccgggagaccgggaaagccgtttcacacccgtcctagtcgaagtcgagatttcctttggcttcaaagctctctcaccatattttgggaagttatggatcatcacattcccatgcatgcgttgcctgaagaaatccaaaagatgttgcctgaagaaaaagtttgtaagtactgtggagtcagctatctaattcttcatgaatttaaggctatggaagaaaaagtgaaagcaatggaaaaagagatgaaattttatcaaggaagtgtagatcgtgaaaagagacttcaagaaaagctgcattctcttagccaagaacttgaacagtacaaaattgacaacaaatccaaaacagaaagcaaaatatacttcagactcatgcttagactggaagtagaacattgccagctgaaagaacgaatgccagatctacaacattctgtcactgagccatacataggtctgtgatttgttttccttagcttttcttaataactttgtttttgcaaaataaatatttttttgaaatgaa

SEQ ID NO: 148333 - DNA, 621 bp, Homo sapiens
  Payload ID: 9369
  Gene Symbol: LEKR1
  Gene Name: leucine, glutamate and lysine rich 1
  ENST ID: ENST00000477399
  CDS Start-End: 108-506
tggcggcgcggtcgcccgggagaccgggaaagccgtttcacacccgtcctagtcgaagtcgagatttcctttggcttcaaagctctctcaccatattttgggaagttatggatcatcacattcccatgcatgcgttgcctgaagaaatccaaaagatgttgcctgaagaaaaagtttgtaagtactgtggagtcagctatctaattcttcatgaatttaaggctatggaagaaaaagtgaaagcaatggaaaaagagatgaaattttatcaaggaagtgtagatcgtgaaaagagacttcaagaaaagctgcattctcttagccaagaacttgaacagtacaaaattgacaacaaatccaaaacagaaagaatttacgatgtaggcatgcagttaaaaagtcaacaaaatgaatttcagaaagtaaagaaacaactgagtcatttgcaagatgagctaaaaattaaatatagacaatcatacatcttcagattgtgcttttgctgatgtctgtaagaactctgtctaagccggtcagaaggattttctcctgtattttcttctaagtgttttatagttttagctcttctttagatctatgatctatttcagctaacttctg

SEQ ID NO: 148334 - DNA, 616 bp, Homo sapiens
  Payload ID: 9369
  Gene Symbol: LEKR1
  Gene Name: leucine, glutamate and lysine rich 1
  ENST ID: ENST00000498839
  CDS Start-End: 122-454
gacgtccagccgactggcggcgcggtcgcccgggagaccgggaaagccgtttcacacccgtcctagtcgaagtcgagatttcctttggcttcaaagctctctcaccatattttgggaagttatggatcatcacattcccatgcatgcgttgcctgaagaaatccaaaagatgttgcctgaagaaaaagtttgtaagtactgtggagtcagctatctaattcttcatgaatttaaggctatggaagaaaaagtgaaagcaatggaaaaagagatgaaattttatcaaggaagtgtagatcgtgaaaagagacttcaagaaaagctgcattctcttagccaagaacttgaacagtacaaaattgacaacaaatccaaaacagaaaggttgagtatgtttttcttttctatcatttatttagttgaaagacagctacaggaaataaatacactttgaatgtttttctaaaatttctctacatcaggtatagtttatactttaatgcatttgtttcttaattatattaataattactaaatataattattatagtttgctttcttttgaggcatatatttactatctgaaaaattagaaaccaattaatttagtaaccac

SEQ ID NO: 148335 - DNA, 1940 bp, Homo sapiens
  Payload ID: 9369
  Gene Symbol: LEKR1
  Gene Name: leucine, glutamate and lysine rich 1
  ENST ID: ENST00000491763
  CDS Start-End: 796-1194
gtcctagtcgaagtcgaggtgagggacgatggctttcctcagcctgggatgacccggtcctccaaatgcagttccggagtggaggcgtgctcgcacccggggagagagccagaaagctgagccgcggcgccccagcgagagcacgaggccccgggtctggactccgccaccacgctcctctgcggccccttcctggtgtctgccagcccgcggggcccaggcgcggtccgccttcctcccagccccggggaacgcgcggctctgcttcctcacccccgcaccctcctcctcctcctcttccggccactgcaggtccagggggaacggggttagaaagggacagatttgaaagccattccagcagttttgtctggccttgcggttggtttctgtgtggaagagcctgccgcttcaggaaagtcttaggatgtgaactcccgccttcacctgcccctgacctgctcgttgtgggtgattcacgccatgggaatggttctttacgtaagggcttgaaagctgaacgtgagttaatggcctgacgtgacactagtgtgagaaacggaattggaaacgaacaaggacgtgtctgcattttaaaaaatgtcttttcggtgatcttgttagagaggaggttcacaaacacccacgtagctgcagccacttatcactgcacctcttgccaaagtgcggtccacatacgtgcaatgagaaaggattaaagggacttgtttgataacacacgcaaaactatatttcctttggcttcaaagctctctcaccatattttgggaagttatggatcatcacattcccatgcatgcgttgcctgaagaaatccaaaagatgttgcctgaagaaaaagtttgtaagtactgtggagtcagctatctaattcttcatgaatttaaggctatggaagaaaaagtgaaagcaatggaaaaagagatgaaattttatcaaggaagtgtagatcgtgaaaagagacttcaagaaaagctgcattctcttagccaagaacttgaacagtacaaaattgacaacaaatccaaaacagaaagaatttacgatgtaggcatgcagttaaaaagtcaacaaaatgaatttcagaaagtaaagaaacaactgagtcatttgcaagatgagctaaaaattaaatatagacaatcatacatcttcagattgtgcttttgctgatgtctgtaagaactctgtctaagccggtcagaaggattttctcctgtattttcttctaagtgttttatagttttagctcttctttagatctatgatctatttcagctaacttctgtgtatgatatgaggtaagaatctaaattcatcctgtttcacgtggatattcaattgttccagtgctgtttgttagaggccaatttttccttattgaattgcctcagcatctttgcctaaaataaattcaccataaatgtaaaggattatttttggattttctattctattccattaatctatatgtcttatgtcagtgccacactctcttaagtactacagtttttaataaattttaaaatcaagaaatataattactctaacttccttcttcgttttcaaaattgtttttgctattctgcgccctccataatgaattttaggatcagcttgtgaatttctgcaaagtaacctgctgggattttgataggtatagtattgaatctatagatcaatttggggagaatttctaccttaaaatttttgtatctttcaattcatgaatgtggtatgtttttccatggagatctttagccctctcaaaaatgttttgttttcttgaacttcttttattacaatttatttctaagtgttttattctttttatgttgttatgaattgggactgttaattttatcttggggattggtcattgttaatatacagaaataaaattgatttttgtatatgta

SEQ ID NO: 148336 - DNA, 3036 bp, Homo sapiens
  Payload ID: 9370
  Gene Symbol: LRG1
  Gene Name: leucine-rich alpha-2-glycoprotein 1
  Uniprot ID: P02750
  ENST ID: ENST00000306390
  CDS Start-End: 462-1505
caatatcaacataccatgaaatcaagacgagtttttttgttcttttcagtgagcttctgggttgctcaagtttatggtaaatccctcctcttgctcagagagctgtccctgtctccaggaatagtgccttgcaaaccttgacccttgaactccgggttgggggaagtgaggatgcaactagagagactcttggatgccccccaaaaatcaggaagcaaggaaagaaaaacctgtgttctagaagcagggtcaaaaaggggttgaacaggaaacaatttccaggaagcaattttgtaatcctgacccctccccttcccctgcctggcttaggctcagcccctatcaggaactggacgggggtggggacttccccagggttggttcccctgcccccagtccaggcaggtataaggccacctccgcaggccaggacaacccagaagcaaaagagcagagctaccatgtcctcttggagcagacagcgaccaaaaagcccagggggcattcaaccccatgtttctagaactctgttcctgctgctgctgttggcagcctcagcctggggggtcaccctgagccccaaagactgccaggtgttccgctcagaccatggcagctccatctcctgtcaaccacctgccgaaatccccggctacctgccagccgacaccgtgcacctggccgtggaattcttcaacctgacccacctgccagccaacctcctccagggcgcctctaagctccaagaattgcacctctccagcaatgggctggaaagcctctcgcccgaattcctgcggccagtgccgcagctgagggtgctggatctaacccgaaacgccctgaccgggctgcccccgggcctcttccaggcctcagccaccctggacaccctggtattgaaagaaaaccagctggaggtcctggaggtctcgtggctacacggcctgaaagctctggggcatctggacctgtctgggaaccgcctccggaaactgccccccgggctgctggccaacttcaccctcctgcgcacccttgaccttggggagaaccagttggagaccttgccacctgacctcctgaggggtccgctgcaattagaacggctacatctagaaggcaacaaattgcaagtactgggaaaagatctcctcttgccgcagccggacctgcgctacctcttcctgaacggcaacaagctggccagggtggcagccggtgccttccagggcctgcggcagctggacatgctggacctctccaataactcactggccagcgtgcccgaggggctctgggcatccctagggcagccaaactgggacatgcgggatggcttcgacatctccggcaacccctggatctgtgaccagaacctgagcgacctctatcgttggcttcaggcccaaaaagacaagatgttttcccagaatgacacgcgctgtgctgggcctgaagccgtgaagggccagacgctcctggcagtggccaagtcccagtgagaccaggggcttgggttgagggtggggggtctggtagaacactgcaacccgcttaacaaataatcctgcctttggccgggtgcgggggctcacgcctgtaatcccagcactttgggaggcccaggtgggcggatcacgaggtcaggagatcgagaccatcttggctaacatggtgaaaccctgtctctactaaaaatataaaaaattagccaggcgtggtggtgggcacctgtagtcccagcaactcgggaggctgaggcaggagaatggcgtgaacttgggaggcggagcttgcggtgagccaagatcgtgccactgcactctagcctgggcgacagagcaagactgtctcaaaaaaattaaaattaaaattaaaaacaaataatcctgccttttacaggtgaaactcggggctgtccatagcggctgggaccccgtttcatccatccatgcttcctagaacacacgatgggctttccttacccatgcccaaggtgtgccctccgtctggaatgccgttccctgtttcccagatctcttgaactctgggttctcccagccccttgtccttccttccagctgagccctggccacactggggctgcctttctctgactctgtcttccccaagtcagggggctctctgagtgcagggtctgatgctgagtcccacttagcttggggtcagaaccaaggggtttaataaataacccttgaaaactggatcggatgaattggctttcattgtgttcctagcatcttctcaaatcaacttcccaggactccagggtgaaggaggaaaagaggcatggcccaggccctggggtgtgggatatggtctccctaggggatgacagttgggatcaatggcctgtgacttctcctctcccttcccccatcctgggacctaactggaaataaaaccttgactgttgcccgggtgtcattttaccagtggatttctgccagggcttgtgtcctaggagaaggtttaagttaaaccagattgcccaggtctccaaacgatttgtcatgctgacctgagatcatcgaagggggcacctgcccccgggcaaggttgcaggggcaggatggggctgaagggatgagcagggtcccgggcccacctgctgatacagcattggccatgtgggggctgcaatcggatttggaagaccctggggcttgggggcatgtccagttttcccagctccctaaaaaatgaccatgcagcctggcgccgtggctcatgcctgtaatccaaacactttgggaggctgaggcaggcagatcaccggaggtcaggagttcgagaccagactggccaacatggcaaaaccctgtctctactaaaaatacaaaaattagccaggcacagtggcacgtgcctgtaataccagctacttgggagggtcaggcaggagaatcacttgaacctgggaggcggaggttgcagtgagccaagatcacgccactgcactccaggctgggcgacagagtgaaactgtgtctcaaaaataaaaataaaaat

SEQ ID NO: 148337 - DNA, 6335 bp, Homo sapiens
  Payload ID: 9371
  Gene Symbol: LRPPRC
  Gene Name: leucine-rich pentatricopeptide repeat containing
  Uniprot ID: P42704
  ENST ID: ENST00000260665
  CDS Start-End: 59-4243
acatgctcctcctgtccttctggcggagcgtgcttcccgctgcggggacgttcgagcaatggcagccctgctgagatccgcgcgttggttgctgcgtgccggggcggccccgcgcctcccgctctccctgcgcctcctccctggcggcccgggccggctgcatgccgcctcctatctgcccgccgctcgcgccgggcccgtggccggaggactactgagcccagccaggctgtatgccattgctgccaaagaaaaagatattcaagaggagtccactttttcttctaggaagatttccaatcagtttgattgggctctaatgagactagatctttctgttcgaagaactggccgcattccaaagaagcttctacaaaaagtttttaatgatacctgccgctcaggtggcctaggtggtagtcatgccttgcttctactacgtagttgtggttctctcttgcctgaactaaagcttgaagagagaacagaatttgctcataggatatgggacacacttcagaaattaggtgctgtgtatgatgtgagtcactataatgctttacttaaagtctatcttcaaaatgaatataaattctcaccaactgatttcctggcaaaaatggaggaagcaaacattcaaccaaatcgagtgacataccagagattgattgcttcttattgtaatgtaggagatattgaaggtgccagcaagattcttggatttatgaaaactaaggatctcccagttacagaggcagtattcagtgcccttgtgacagggcatgccagagctggtgatatggagaatgcagaaaacattctcacagtgatgagagatgccggaattgagcctggtccagacacatacctcgcattattgaatgcatatgctgagaagggcgacattgaccatgttaagcagactctggagaaggtggagaagtccgagcttcaccttatggaccgtgatttactgcaaattatttttagcttcagtaaagctgggtatcctcagtatgtctcagaaattttggaaaaagttacatgtgaaagaagatatattccagatgcaatgaacctcattttacttttagtcactgaaaaattggaagatgtagcgttgcaaattttactagcatgccccgtatcaaaggaagatggcccaagtgtctttggcagtttctttttacaacactgtgtgactatgaatacgcctgtggagaagctaacagactactgtaagaagttaaaggaagtccagatgcactcctttcctctgcagttcaccctccattgtgctttactcgccaataaaactgatttggcaaaagccttaatgaaggctgtgaaggaggaaggttttcctatcagacctcactatttctggccattgctagttggacgtcggaaggaaaaaaatgttcaaggtataattgaaatcctcaaaggaatgcaagaattgggagtacatcctgatcaggaaacatatacagattatgtgattccatgctttgatagtgtaaactcagcacgagccattttgcaggaaaatggatgtctgtctgatagtgatatgttttctcaagctggattgagaagtgaagcagcaaatgggaacttagactttgtattatcatttttgaaatcaaatacattgcccatctcgctgcagtctataagaagtagcctactgctaggcttcaggaggtctatgaatataaatctttggagcgagataacagaattgttgtacaaggatggacgttattgccaggagcctcgaggaccgacggaagctgttggctattttctttataacttgattgacagcatgagtgactcagaggtacaggccaaggaggagcatttgagacaatacttccatcagctggagaagatgaatgtaaaaattcctgaaaatatctacagaggcattcgtaatctcctggaaagctaccatgttcctgaattgattaaggatgctcacttgttggttgagagtaagaatttagactttcaaaaaactgtgcaacttacatcatctgaattggagtccacacttgaaacactaaaagctgaaaatcaacctataagagatgtcctaaagcaactcatattagtgctttgttcagaagagaatatgcaaaaagcccttgaattgaaagcaaaatatgaatccgacatggttactggtggctatgcagctttaataaatttatgctgtcgacatgataaagtagaagatgccttgaacttgaaagaagaatttgaccgcttagattcatctgctgtccttgacaccggcaagtatgtaggccttgtaagagtattggcaaagcatggcaagctccaagatgctattaacattctgaaggagatgaaagagaaggatgttcttatcaaagatacaacagccttgtcctttttccacatgctaaatggcgcagctttaagaggtgaaattgaaacagtaaaacagttgcatgaagccatcgtgactctagggttagcagaaccatccaccaacataagtttcccattggtcactgtacacttggaaaagggcgacctatctactgctcttgaggtcgccattgactgctatgaaaagtataaagtattaccaaggattcatgatgtcttgtgtaaactggtagagaaaggcgagactgatctaattcagaaagcaatggactttgtgagccaagaacaaggtgaaatggtgatgctctatgatctcttctttgccttcctacaaacaggaaattacaaagaggccaagaagatcattgagactccagggattagagctcgatctgcaaggcttcagtggttttgtgacagatgtgttgcaaataatcaggttgaaactctggaaaaattagtggagctgacacagaagctatttgaatgtgatagagaccagatgtactacaatctgctaaaactgtataaaataaacggtgactggcaaagagctgatgcagtctggaataaaatccaagaagaaaatgttattcctcgtgaaaagacattaagattattagcagaaatccttagagagggtaaccaggaagttccgtttgacgtacctgagttgtggtatgaagatgaaaaacattccctgaattcttcgtcagcctcaaccacagaacctgatttccagaaagatatattgattgcctgccgattgaaccaaaaaaaaggggcatatgatattttcctgaatgcaaaagagcaaaacattgtgtttaatgctgaaacctacagcaatctcattaaattactgatgtcagaagattattttacacaagcaatggaagtgaaagcattcgcggagacccacatcaagggcttcacactgaacgatgctgccaacagccgcctcatcataacgcaagttaggcgggattatttgaaagaggctgtgacaacactgaaaacagtattggatcagcagcagaccccttctaggttagcagtgacccgtgtcatccaggcattggccatgaagggtgatgttgaaaacatagaagtagttcagaagatgttaaatggactcgaagactccattggactttcaaaaatggttttcatcaataacattgctttggctcaaataaagaataataacatagatgccgcaatagaaaacattgaaaatatgcttacttcagagaataaagtcattgaaccccaatacttcggcttggcatacttattcagaaaagtaatagaggagcagttggaaccagcagttgaaaagataagcatcatggcggagagattggccaatcagtttgcaatttataaacctgtcactgattttttccttcaacttgtggatgcaggcaaggtggatgatgccagagctctcctacagagatgtggtgcaattgctgaacaaaccccgattttgttgttgttcctccttaggaattctaggaaacaaggaaaggcatcaactgtgaaatctgtgttagaattgattcctgaattaaatgaaaaggaagaagcatacaattccctcatgaaaagctatgtctcagagaaagatgtcacatctgctaaagcactgtatgaacatttgactgcaaagaatacaaaattggatgatctgtttctaaagcgttacgcatctttgctgaagtatgctggagagcctgtccctttcattgaaccccctgaaagctttgaattttatgcacagcagctaagaaaattgagggaaaactcttcttgaaataaccaggcgatactttgttttgtatatatttgtgattctgtgtctacatgttattttgaagtatatctgagggaaaaataaatgaaaattttctttatgtacttatgtatgtgtgatgcatgttcaaagtcttattgaccataactctgtgcacttggttattggacatttttggagtttttttctctgggaaaaatcgatagtgttttcttcaatgctgctgctgtgtgaagccatactttttcaggattcttcccctaattggctctttggtttccctgctctgtttcatttatttcattaaaatgttattcctttatttaagattcacttattagtctgctgtttctctgaaaaattttagagctaggtatagtgaccgtgaactttctaacgcataatattctgtgatacagccattccgtacatgtgtgaagtcctgcataactttcgaactttgttaaatgttggcactaggagtcatcagatctaggcttcatcattttccagtgagaagcagagacccaaagggcctgttacttgtgcttggtcaggggactgtctgtcatgcctggaggctcttcggcacacttccccatctttcccttctgccactgtggcttcaagcacctctgttcatagagcgtctctgaaattgagtctcggtcatgacttatcccgaagtagagcaatgtgtttcctctcattgtagtttcaggactttgtcagtacaagctctgccctaggcttgttactttatactcatatcctgaaaagatgtgatttcatctatgaaggggtaaaatattggtttgtatttaattgtttgaaataaaagtgatccctatattgaatctcatgcctgttaatatctacactgtaagtagtgacttcaaaaaaattctaagataggtagtcaggagagtttgccattataaaaggtgtcttaataatatggaatattgacctaactggagatgaggtaattaattaccgaaatgttgaaaatgttttgagaactctccccattttggggtattccttgttcatttgaatttggtgactccctactgttccagtttcagtgccaacttgggtcacactgttcacatcaggggagaccttgccttggggacgtaggcgggcctcttgcaacttgtgctgttgaccttctgtcttgtggaactctctctcctgcatctgctacctgcccgcagatggtgtgagggagggttgatggcgggaagccaggaagtagatgtcatcatggtattggccaggcttttacttcaactctttttgtggcgttagatttaaggaagcagggggcatggccaacgttgagtcttggcccagtggacatagtgcggctttcccttgagcactgcccagatgcaggacctgcacatgttacaggtttgccaaaagcatctttttttttttttttttttttgagatagtcttgctctgttgcttaagccagagtgcagtggcgcaatctcagctcactgcaacctccgcctcctgggttcaagtgattcttgtgcctcagcctcccacgtagctgagattacaggcttgcaccaccatgttcagctaatttttgtatggtaaagacggagtttcaccatgttggccaggttggtctcgaactcctggccccaagtgatcctccccctgcgctcgcttcagcctcccaaagtgctgggattacaggtgtgagccaccacgcctggccaagagcctcactcctgtctttagtgattgcactgaagcaggcctcatttttttgcagtcatgctaaccacaagttagtcaacattcactaattgacattcattagaataggtctccaaggtgaggcataacgttggggtgtaatctggatttcgcagtcatctttttggggaaactgaaagtaccatctcatttgcatgaagtgactccacactggccctgtatatggactctggtaaaatgtgagtgtggtacagaggaaataggtaagacccccttatctagccctctcggcagcagcgggggggtgttacaaaggactagctgttcaaatatcttttgtattgtattg

SEQ ID NO: 148338 - DNA, 1848 bp, Homo sapiens
  Payload ID: 9371
  Gene Symbol: LRPPRC
  Gene Name: leucine-rich pentatricopeptide repeat containing
  ENST ID: ENST00000409946
  CDS Start-End: 32-1627
gcgtgcttcccgctgcggggacgttcgagcaatggcagccctgctgagatccgcgcgttggttgctgcgtgccggggcggccccgcgcctcccgctctccctgcgcctcctccctggcggcccgggccggctgcatgccgcctcctatctgcccgccgctcgcgccgggcccgtggccggaggactactgagcccagccaggctgtatgccattgctgccaaagaaaaagatattcaagaggagtccactttttcttctaggaagatttccaatcagtttgattgggctctaatgagactagatctttctgttcgaagaactggccgcattccaaagaagcttctacaaaaagtttttaatgatacctgccgctcaggtggcctaggtggtagtcatgccttgcttctactacgtagttgtggttctctcttgcctgaactaaagcttgaagagagaacagaatttgctcataggatatgggacacacttcagaaattaggtgctgtgtatgatgtgagtcactataatgctttacttaaagtctatcttcaaaatgaatataaattctcaccaactgatttcctggcaaaaatggaggaagcaaacattcaaccaaatcgagtgacataccagagattgattgcttcttattgtaatgtaggagatattgaaggtgccagcaagattcttggatttatgaaaactaaggatctcccagttacagaggcagtattcagtgcccttgtgacagggcatgccagagctggtgatatggagaatgcagaaaacattctcacagtgatgagagatgccggaattgagcctggtccagacacatacctcgcattattgaatgcatatgctgagaagggcgacattgaccatgttaagcagactctggagaaggtggagaagtccgagcttcaccttatggaccgtgatttactgcaaattatttttagcttcagtaaagctgggtatcctcagtatgtctcagaaattttggaaaaagttacatgtgaaagaagatatattccagatgcaatgaacctcattttacttttagtcactgaaaaattggaagatgtagcgttgcaaattttactagcatgccccgtatcaaaggaagatggcccaagtgtctttggcagtttctttttacaacactgtgtgactatgaatacgcctgtggagaagctaacagactactgtaagaagttaaaggaagtccagatgcactcctttcctctgcagttcaccctccattgtgctttactcgccaataaaactgatttggcaaaagccttaatgaaggctgtgaaggaggaaggttttcctatcagacctcactatttctggccattgctagttggacgtcggaaggaaaaaaatgttcaaggtataattgaaatcctcaaaggaatgcaagaattgggagtacatcctgatcaggaaacatatacagattatgtgattccatgctttgatagtgtaaactcagcacgagccattttgcaggaaaatggatgtctgtctgatagtgatatgttttctcaagctggattgagaagtgaagcagcaaatgggaacttagactttgtattatcattttattttccaatctgacaagaagaaaacagagaagcattagcagaggaatctgggctcacgaggtggatccatgagagctgccttttccttttatcatatcatccattccacttcgttgtcaacctcttgatttttcaggcttgtttgttgctaaggaaactagatgctttttgtcagcagccttcatagctgagatgtttctggtcatctttttaatgaataaaaacttgacaata

SEQ ID NO: 148339 - DNA, 1610 bp, Homo sapiens
  Payload ID: 9371
  Gene Symbol: LRPPRC
  Gene Name: leucine-rich pentatricopeptide repeat containing
  ENST ID: ENST00000409659
  CDS Start-End: 43-1557
cttctggcggagcgtgcttcccgctgcggggacgttcgagcaatggcagccctgctgagatccgcgcgttggttgctgcgtgccggggcggccccgcgcctcccgctctccctgcgcctcctccctggcggcccgggccggctgcatgccgcctcctatctgcccgccgctcgcgccgggcccgtggccggaggactactgagcccagccaggctgtatgccattgctgccaaagaaaaagatattcaagaggagtccactttttcttctaggaagatttccaatcagtttgattgggctctaatgagactagatctttctgttcgaagaactggccgcattccaaagaagcttctacaaaaagtttttaatgatacctgccgctcaggtggcctaggtggtagtcatgccttgcttctactacgtagttgtggttctctcttgcctgaactaaagcttgaagagagaacagaatttgctcataggatatgggacacacttcagaaattaggtgctgtgtatgatgtgagtcactataatgctttacttaaagtctatcttcaaaatgaatataaattctcaccaactgatttcctggcaaaaatggaggaagcaaacattcaaccaaatcgagtgacataccagagattgattgcttcttattgtaatgtaggagatattgaaggtgccagcaagattcttggatttatgaaaactaaggatctcccagttacagaggcagtattcagtgcccttgtgacagggcatgccagagctggtgatatggagaatgcagaaaacattctcacagtgatgagagatgccggaattgagcctggtccagacacatacctcgcattattgaatgcatatgctgagaagggcgacattgaccatgttaagcagactctggagaaggtggagaagtccgagcttcaccttatggaccgtgatttactgcaaattatttttagcttcagtaaagctgggtatcctcagtatgtctcagaaattttggaaaaagttacatgtgaaagaagatatattccagatgcaatgaacctcattttacttttagtcactgaaaaattggaagatgtagcgttgcaaattttactagcatgccccgtatcaaaggaagatggcccaagtgtctttggcagtttctttttacaacactgtgtgactatgaatacgcctgtggagaagctaacagactactgtaagaagttaaaggaagtccagatgcactcctttcctctgcagttcaccctccattgtgctttactcgccaataaaactgatttggcaaaagccttaatgaaggctgtgaaggaggaaggttttcctatcagacctcactatttctggccattgctagttggacgtcggaaggaaaaaaatgttcaaggtataattgaaatcctcaaaggaatgcaagaattgggagtacatcctgatcaggaaacatatacagattatgtgattccatgctttgatagtgtaaactcagcacgagccattttgcaggtgagtacaagtgtggttttaatttaataattgaagaggatatctttcctccttaatgtttagtgttgacacacaaaaaa

SEQ ID NO: 148340 - DNA, 1209 bp, Homo sapiens
  Payload ID: 9371
  Gene Symbol: LRPPRC
  Gene Name: leucine-rich pentatricopeptide repeat containing
  ENST ID: ENST00000447246
  CDS Start-End: 133-1209
gtgcttcccgctgcggggacgttcgagcaatggcagccctgctgagatccgcgcgttggttgctgcgtgccggggcggccccgcgcctcccgctctccctgcgcctcctccctggcggcccgggccggctgcatgccgcctcctatctgcccgccgctcgcgccgggcccgtggccgggtgagtgcccaggccctttctccagaggactactgagcccagccaggctgtatgccattgctgccaaagaaaaagatattcaagaggagtccactttttcttctaggaagatttccaatcagtttgattgggctctaatgagactagatctttctgttcgaagaactggccgcattccaaagaagcttctacaaaaagtttttaatgatacctgccgctcaggtggcctaggtggtagtcatgccttgcttctactacgtagttgtggttctctcttgcctgaactaaagcttgaagagagaacagaatttgctcataggatatgggacacacttcagaaattaggtgctgtgtatgatgtgagtcactataatgctttacttaaagtctatcttcaaaatgaatataaattctcaccaactgatttcctggcaaaaatggaggaagcaaacattcaaccaaatcgagtgacataccagagattgattgcttcttattgtaatgtaggagatattgaaggtgccagcaagattcttggatttatgaaaactaaggatctcccagttacagaggcagtattcagtgcccttgtgacagggcatgccagagctggtgatatggagaatgcagaaaacattctcacagtgatgagagatgccggaattgagcctggtccagacacatacctcgcattattgaatgcatatgctgagaagggcgacattgaccatgttaagcagactctggagaaggtggagaagtccgagcttcaccttatggaccgtgatttactgcaaattatttttagcttcagtaaagctgggtatcctcagtatgtctcagaaattttggaaaaagttacatgtgaaagaagatatattccagatgcaatgaacctcattttacttttagtcactgaaaaattggaagatgtagcgttgcaaattttactagcatgccccgtatcaaaggaagatggcccaagtgtctttggcagtttctttttacaacactgtgtgactatgaatacg

SEQ ID NO: 148341 - DNA, 888 bp, Homo sapiens
  Payload ID: 9371
  Gene Symbol: LRPPRC
  Gene Name: leucine-rich pentatricopeptide repeat containing
  ENST ID: ENST00000419884
  CDS Start-End: 1-234
gtcactgattttttccttcaacttgtggatgcaggcaaggtggatgatgccagagctctcctacagagatgtggtgcaattgctgaacaaaccccgattttgttgttgttcctccttaggaattctaggaaacaaggaaaggcatcaactgtgaaatctgtgttagaattgattcctgaattaaatgaaaaggaagaagcatacaattccctcatgaaaagctatgaaaaatgaaaagcttttttgatgttgagctgatgatcttgatgttgatgtagatttctacataattgacatgtccctctccacaacagttcctggattatcttgatttcacagtggttttaagccaaaggggattgaatgtctcagagaaagatgtcacatctgctaaagcactgtatgaacatttgactgcaaagaatacaaaattggatgatctgtttctaaagcgttacgcatctttgctgaagtatgctggagagcctgtccctttcattgaaccccctgaaagctttgaattttatgcacagcagctaagaaaattgagggaaaactcttcttgaaataaccaggcgatactttgttttgtatatatttgtgattctgtgtctacatgttattttgaagtatatctgagggaaaaataaatgaaaattttctttatgtacttatgtatgtgtgatgcatgttcaaagtcttattgaccataactctgtgcacttggttattggacatttttggagtttttttctctgggaaaaatcgatagtgttttcttcaatgctgctgctgtgtgaagccatactttttcaggattcttcccctaattggctctttggtttccctgctctgtttcatttatttcattaaaatgttattccttta

SEQ ID NO: 148342 - DNA, 5206 bp, Homo sapiens
  Payload ID: 9372
  Gene Symbol: LGR4
  Gene Name: leucine-rich repeat containing G protein-coupled receptor 4
  Uniprot ID: Q9BXB1
  ENST ID: ENST00000379214
  CDS Start-End: 445-3300
ccgcggctgggagacagcgagccagagtctgggtgtttgtgcgagagccacggcgggggctggggcgagtggccggcatggctgaaggctgcgctctgcaaccttgaagagccgctgcattgagaggccagggacagggagaccggtgcgatggcagagcgcggcccccgccgctgcgccgggccggcccggctggcgtgagccgccggaggagcggggctgcctctgcgcgtccatggagcagcgggaagggcgaaactccggagcgccgcgtccctgcgccgctgcggcggactgctgaaggggccgagcccgcgcggaccgccgaggaagagacccccgctccagcccgcaggccggctgcccgggggcggcgggggacatcggagggcagcggagcgagcagcgccgcgggagaggccggcgcgggaggcggccgcagcaatgccgggcccgctagggctgctctgcttcctcgccctggggctgctcggctcggccgggcccagcggcgcggcgccgcctctctgcgcggcgccctgcagctgcgacggcgaccgtcgggtggactgctccgggaaggggctgacggccgtgcccgaggggctcagcgccttcacccaagcgctggatatcagtatgaacaacattactcagttgccagaagatgcatttaagaactttccttttctagaagagctacaattggcgggcaacgacctttcttttatccacccaaaggccttgtctgggttgaaagaactcaaagttctaacgctccagaataatcagttgaaaacagtacccagtgaagccattcgagggctgagtgctttgcagtctttgcgtttagatgccaaccatattacctcagtccccgaggacagttttgaaggacttgttcagttacggcatctgtggctggatgacaacagcttgacggaggtgcctgtgcaccccctcagcaatctgcccaccctacaggcgctgaccctggctctcaacaagatctcaagcatccctgactttgcatttaccaacctttcaagcctggtagttctgcatcttcataacaataaaattagaagcctgagtcaacactgttttgatggactagataacctggagaccttagacttgaattataataacttgggggaatttcctcaggctattaaagcccttcctagccttaaagagctaggatttcatagtaattctatttctgttatccctgatggagcatttgatggtaatccactcttaagaactatacatttgtatgataatcctctgtcttttgtggggaactcagcatttcacaatttatctgatcttcattccctagtcattcgtggtgcaagcatggtgcagcagttccccaatcttacaggaactgtccacctggaaagtctgactttgacaggtacaaagataagcagcatacctaataatttgtgtcaagaacaaaagatgcttaggactttggacttgtcttacaataatataagagaccttccaagttttaatggttgccatgctctggaagaaatttctttacagcgtaatcaaatctaccaaataaaggaaggcacctttcaaggcctgatatctctaaggattctagatctgagtagaaacctgatacatgaaattcacagtagagcttttgccacacttgggccaataactaacctagatgtaagtttcaatgaattaacttcctttcctacggaaggcctgaatgggctaaatcaactgaaacttgtgggcaacttcaagctgaaagaagccttagcagcaaaagactttgttaacctcaggtctttatcagtaccatatgcttatcagtgctgtgcattttggggttgtgactcttatgcaaatttaaacacagaagataacagcctccaggaccacagtgtggcacaggagaaaggtactgctgatgcagcaaatgtcacaagcactcttgaaaatgaagaacatagtcaaataattatccattgtacaccttcaacaggtgcttttaagccctgtgaatatttactgggaagctggatgattcgtcttactgtgtggttcattttcttggttgcattatttttcaacctgcttgttattttaacaacatttgcatcttgtacatcactgccttcgtccaaattgtttataggcttgatttctgtgtctaacttattcatgggaatctatactggcatcctaacttttcttgatgctgtgtcctggggcagattcgctgaatttggcatttggtgggaaactggcagtggctgcaaagtagctgggtttcttgcagttttctcctcagaaagtgccatatttttattaatgctagcaactgtcgaaagaagcttatctgcaaaagatataatgaaaaatgggaagagcaatcatctcaaacagttccgggttgctgcccttttggctttcctaggtgctacagtagcaggctgttttccccttttccatagaggggaatattctgcatcacccctttgtttgccatttcctacaggtgaaacgccatcattaggattcactgtaacgttagtgctattaaactcactagcatttttattaatggccgttatctacactaaactatactgcaacttggaaaaagaggacctctcagaaaactcacaatctagcatgattaagcatgtcgcttggctaatcttcaccaattgcatctttttctgccctgtggcgtttttttcatttgcaccattgatcactgcaatctctatcagccccgaaataatgaagtctgttactctgatattttttccattgcctgcttgcctgaatccagtcctgtatgttttcttcaacccaaagtttaaagaagactggaagttactgaagcgacgtgttaccaagaaaagtggatcagtttcagtttccatcagtagccaaggtggttgtctggaacaggatttctactacgactgtggcatgtactcacatttgcagggcaacctgactgtttgcgactgctgcgaatcgtttcttttaacaaagccagtatcatgcaaacacttgataaaatcacacagctgtcctgcattggcagtggcttcttgccaaagacctgagggctactggtccgactgtggcacacagtcggcccactctgattatgcagatgaagaagattcctttgtctcagacagttctgaccaggtgcaggcctgtggacgagcctgcttctaccagagtagaggattccctttggtgcgctatgcttacaatctaccaagagttaaagactgaactactgtgtgtgtaaccgtttcccccgtcaaccaaaatcagtgtttatagagtgaaccctattctcatctttcatctgggaagcacttctgtaatcactgcctggtgtcacttagaagaaggagaggtggcagtttatttctcaaaccagtcattttcaaagaacaggtgcctaaattataaattggtgaaaaatgcaatgtccaagcaatgtatgatctgtttgaaacaaatatatgacttgaaaaggatcttaggtgtagtagagcaatataatgttagttttttctgatccataagaagcaaatttatacctatttgtgtattaagcacaagataaagaacagctgttaatattttttaaaaatctattttaaaatgtgattttctataactgaagaaaatatcttgctaattttacctaatgtttcatccttaatctcaggacaacttactgcagggccaaaaaagggactgtcccagctagaactgtgagagtatacataggcattactttattatgttttcacttgccatccttgacataagagaactataaattttgtttaagcaatttataaatctaaaacctgaagatgtttttaaaacaatattaacagctgttaggttaaaaaaatagctggacatttgttttcagtcattatacattgctttggtccaatcagtaattttttcttaagtgttttgtgattacactactagaaaaaaagtaaaaggctaattgctgtgtgggtttagtcgatttggctaaactactaactaatgtgggggtttaatagtatctgagggatttggtggcttcatgtaatgttctcattaatgaatacttcctaatatcgttggctctactaatattttccaatttgctgggatgtcacctagcaatagcttggattatatagaaagtaaactgtggtcaatacttgcatttaattagacgaaacggggagtaattatgacacgaagtacttatgtttatttcttagtgagctggattatcttgaacctgtgctattaaatggaaatttccatacatcttccccatactattttttataaaagagcctattcaatagctcagaggttgaactctggttaaacaagataatatgttattaataaaaatagaagaagaaagaataaagcttagtcctgtgtctttaaaaattaaaaattttacttgattcccatctatgggctttagacctattactgggtggagtcttaaagttataattgttcaatatgttttttgaacagtgtgctaaatcaatagcaaacccactgccatattagttattctgaatatactaaaaaaatccagctagattgcagtttaataattaaactgtacatactgtgcatataatgaatttttatcttatgtaaattatttttagaacacaagttgggaaatgtggcttctgttcatttcgtttaattaaagctacctcctaaactatagtggctgccagtagcagactgttaaattgtggtttatatactttttgcattgtaaatagtctttgttgtacattgtcagtgtaataaaaacagaatctttgtatatcaaaatcatgtagtttgtataaaatgtgggaaggatttatttacagtgtgttgtaattttgtaaggccaactatttacaagttttaaaaattgctatcatgtatatttacacatctgataaatattaaatcataacttggtaagaaactcctaattaaaaggttttttccaaaattcaggttattgaaaacttttcattttattcatttaaaaactagaataacagatatataaaagtgttaatctttgtgctatatggtatgaaatacaatattgtactcagtgttttgaattattaaagtttctagaaagcaa

SEQ ID NO: 148343 - DNA, 5163 bp, Homo sapiens
  Payload ID: 9372
  Gene Symbol: LGR4
  Gene Name: leucine-rich repeat containing G protein-coupled receptor 4
  Uniprot ID: Q9BXB1
  ENST ID: ENST00000389858
  CDS Start-End: 474-3257
agaagggaaaaggacgggaagagattgagccgcggctgggagacagcgagccagagtctgggtgtttgtgcgagagccacggcgggggctggggcgagtggccggcatggctgaaggctgcgctctgcaaccttgaagagccgctgcattgagaggccagggacagggagaccggtgcgatggcagagcgcggcccccgccgctgcgccgggccggcccggctggcgtgagccgccggaggagcggggctgcctctgcgcgtccatggagcagcgggaagggcgaaactccggagcgccgcgtccctgcgccgctgcggcggactgctgaaggggccgagcccgcgcggaccgccgaggaagagacccccgctccagcccgcaggccggctgcccgggggcggcgggggacatcggagggcagcggagcgagcagcgccgcgggagaggccggcgcgggaggcggccgcagcaatgccgggcccgctagggctgctctgcttcctcgccctggggctgctcggctcggccgggcccagcggcgcggcgccgcctctctgcgcggcgccctgcagctgcgacggcgaccgtcgggtggactgctccgggaaggggctgacggccgtgcccgaggggctcagcgccttcacccaagcgctacaattggcgggcaacgacctttcttttatccacccaaaggccttgtctgggttgaaagaactcaaagttctaacgctccagaataatcagttgaaaacagtacccagtgaagccattcgagggctgagtgctttgcagtctttgcgtttagatgccaaccatattacctcagtccccgaggacagttttgaaggacttgttcagttacggcatctgtggctggatgacaacagcttgacggaggtgcctgtgcaccccctcagcaatctgcccaccctacaggcgctgaccctggctctcaacaagatctcaagcatccctgactttgcatttaccaacctttcaagcctggtagttctgcatcttcataacaataaaattagaagcctgagtcaacactgttttgatggactagataacctggagaccttagacttgaattataataacttgggggaatttcctcaggctattaaagcccttcctagccttaaagagctaggatttcatagtaattctatttctgttatccctgatggagcatttgatggtaatccactcttaagaactatacatttgtatgataatcctctgtcttttgtggggaactcagcatttcacaatttatctgatcttcattccctagtcattcgtggtgcaagcatggtgcagcagttccccaatcttacaggaactgtccacctggaaagtctgactttgacaggtacaaagataagcagcatacctaataatttgtgtcaagaacaaaagatgcttaggactttggacttgtcttacaataatataagagaccttccaagttttaatggttgccatgctctggaagaaatttctttacagcgtaatcaaatctaccaaataaaggaaggcacctttcaaggcctgatatctctaaggattctagatctgagtagaaacctgatacatgaaattcacagtagagcttttgccacacttgggccaataactaacctagatgtaagtttcaatgaattaacttcctttcctacggaaggcctgaatgggctaaatcaactgaaacttgtgggcaacttcaagctgaaagaagccttagcagcaaaagactttgttaacctcaggtctttatcagtaccatatgcttatcagtgctgtgcattttggggttgtgactcttatgcaaatttaaacacagaagataacagcctccaggaccacagtgtggcacaggagaaaggtactgctgatgcagcaaatgtcacaagcactcttgaaaatgaagaacatagtcaaataattatccattgtacaccttcaacaggtgcttttaagccctgtgaatatttactgggaagctggatgattcgtcttactgtgtggttcattttcttggttgcattatttttcaacctgcttgttattttaacaacatttgcatcttgtacatcactgccttcgtccaaattgtttataggcttgatttctgtgtctaacttattcatgggaatctatactggcatcctaacttttcttgatgctgtgtcctggggcagattcgctgaatttggcatttggtgggaaactggcagtggctgcaaagtagctgggtttcttgcagttttctcctcagaaagtgccatatttttattaatgctagcaactgtcgaaagaagcttatctgcaaaagatataatgaaaaatgggaagagcaatcatctcaaacagttccgggttgctgcccttttggctttcctaggtgctacagtagcaggctgttttccccttttccatagaggggaatattctgcatcacccctttgtttgccatttcctacaggtgaaacgccatcattaggattcactgtaacgttagtgctattaaactcactagcatttttattaatggccgttatctacactaaactatactgcaacttggaaaaagaggacctctcagaaaactcacaatctagcatgattaagcatgtcgcttggctaatcttcaccaattgcatctttttctgccctgtggcgtttttttcatttgcaccattgatcactgcaatctctatcagccccgaaataatgaagtctgttactctgatattttttccattgcctgcttgcctgaatccagtcctgtatgttttcttcaacccaaagtttaaagaagactggaagttactgaagcgacgtgttaccaagaaaagtggatcagtttcagtttccatcagtagccaaggtggttgtctggaacaggatttctactacgactgtggcatgtactcacatttgcagggcaacctgactgtttgcgactgctgcgaatcgtttcttttaacaaagccagtatcatgcaaacacttgataaaatcacacagctgtcctgcattggcagtggcttcttgccaaagacctgagggctactggtccgactgtggcacacagtcggcccactctgattatgcagatgaagaagattcctttgtctcagacagttctgaccaggtgcaggcctgtggacgagcctgcttctaccagagtagaggattccctttggtgcgctatgcttacaatctaccaagagttaaagactgaactactgtgtgtgtaaccgtttcccccgtcaaccaaaatcagtgtttatagagtgaaccctattctcatctttcatctgggaagcacttctgtaatcactgcctggtgtcacttagaagaaggagaggtggcagtttatttctcaaaccagtcattttcaaagaacaggtgcctaaattataaattggtgaaaaatgcaatgtccaagcaatgtatgatctgtttgaaacaaatatatgacttgaaaaggatcttaggtgtagtagagcaatataatgttagttttttctgatccataagaagcaaatttatacctatttgtgtattaagcacaagataaagaacagctgttaatattttttaaaaatctattttaaaatgtgattttctataactgaagaaaatatcttgctaattttacctaatgtttcatccttaatctcaggacaacttactgcagggccaaaaaagggactgtcccagctagaactgtgagagtatacataggcattactttattatgttttcacttgccatccttgacataagagaactataaattttgtttaagcaatttataaatctaaaacctgaagatgtttttaaaacaatattaacagctgttaggttaaaaaaatagctggacatttgttttcagtcattatacattgctttggtccaatcagtaattttttcttaagtgttttgtgattacactactagaaaaaaagtaaaaggctaattgctgtgtgggtttagtcgatttggctaaactactaactaatgtgggggtttaatagtatctgagggatttggtggcttcatgtaatgttctcattaatgaatacttcctaatatcgttggctctactaatattttccaatttgctgggatgtcacctagcaatagcttggattatatagaaagtaaactgtggtcaatacttgcatttaattagacgaaacggggagtaattatgacacgaagtacttatgtttatttcttagtgagctggattatcttgaacctgtgctattaaatggaaatttccatacatcttccccatactattttttataaaagagcctattcaatagctcagaggttgaactctggttaaacaagataatatgttattaataaaaatagaagaagaaagaataaagcttagtcctgtgtctttaaaaattaaaaattttacttgattcccatctatgggctttagacctattactgggtggagtcttaaagttataattgttcaatatgttttttgaacagtgtgctaaatcaatagcaaacccactgccatattagttattctgaatatactaaaaaaatccagctagattgcagtttaataattaaactgtacatactgtgcatataatgaatttttatcttatgtaaattatttttagaacacaagttgggaaatgtggcttctgttcatttcgtttaattaaagctacctcctaaactatagtggctgccagtagcagactgttaaattgtggtttatatactttttgcattgtaaatagtctttgttgtacattgtcagtgtaataaaaacagaatctttgtatatcaaaatcatgtagtttgtataaaatgtgggaaggatttatttacagtgtgttgtaattttgtaaggccaactatttacaagttttaaaaattgctatcatgtatatttacacatctgataaatattaaatcataacttggtaagaaactcctaattaaaaggttttttccaaaattcaggttattgaaaacttttcattttattcatttaaaaactagaataacagatatataaaagtgttaatctttgtgctatatggtatgaaatacaatattgtactcagtgttttgaattattaaagtttctagaaagcaa

SEQ ID NO: 148344 - DNA, 492 bp, Homo sapiens
  Payload ID: 9372
  Gene Symbol: LGR4
  Gene Name: leucine-rich repeat containing G protein-coupled receptor 4
  ENST ID: ENST00000480977
  CDS Start-End: 13-489
gcggccgcagcaatgccgggcccgctagggctgctctgcttcctcgccctggggctgctcggctcggccgggcccagcggcgcggcgccgcctctctgcgcggcgccctgcagctgcgacggcgaccgtcgggtggactgctccgggaaggggctgacggccgtgcccgaggggctcagcgccttcacccaagcgctggatatcagtatgaacaacattactcagttgccagaagatgcatttaagaactttccttttctagaagagctgcgtttagatgccaaccatattacctcagtccccgaggacagttttgaaggacttgttcagttacggcatctgtggctggatgacaacagcttgacggaggtgcctgtgcaccccctcagcaatctgcccaccctacaggcgctgaccctggctctcaacaagatctcaagcatccctgactttgcatttaccaacctttcaagcctggtagttctgtaagta

SEQ ID NO: 148345 - DNA, 4611 bp, Homo sapiens
  Payload ID: 9373
  Gene Symbol: LGR5
  Gene Name: leucine-rich repeat containing G protein-coupled receptor 5
  Uniprot ID: O75473
  ENST ID: ENST00000266674
  CDS Start-End: 312-3035
aaaaaacgagcgtgcaagcagagatgctgctccacaccgctcaggccgcgagcagcagcaaggcgcaccgccactgtcgccgctgcagccagggctgctccgaaggccggcgtggcggcaaccggcacctctgtccccgccgcgcttctcctcgccgcccacgccgtggggtcaggaacgcggcgtctggcgctgcagacgcccgctgagttgcagaagcccacggagcggcgcccggcgcgccacggcccgtagcagtccggtgctgctctccgcccgcgtccggctcgtggccccctacttcgggcaccatggacacctcccggctcggtgtgctcctgtccttgcctgtgctgctgcagctggcgaccgggggcagctctcccaggtctggtgtgttgctgaggggctgccccacacactgtcattgcgagcccgacggcaggatgttgctcagggtggactgctccgacctggggctctcggagctgccttccaacctcagcgtcttcacctcctacctagacctcagtatgaacaacatcagtcagctgctcccgaatcccctgcccagtctccgcttcctggaggagttacgtcttgcgggaaacgctctgacatacattcccaagggagcattcactggcctttacagtcttaaagttcttatgctgcagaataatcagctaagacacgtacccacagaagctctgcagaatttgcgaagccttcaatccctgcgtctggatgctaaccacatcagctatgtgcccccaagctgtttcagtggcctgcattccctgaggcacctgtggctggatgacaatgcgttaacagaaatccccgtccaggcttttagaagtttatcggcattgcaagccatgaccttggccctgaacaaaatacaccacataccagactatgcctttggaaacctctccagcttggtagttctacatctccataacaatagaatccactccctgggaaagaaatgctttgatgggctccacagcctagagactttagatttaaattacaataaccttgatgaattccccactgcaattaggacactctccaaccttaaagaactaggatttcatagcaacaatatcaggtcgatacctgagaaagcatttgtaggcaacccttctcttattacaatacatttctatgacaatcccatccagtttgttgggagatctgcttttcaacatttacctgaactaagaacactgactctgaatggtgcctcacaaataactgaatttcctgatttaactggaactgcaaacctggagagtctgactttaactggagcacagatctcatctcttcctcaaaccgtctgcaatcagttacctaatctccaagtgctagatctgtcttacaacctattagaagatttacccagtttttcagtctgccaaaagcttcagaaaattgacctaagacataatgaaatctacgaaattaaagttgacactttccagcagttgcttagcctccgatcgctgaatttggcttggaacaaaattgctattattcaccccaatgcattttccactttgccatccctaataaagctggacctatcgtccaacctcctgtcgtcttttcctataactgggttacatggtttaactcacttaaaattaacaggaaatcatgccttacagagcttgatatcatctgaaaactttccagaactcaaggttatagaaatgccttatgcttaccagtgctgtgcatttggagtgtgtgagaatgcctataagatttctaatcaatggaataaaggtgacaacagcagtatggacgaccttcataagaaagatgctggaatgtttcaggctcaagatgaacgtgaccttgaagatttcctgcttgactttgaggaagacctgaaagcccttcattcagtgcagtgttcaccttccccaggccccttcaaaccctgtgaacacctgcttgatggctggctgatcagaattggagtgtggaccatagcagttctggcacttacttgtaatgctttggtgacttcaacagttttcagatcccctctgtacatttcccccattaaactgttaattggggtcatcgcagcagtgaacatgctcacgggagtctccagtgccgtgctggctggtgtggatgcgttcacttttggcagctttgcacgacatggtgcctggtgggagaatggggttggttgccatgtcattggttttttgtccatttttgcttcagaatcatctgttttcctgcttactctggcagccctggagcgtgggttctctgtgaaatattctgcaaaatttgaaacgaaagctccattttctagcctgaaagtaatcattttgctctgtgccctgctggccttgaccatggccgcagttcccctgctgggtggcagcaagtatggcgcctcccctctctgcctgcctttgccttttggggagcccagcaccatgggctacatggtcgctctcatcttgctcaattccctttgcttcctcatgatgaccattgcctacaccaagctctactgcaatttggacaagggagacctggagaatatttgggactgctctatggtaaaacacattgccctgttgctcttcaccaactgcatcctaaactgccctgtggctttcttgtccttctcctctttaataaaccttacatttatcagtcctgaagtaattaagtttatccttctggtggtagtcccacttcctgcatgtctcaatccccttctctacatcttgttcaatcctcactttaaggaggatctggtgagcctgagaaagcaaacctacgtctggacaagatcaaaacacccaagcttgatgtcaattaactctgatgatgtcgaaaaacagtcctgtgactcaactcaagccttggtaacctttaccagctccagcatcacttatgacctgcctcccagttccgtgccatcaccagcttatccagtgactgagagctgccatctttcctctgtggcatttgtcccatgtctctaattaatatgtgaaggaaaatgttttcaaaggttgagaacctgaaaatgtgagattgagtatatcagagcagtaattaataagaagagctgaggtgaaactcggtttaaaaaccaaaaaagaatctctcagttagtaagaaaaggctgaaaacctcttgatacttgagagtgaatataagtctaaatgctgctttgtataatttgttcagctaagggatagatcgatcacactatttaagtgagcccagatcaaaaaagcagattgaaattttctttagaaaagattctccatgatttgaattgcattctctttaaactcaccaatgtaatcattttgggaggagggagaacccacttgctttccaaatgggtttatttaaacccacaaactcaagaggttgttgggggaattaggaaaataagggttttcaatgacctacattgctaggtagaggctgtgatccatgggatttcattctaatgaccatgtgaagatgtttgagtcctcctttgcctttcctcagaaagaatccttctaaggcacaaatcccttagatggataatgtaaggtattgttaactcactcatattgagatcatttttagagataccaggttttatgtatcagcactagatggttccaccctcatgggataaaactgcttacaagtattttgaaagaaaaactgaccaaaattcttaaattgttactaaggcaatcatgcacaggtgacgtatgtcttatctgatttgtttttaactccttggtgcccaaagctcagaagggaattccactgccagcaatgaacatacctggaaaagaaagtaagcaatctgggattttttttctgggttagtaaagaatttttgcaataagttttatcagttgattcaaactgatgtgcatcttaatgatcaaatgtgcacattacataaattaagtccactgatacaacttcttacacatgtatctctagtagctctggcaaacccaatatctgacaccactttggactcaagagactcagtaacgtattatcctgtttatttagcttggttttagctgtgttctctctggataacccacttgatgttaggaacattacttctctgcttattccatattaatactgtgttaggtattttaagaagcaagttattaaataagaaaagtcaaagtattaattcttaccttctattatcctatattagcttcaatacatccaaaccaaatggctgttaggtagatttatttttatataagcatgtttattttgatcagatgttttaacttggatttgaaaaaatacatttatgagatgttttataagatgtgtaaatatagaactgtatttattactatagtaaaggttcagtaacattaaggaccatgataatgataataaaccttgtacagtggcatattctttgatttatattgtgtttctctgcccattttctttaaattcattaactgtatatatgtaaatatatagtacttgtaaatagattccaaatttgcttttctattgggtaaaaaataaatttgtaataaaatgtgtgactatgaaacaaaa

SEQ ID NO: 148346 - DNA, 2800 bp, Homo sapiens
  Payload ID: 9373
  Gene Symbol: LGR5
  Gene Name: leucine-rich repeat containing G protein-coupled receptor 5
  Uniprot ID: O75473
  ENST ID: ENST00000540815
  CDS Start-End: 47-2698
ctgctctccgcccgcgtccggctcgtggccccctacttcgggcaccatggacacctcccggctcggtgtgctcctgtccttgcctgtgctgctgcagctggcgaccgggggcagctctcccaggtctggtgtgttgctgaggggctgccccacacactgtcattgcgagcccgacggcaggatgttgctcagggtggactgctccgacctggggctctcggagctgccttccaacctcagcgtcttcacctcctacctagacctcagtatgaacaacatcagtcagctgctcccgaatcccctgcccagtctccgcttcctggaggagttacgtcttgcgggaaacgctctgacatacattcccaagggagcattcactggcctttacagtcttaaagttcttatgctgcagaataatcagctaagacacgtacccacagaagctctgcagaatttgcgaagccttcaatccctgcgtctggatgctaaccacatcagctatgtgcccccaagctgtttcagtggcctgcattccctgaggcacctgtggctggatgacaatgcgttaacagaaatccccgtccaggcttttagaagtttatcggcattgcaagccatgaccttggccctgaacaaaatacaccacataccagactatgcctttggaaacctctccagcttggtagttctacatctccataacaatagaatccactccctgggaaagaaatgctttgatgggctccacagcctagagactttagatttaaattacaataaccttgatgaattccccactgcaattaggacactctccaaccttaaagaactacatttctatgacaatcccatccagtttgttgggagatctgcttttcaacatttacctgaactaagaacactgactctgaatggtgcctcacaaataactgaatttcctgatttaactggaactgcaaacctggagagtctgactttaactggagcacagatctcatctcttcctcaaaccgtctgcaatcagttacctaatctccaagtgctagatctgtcttacaacctattagaagatttacccagtttttcagtctgccaaaagcttcagaaaattgacctaagacataatgaaatctacgaaattaaagttgacactttccagcagttgcttagcctccgatcgctgaatttggcttggaacaaaattgctattattcaccccaatgcattttccactttgccatccctaataaagctggacctatcgtccaacctcctgtcgtcttttcctataactgggttacatggtttaactcacttaaaattaacaggaaatcatgccttacagagcttgatatcatctgaaaactttccagaactcaaggttatagaaatgccttatgcttaccagtgctgtgcatttggagtgtgtgagaatgcctataagatttctaatcaatggaataaaggtgacaacagcagtatggacgaccttcataagaaagatgctggaatgtttcaggctcaagatgaacgtgaccttgaagatttcctgcttgactttgaggaagacctgaaagcccttcattcagtgcagtgttcaccttccccaggccccttcaaaccctgtgaacacctgcttgatggctggctgatcagaattggagtgtggaccatagcagttctggcacttacttgtaatgctttggtgacttcaacagttttcagatcccctctgtacatttcccccattaaactgttaattggggtcatcgcagcagtgaacatgctcacgggagtctccagtgccgtgctggctggtgtggatgcgttcacttttggcagctttgcacgacatggtgcctggtgggagaatggggttggttgccatgtcattggttttttgtccatttttgcttcagaatcatctgttttcctgcttactctggcagccctggagcgtgggttctctgtgaaatattctgcaaaatttgaaacgaaagctccattttctagcctgaaagtaatcattttgctctgtgccctgctggccttgaccatggccgcagttcccctgctgggtggcagcaagtatggcgcctcccctctctgcctgcctttgccttttggggagcccagcaccatgggctacatggtcgctctcatcttgctcaattccctttgcttcctcatgatgaccattgcctacaccaagctctactgcaatttggacaagggagacctggagaatatttgggactgctctatggtaaaacacattgccctgttgctcttcaccaactgcatcctaaactgccctgtggctttcttgtccttctcctctttaataaaccttacatttatcagtcctgaagtaattaagtttatccttctggtggtagtcccacttcctgcatgtctcaatccccttctctacatcttgttcaatcctcactttaaggaggatctggtgagcctgagaaagcaaacctacgtctggacaagatcaaaacacccaagcttgatgtcaattaactctgatgatgtcgaaaaacagtcctgtgactcaactcaagccttggtaacctttaccagctccagcatcacttatgacctgcctcccagttccgtgccatcaccagcttatccagtgactgagagctgccatctttcctctgtggcatttgtcccatgtctctaattaatatgtgaaggaaaatgttttcaaaggttgagaacctgaaaatgtgagattgagtatatcagagcagtaattaataagaagagctgaggtgaaactcgg

SEQ ID NO: 148347 - DNA, 2664 bp, Homo sapiens
  Payload ID: 9373
  Gene Symbol: LGR5
  Gene Name: leucine-rich repeat containing G protein-coupled receptor 5
  Uniprot ID: O75473
  ENST ID: ENST00000536515
  CDS Start-End: 49-2556
tgctgctctccgcccgcgtccggctcgtggccccctacttcgggcaccatggacacctcccggctcggtgtgctcctgtccttgcctgtgctgctgcagctggcgaccgggggcagctctcccaggtctggtgtgttgctgaggggctgccccacacactgtcattgcgagcccgacggcaggatgttgctcagggtggactgctccgacctggggctctcggagctgccttccaacctcagcgtcttcacctcctacctagacctcagtatgaacaacatcagtcagctgctcccgaatcccctgcccagtctccgcttcctggaggagttacgtcttgcgggaaacgctctgacatacattcccaagggagcattcactggcctttacagtcttaaagttcttatgctgcagaataatcagctaagacacgtacccacagaagctctgcagaatttgcgaagccttcaatccctacatctccataacaatagaatccactccctgggaaagaaatgctttgatgggctccacagcctagagactttagatttaaattacaataaccttgatgaattccccactgcaattaggacactctccaaccttaaagaactaggatttcatagcaacaatatcaggtcgatacctgagaaagcatttgtaggcaacccttctcttattacaatacatttctatgacaatcccatccagtttgttgggagatctgcttttcaacatttacctgaactaagaacactgactctgaatggtgcctcacaaataactgaatttcctgatttaactggaactgcaaacctggagagtctgactttaactggagcacagatctcatctcttcctcaaaccgtctgcaatcagttacctaatctccaagtgctagatctgtcttacaacctattagaagatttacccagtttttcagtctgccaaaagcttcagaaaattgacctaagacataatgaaatctacgaaattaaagttgacactttccagcagttgcttagcctccgatcgctgaatttggcttggaacaaaattgctattattcaccccaatgcattttccactttgccatccctaataaagctggacctatcgtccaacctcctgtcgtcttttcctataactgggttacatggtttaactcacttaaaattaacaggaaatcatgccttacagagcttgatatcatctgaaaactttccagaactcaaggttatagaaatgccttatgcttaccagtgctgtgcatttggagtgtgtgagaatgcctataagatttctaatcaatggaataaaggtgacaacagcagtatggacgaccttcataagaaagatgctggaatgtttcaggctcaagatgaacgtgaccttgaagatttcctgcttgactttgaggaagacctgaaagcccttcattcagtgcagtgttcaccttccccaggccccttcaaaccctgtgaacacctgcttgatggctggctgatcagaattggagtgtggaccatagcagttctggcacttacttgtaatgctttggtgacttcaacagttttcagatcccctctgtacatttcccccattaaactgttaattggggtcatcgcagcagtgaacatgctcacgggagtctccagtgccgtgctggctggtgtggatgcgttcacttttggcagctttgcacgacatggtgcctggtgggagaatggggttggttgccatgtcattggttttttgtccatttttgcttcagaatcatctgttttcctgcttactctggcagccctggagcgtgggttctctgtgaaatattctgcaaaatttgaaacgaaagctccattttctagcctgaaagtaatcattttgctctgtgccctgctggccttgaccatggccgcagttcccctgctgggtggcagcaagtatggcgcctcccctctctgcctgcctttgccttttggggagcccagcaccatgggctacatggtcgctctcatcttgctcaattccctttgcttcctcatgatgaccattgcctacaccaagctctactgcaatttggacaagggagacctggagaatatttgggactgctctatggtaaaacacattgccctgttgctcttcaccaactgcatcctaaactgccctgtggctttcttgtccttctcctctttaataaaccttacatttatcagtcctgaagtaattaagtttatccttctggtggtagtcccacttcctgcatgtctcaatccccttctctacatcttgttcaatcctcactttaaggaggatctggtgagcctgagaaagcaaacctacgtctggacaagatcaaaacacccaagcttgatgtcaattaactctgatgatgtcgaaaaacagtcctgtgactcaactcaagccttggtaacctttaccagctccagcatcacttatgacctgcctcccagttccgtgccatcaccagcttatccagtgactgagagctgccatctttcctctgtggcatttgtcccatgtctctaattaatatgtgaaggaaaatgttttcaaaggttgagaacctgaaaatgtgagattgagtatatcagagcagtaattaataagaagagctgaggtgaaactcggtttaaa

SEQ ID NO: 148348 - DNA, 3406 bp, Homo sapiens
  Payload ID: 9374
  Gene Symbol: LGR6
  Gene Name: leucine-rich repeat containing G protein-coupled receptor 6
  Uniprot ID: Q9HBX8
  ENST ID: ENST00000255432
  CDS Start-End: 85-2832
gaacgcttgtgtctaactgatgctcctaatgcggaagcccctgaaaggcggttgtggtgcaaaggaaaacccacaggccaaggaatgggaagaccaaggttgacacttgtttgtcaagtgtcaataatcatctctgcccgggacctcagcatgaacaacctcacagagcttcagcctggcctcttccaccacctgcgcttcttggaggagctgcgtctctctgggaaccatctctcacacatcccaggacaagcattctctggtctctacagcctgaaaatcctgatgctgcagaacaatcagctgggaggaatccccgcagaggcgctgtgggagctgccgagcctgcagtcgctgcgcctagatgccaacctcatctccctggtcccggagaggagctttgaggggctgtcctccctccgccacctctggctggacgacaatgcactcacggagatccctgtcagggccctcaacaacctccctgccctgcaggccatgaccctggccctcaaccgcatcagccacatccccgactacgcgttccagaatctcaccagccttgtggtgctgcatttgcataacaaccgcatccagcatctggggacccacagcttcgaggggctgcacaatctggagacactagacctgaattataacaagctgcaggagttccctgtggccatccggaccctgggcagactgcaggaactggggttccataacaacaacatcaaggccatcccagaaaaggccttcatggggaaccctctgctacagacgatacacttttatgataacccaatccagtttgtgggaagatcggcattccagtacctgcctaaactccacacactatctctgaatggtgccatggacatccaggagtttccagatctcaaaggcaccaccagcctggagatcctgaccctgacccgcgcaggcatccggctgctcccatcggggatgtgccaacagctgcccaggctccgagtcctggaactgtctcacaatcaaattgaggagctgcccagcctgcacaggtgtcagaaattggaggaaatcggcctccaacacaaccgcatctgggaaattggagctgacaccttcagccagctgagctccctgcaagccctggatcttagctggaacgccatccggtccatccaccccgaggccttctccaccctgcactccctggtcaagctggacctgacagacaaccagctgaccacactgcccctggctggacttgggggcttgatgcatctgaagctcaaagggaaccttgctctctcccaggccttctccaaggacagtttcccaaaactgaggatcctggaggtgccttatgcctaccagtgctgtccctatgggatgtgtgccagcttcttcaaggcctctgggcagtgggaggctgaagaccttcaccttgatgatgaggagtcttcaaaaaggcccctgggcctccttgccagacaagcagagaaccactatgaccaggacctggatgagctccagctggagatggaggactcaaagccacaccccagtgtccagtgtagccctactccaggccccttcaagccctgtgagtacctctttgaaagctggggcatccgcctggccgtgtgggccatcgtgttgctctccgtgctctgcaatggactggtgctgctgaccgtgttcgctggcgggcctgtccccctgcccccggtcaagtttgtggtaggtgcgattgcaggcgccaacaccttgactggcatttcctgtggccttctagcctcagtcgatgccctgacctttggtcagttctctgagtacggagcccgctgggagacggggctaggctgccgggccactggcttcctggcagtacttgggtcggaggcatcggtgctgctgctcactctggccgcagtgcagtgcagcgtctccgtctcctgtgtccgggcctatgggaagtccccctccctgggcagcgttcgagcaggggtcctaggctgcctggcactggcagggctggccgccgcgctgcccctggcctcagtgggagaatacggggcctccccactctgcctgccctacgcgccacctgagggtcagccagcagccctgggcttcaccgtggccctggtgatgatgaactccttctgtttcctggtcgtggccggtgcctacatcaaactgtactgtgacctgccgcggggcgactttgaggccgtgtgggactgcgccatggtgaggcacgtggcctggctcatcttcgcagacgggctcctctactgtcccgtggccttcctcagctttgcctccatgctgggcctcttccctgtcacgcccgaggccgtcaagtctgtcctgctggtggtgctgcccctgcctgcctgcctcaacccactgctgtacctgctcttcaacccccacttccgggatgaccttcggcggcttcggccccgcgcaggggactcagggcccctagcctatgctgcggccggggagctggagaagagctcctgtgattctacccaggccctggtagccttctctgatgtggatctcattctggaagcttctgaagctgggcggccccctgggctggagacctatggcttcccctcagtgaccctcatctcctgtcagcagccaggggcccccaggctggagggcagccattgtgtagagccagaggggaaccactttgggaacccccaaccctccatggatggagaactgctgctgagggcagagggatctacgccagcaggtggaggcttgtcagggggtggcggctttcagccctctggcttggcctttgcttcacacgtgtaaatatccctccccattcttctcttcccctctcttccctttcctctctccccctcggtgaatgatggctgcttctaaaacaaatacaaccaaaactcagcagtgtgatctatagcaggatggcccagtccctggctccactgatcacctctctcctgtgaccatcaccaacgggtgcctcttggcctggctttcccttggccttcctcagcttcaccttgatactgggcctcttccttgtcatgtctgaagctgtggaccagagacctggacttttgtctgcttaagggaaatgagggaagtaaagacagtgaaggggtggagggttgatcagggcacagtggacagggagacctcacagagaaaggcctggaaggtgatttcccgtgtgactcatggataggatacaaaatgtgttccatgtaccattaatcttgacatatgccatgcataaagacttcctattaaaataagctttggaagagattacacatgatgtctttttcttagagattcacagtgcatgttagtgtaataaagagataagtcctacagtagtaaaatctattgaactttg
